United States Patent Application Publication US 2024/0327476 A1 - sequence listing, part 55

SEQ ID NO: 104563 - DNA, 1035 bp, synthetic construct
  misc_feature 1..1035: note = Description of Artificial Sequence: Synthetic coding sequence
  source 1..1035: mol_type = other DNA
atgggcttcaacctgaccttccacctgagctacaagttcagactgctgctgctgctgaccctgtgcctgaccgtggtgggctgggccaccagcaactacttcgtgggcgccatccaggagatccccaaggccaaggagttcatggccaacttccacaagaccctgatcctgggcaagggcaagaccctgaccaacgaggccagcaccaagaaggtggagctggacaactgccccagcgtgagcccctacctgagaggccagagcaagctgatcttcaagcccgacctgaccctggaggaggtgcaggccgagaaccccaaggtgagcagaggcagatacagaccccaggagtgcaaggccctgcagagagtggccatcctggtgccccacagaaacagagagaagcacctgatgtacctgctggagcacctgcaccccttcctgcagagacagcagctggactacggcatctacgtgatccaccaggccgagggcaagaagttcaacagagccaagctgctgaacgtgggctacctggaggccctgaaggaggagaactgggactgcttcatcttccacgacgtggacctggtgcccgagaacgacttcaacctgtacaagtgcgaggagcaccccaagcacctggtggtgggcagaaacagcaccggctacagactgagatacagcggctacttcggcggcgtgaccgccctgagcagagagcagttcttcaaggtgaacggcttcagcaacaactactggggctggggcggcgaggacgacgacctgagactgagagtggagctgcagagaatgaagatcagcagacccctgcccgaggtgggcaagtacaccatggtgttccacaccagagacaagggcaacgaggtgaacgccgagagaatgaagctgctgcaccaggtgagcagagtgtggagaaccgacggcctgagcagctgcagctacaagctggtgagcgtggagcacaaccccctgtacatcaacatcaccgtggacttctggttcggcgcctag

SEQ ID NO: 104564 - DNA, 1035 bp, synthetic construct; identical to SEQ ID NO: 104563
  misc_feature 1..1035: note = Description of Artificial Sequence: Synthetic coding sequence
  source 1..1035: mol_type = other DNA

SEQ ID NO: 104565 - DNA, 21 bp, synthetic construct
  misc_feature 1..21: note = Description of Artificial Sequence: Synthetic coding sequence
  source 1..21: mol_type = other DNA
atgggcttcaacctgacctag

SEQ ID NO: 104566 - skipped

SEQ ID NO: 104567 - DNA, 168 bp, synthetic construct
  misc_feature 1..168: note = Description of Artificial Sequence: Synthetic coding sequence
  source 1..168: mol_type = other DNA
atgggcttcaacctgaccttccacctgagctacaagttcagactgctgctgctgctgaccctgtgcctgaccgtggtgggctgggccaccagcaactacttcgtgggcgccatccaggagatccccaaggccaaggagttcatggccaacttccacaagaccctgtag

SEQ ID NO: 104568 - DNA, 66 bp, synthetic construct
  misc_feature 1..66: note = Description of Artificial Sequence: Synthetic coding sequence
  source 1..66: mol_type = other DNA
atgggcttcaacctgaccttccacctgagctacaagttcagactgctgctgctgctgaccctgtag

SEQ ID NO: 104569 - DNA, 411 bp, synthetic construct
  misc_feature 1..411: note = Description of Artificial Sequence: Synthetic coding sequence
  source 1..411: mol_type = other DNA
atgggcttcaacctgaccttccacctgagctacaagttcagactgctgctgctgctgaccctgtgcctgaccgtggtgggctgggccaccagcaactacttcgtgggcgccatccaggagatccccaaggccaaggagttcatggccaacttccacaagaccctgatcctgggcaagggcaagaccctgaccaacgaggccagcaccaagaaggtggagctggacaactgccccagcgtgagcccctacctgagaggccagagcaagctgatcttcaagcccgacctgaccctggaggaggtgcaggccgagaaccccaaggtgagcagaggcagatacagaccccaggagtgcaaggccctgcagagagtggccatcctggtgccccacagaaacagagagaagcactag

SEQ ID NO: 104570 - DNA, 357 bp, synthetic construct
  misc_feature 1..357: note = Description of Artificial Sequence: Synthetic coding sequence
  source 1..357: mol_type = other DNA
atgggcttcaacctgaccttccacctgagctacaagttcagactgctgctgctgctgaccctgtgcctgaccgtggtgggctgggccaccagcaactacttcgtgggcgccatccaggagatccccaaggccaaggagttcatggccaacttccacaagaccctgatcctgggcaagggcaagaccctgaccaacgaggccagcaccaagaaggtggagctggacaactgccccagcgtgagcccctacctgagaggccagagcaagctgatcttcaagcccgacctgaccctggaggaggtgcaggccgagaaccccaaggtgagcagaggcagatacagaccccaggagtgctag

SEQ ID NO: 104571 - DNA, 1035 bp, synthetic construct; identical to SEQ ID NO: 104563
  misc_feature 1..1035: note = Description of Artificial Sequence: Synthetic coding sequence
  source 1..1035: mol_type = other DNA

SEQ ID NO: 104572 - DNA, 129 bp, synthetic construct
  misc_feature 1..129: note = Description of Artificial Sequence: Synthetic coding sequence
  source 1..129: mol_type = other DNA
atgggcttcaacctgaccttccacctgagctacaagttcagactgctgctgctgctgaccctgtgcctgaccgtggtgggctgggccaccagcaactacttcgtgggcgccatccaggagatcccctag

SEQ ID NO: 104573 - DNA, 1167 bp, synthetic construct
  misc_feature 1..1167: note = Description of Artificial Sequence: Synthetic coding sequence
  source 1..1167: mol_type = other DNA
atgagagccagaagaggcctgctgagactgcccagaagaagcctgctggccgccctgttcttcttcagcctgagcagcagcctgctgtacttcgtgtacgtggcccccggcatcgtgaacacctacctgttcatgatgcaggcccagggcatcctgatcagagacaacgtgagaaccatcggcgcccaggtgtacgagcaggtgctgagaagcgcctacgccaagagaaacagcagcgtgaacgacagcgactaccccctggacctgaaccacagcgagaccttcctgcagaccaccaccttcctgcccgaggacttcacctacttcgccaaccacacctgccccgagagactgcccagcatgaagggccccatcgacatcaacatgagcgagatcggcatggactacatccacgagctgttcagcaaggaccccaccatcaagctgggcggccactggaagcccagcgactgcatgcccagatggaaggtggccatcctgatccccttcagaaacagacacgagcacctgcccgtgctgttcagacacctgctgcccatgctgcagagacagagactgcagttcgccttctacgtggtggagcaggtgggcacccagcccttcaacagagccatgctgttcaacgtgggcttccaggaggccatgaaggacctggactgggactgcctgatcttccacgacgtggaccacatccccgagagcgacagaaactactacggctgcggccagatgcccagacacttcgccaccaagctggacaagtacatgtacctgctgccctacaccgagttcttcggcggcgtgagcggcctgaccgtggagcagttcagaaagatcaacggcttccccaacgccttctggggctggggcggcgaggacgacgacctgtggaacagagtgcagaacgccggctacagcgtgagcagacccgagggcgacaccggcaagtacaagagcatcccccaccaccacagaggcgaggtgcagttcctgggcagatacgccctgctgagaaagagcaaggagagacagggcctggacggcctgaacaacctgaactacttcgccaacatcacctacgacgccctgtacaagaacatcaccgtgaacctgacccccgagctggcccaggtgaacgagtactag

SEQ ID NO: 104574 - DNA, 1032 bp, synthetic construct
  misc_feature 1..1032: note = Description of Artificial Sequence: Synthetic coding sequence
  source 1..1032: mol_type = other DNA
atgagcgtgctgagaagaatgatgagagtgagcaacagaagcctgctggccttcatcttcttcttcagcctgagcagcagctgcctgtacttcatctacgtggcccccggcatcgactaccccgagggcaacaacagcagcgactacctggtgcagaccaccacctacctgcccgagaacttcacctacagcccctacctgccctgccccgagaagctgccctacatgagaggcttcctgaacgtgaacgtgagcgaggtgagcttcgacgagatccaccagctgttcagcaaggacctggacatcgagcccggcggccactggagacccaaggactgcaagcccagatggaaggtggccgtgctgatccccttcagaaacagacacgagcacctgcccatcttcttcctgcacctgatccccatgctgcagaagcagagactggagttcgccttctacgtgatcgagcagaccggcacccagcccttcaacagagccatgctgttcaacgtgggcttcaaggaggccatgaaggacagcgtgtgggactgcgtgatcttccacgacgtggaccacctgcccgagaacgacagaaactactacggctgcggcgagatgcccagacacttcgccgccaagctggacaagtacatgtacatcctgccctacaaggagttcttcggcggcgtgagcggcctgaccgtggagcagttcagaaagatcaacggcttccccaacgccttctggggctggggcggcgaggacgacgacctgtggaacagagtgcactacgccggctacaacgtgaccagacccgagggcgacctgggcaagtacaagagcatcccccaccaccacagaggcgaggtgcagttcctgggcagatacaagctgctgagatacagcaaggagagacagtacatcgacggcctgaacaacctgatctacagacccaagatcctggtggacagactgtacaccaacatcagcgtgaacctgatgcccgagctggcccccatcgaggactactag

SEQ ID NO: 104575 - DNA, 1149 bp, synthetic construct
  misc_feature 1..1149: note = Description of Artificial Sequence: Synthetic coding sequence
  source 1..1149: mol_type = other DNA
atgagcgtgctgagaagaatgatgagagtgagcaacagaagcctgctggccttcatcttcttcttcagcctgagcagcagctgcctgtacttcatctacgtggcccccggcatcgccaacacctacctgttcatggtgcaggccagaggcatcatgctgagagagaacgtgaagaccatcggccacatgatcagactgtacaccaacaagaacagcaccctgaacggcaccgactaccccgagggcaacaacagcagcgactacctggtgcagaccaccacctacctgcccgagaacttcacctacagcccctacctgccctgccccgagaagctgccctacatgagaggcttcctgaacgtgaacgtgagcgaggtgagcttcgacgagatccaccagctgttcagcaaggacctggacatcgagcccggcggccactggagacccaaggactgcaagcccagatggaaggtggccgtgctgatccccttcagaaacagacacgagcacctgcccatcttcttcctgcacctgatccccatgctgcagaagcagagactggagttcgccttctacgtgatcgagcagaccggcacccagcccttcaacagagccatgctgttcaacgtgggcttcaaggaggccatgaaggacagcgtgtgggactgcgtgatcttccacgacgtggaccacctgcccgagaacgacagaaactactacggctgcggcgagatgcccagacacttcgccgccaagctggacaagtacatgtacatcctgccctacaaggagttcttcggcggcgtgagcggcctgaccgtggagcagttcagaaagatcaacggcttccccaacgccttctggggctggggcggcgaggacgacgacctgtggaacagagtgcactacgccggctacaacgtgaccagacccgagggcgacctgggcaagtacaagagcatcccccaccaccacagaggcgaggtgcagttcctgggcagatacaagctgctgagatacagcaaggagagacagtacatcgacggcctgaacaacctgatctacagacccaagatcctggtggacagactgtacaccaacatcagcgtgaacctgatgcccgagctggcccccatcgaggactactag

SEQ ID NO: 104576 - DNA, 1032 bp, synthetic construct
  misc_feature 1..1032: note = Description of Artificial Sequence: Synthetic coding sequence
  source 1..1032: mol_type = other DNA
atgagcgtgctgagaagaatgatgagagtgagcaacagaagcctgctggccttcatcttcttcttcagcctgagcagcagctgcctgtacttcatctacgtggcccccggcatcgccaacacctacctgttcatggtgcaggccagaggcatcatgctgagagagaacgtgaagaccatcggccacatgatcagactgtacaccaacaagaacagcaccctgaacggcaccgactaccccgagggcaacaacagcagcgactacctggtgcagaccaccacctacctgcccgagaacttcacctacagcccctacctgccctgccccgagaagctgccctacatgagaggcttcctgaacgtgaacgtgagcgaggtgagcttcgacgagatccaccagctgttcagcaaggacctggacatcgagcccggcggccactggagacccaaggactgcaagcccagatggaagaccggcacccagcccttcaacagagccatgctgttcaacgtgggcttcaaggaggccatgaaggacagcgtgtgggactgcgtgatcttccacgacgtggaccacctgcccgagaacgacagaaactactacggctgcggcgagatgcccagacacttcgccgccaagctggacaagtacatgtacatcctgccctacaaggagttcttcggcggcgtgagcggcctgaccgtggagcagttcagaaagatcaacggcttccccaacgccttctggggctggggcggcgaggacgacgacctgtggaacagagtgcactacgccggctacaacgtgaccagacccgagggcgacctgggcaagtacaagagcatcccccaccaccacagaggcgaggtgcagttcctgggcagatacaagctgctgagatacagcaaggagagacagtacatcgacggcctgaacaacctgatctacagacccaagatcctggtggacagactgtacaccaacatcagcgtgaacctgatgcccgagctggcccccatcgaggactactag

SEQ ID NO: 104577 - DNA, 1047 bp, synthetic construct
  misc_feature 1..1047: note = Description of Artificial Sequence: Synthetic coding sequence
  source 1..1047: mol_type = other DNA
atggccgagaaggtgctggtgaccggcggcgccggctacatcggcagccacaccgtgctggagctgctggaggccggctacctgcccgtggtgatcgacaacttccacaacgccttcagaggcggcggcagcctgcccgagagcctgagaagagtgcaggagctgaccggcagaagcgtggagttcgaggagatggacatcctggaccagggcgccctgcagagactgttcaagaagtacagcttcatggccgtgatccacttcgccggcctgaaggccgtgggcgagagcgtgcagaagcccctggactactacagagtgaacctgaccggcaccatccagctgctggagatcatgaaggcccacggcgtgaagaacctggtgttcagcagcagcgccaccgtgtacggcaacccccagtacctgcccctggacgaggcccaccccaccggcggctgcaccaacccctacggcaagagcaagttcttcatcgaggagatgatcagagacctgtgccaggccgacaagacctggaacgccgtgctgctgagatacttcaaccccaccggcgcccacgccagcggctgcatcggcgaggacccccagggcatccccaacaacctgatgccctacgtgagccaggtggccatcggcagaagagaggccctgaacgtgttcggcaacgactacgacaccgaggacggcaccggcgtgagagactacatccacgtggtggacctggccaagggccacatcgccgccctgagaaagctgaaggagcagtgcggctgcagaatctacaacctgggcaccggcaccggctacagcgtgctgcagatggtgcaggccatggagaaggccagcggcaagaagatcccctacaaggtggtggccagaagagagggcgacgtggccgcctgctacgccaaccccagcctggcccaggaggagctgggctggaccgccgccctgggcctggacagaatgtgcgaggacctgtggagatggcagaagcagaaccccagcggcttcggcacccaggcctag

SEQ ID NO: 104578 - DNA, 777 bp, synthetic construct
  misc_feature 1..777: note = Description of Artificial Sequence: Synthetic coding sequence
  source 1..777: mol_type = other DNA
atggacatcctggaccagggcgccctgcagagactgttcaagaagtacagcttcatggccgtgatccacttcgccggcctgaaggccgtgggcgagagcgtgcagaagcccctggactactacagagtgaacctgaccggcaccatccagctgctggagatcatgaaggcccacggcgtgaagaacctggtgttcagcagcagcgccaccgtgtacggcaacccccagtacctgcccctggacgaggcccaccccaccggcggctgcaccaacccctacggcaagagcaagttcttcatcgaggagatgatcagagacctgtgccaggccgacaagacctggaacgccgtgctgctgagatacttcaaccccaccggcgcccacgccagcggctgcatcggcgaggacccccagggcatccccaacaacctgatgccctacgtgagccaggtggccatcggcagaagagaggccctgaacgtgttcggcaacgactacgacaccgaggacggcaccggcgtgagagactacatccacgtggtggacctggccaagggccacatcgccgccctgagaaagctgaaggagcagtgcggctgcagaatcccctacaaggtggtggccagaagagagggcgacgtggccgcctgctacgccaaccccagcctggcccaggaggagctgggctggaccgccgccctgggcctggacagaatgtgcgaggacctgtggagatggcagaagcagaaccccagcggcttcggcacccaggcctag

SEQ ID NO: 104579 - DNA, 684 bp, synthetic construct
  misc_feature 1..684: note = Description of Artificial Sequence: Synthetic coding sequence
  source 1..684: mol_type = other DNA
atggacatcctggaccagggcgccctgcagagactgttcaagaagtacagcttcatggccgtgatccacttcgccggcctgaaggccgtgggcgagagcgtgcagaagcccctggactactacagagtgaacctgaccggcaccatccagctgctggagatcatgaaggcccacggcgtgaagaacctggtgttcagcagcagcgccaccgtgtacggcaacccccagtacctgcccctggacgaggcccaccccaccggcggctgcaccaacccctacggcaagagcaagttcttcatcgaggagatgatcagagacctgtgccaggccgacaagacctggaacgccgtgctgctgagatacttcaaccccaccggcgcccacgccagcggctgcatcggcgaggacccccagggcatccccaacaacctgatgccctacgtgagccaggtggccatcggcagaagagaggccctgaacgtgttcggcaacgactacgacaccgaggacggcaccggcgtgagagactacatccacgtggtggacctggccaagggccacatcgccgccctgagaaagctgaaggagcagtgcggctgcagaatctacaacctgggcaccggcaccggctacagcgtgctgcagatggtgcaggccatggagaaggccagcggcaagaagtag

SEQ ID NO: 104580 - DNA, 588 bp, synthetic construct
  misc_feature 1..588: note = Description of Artificial Sequence: Synthetic coding sequence
  source 1..588: mol_type = other DNA
atggccgagaaggtgctggtgaccggcggcgccggctacatcggcagccacaccgtgctggagctgctggaggccggctacctgcccgtggtgatcgacaacttccacaacgccttcagaggcggcggcagcctgcccgagagcctgagaagagtgcaggagctgaccggcagaagcgtggagttcgaggagatggacatcctggaccagggcgccctgcagagactgttcaagaagtacagcttcatggccgtgatccacttcgccggcctgaaggccgtgggcgagagcgtgcagaagcccctggactactacagagtgaacctgaccggcaccatccagctgctggagatcatgaaggcccacggcgtgaagaacctggtgttcagcagcagcgccaccgtgtacggcaacccccagtacctgcccctggacgaggcccaccccaccggcggctgcaccaacccctacggcaagagcaagttcttcatcgaggagatgatcagagacctgtgccaggccgacaagacctggaacgccgtgctgctgagatacttcaaccccaccggcgcccacgccagcggctag

SEQ ID NO: 104581 - DNA, 720 bp, synthetic construct
  misc_feature 1..720: note = Description of Artificial Sequence: Synthetic coding sequence
  source 1..720: mol_type = other DNA
atggacatcctggaccagggcgccctgcagagactgttcaagaagtacagcttcatggccgtgatccacttcgccggcctgaaggccgtgggcgagagcgtgcagaagcccctggactactacagagtgaacctgaccggcaccatccagctgctggagatcatgaaggcccacggcgtgaagaacctggtgttcagcagcagcgccaccgtgtacggcaacccccagtacctgcccctggacgaggcccaccccaccggcggctgcaccaacccctacggcaagagcaagttcttcatcgaggagatgatcagagacctgtgccaggccgacaagacctggaacgccgtgctgctgagatacttcaaccccaccggcgcccacgccagcggctgcatcggcgaggacccccagggcatccccaacaacctgatgccctacgtgagccaggtggccatcggcagaagagaggccctgaacgtgttcggcaacgactacgacaccgaggacggcaccggcgtgagagactacatccacgtggtggacctggccaagggccacatcgccgccctgagaaagctgaaggagcagtgcggctgcagaatcccctacaaggtggtggccagaagagagggcgacgtggccgcctgctacgccaaccccagcctggcccaggaggagctgggctggaccgccgccctgggcctggacagaatgtag

SEQ ID NO: 104582 - DNA, 585 bp, synthetic construct
  misc_feature 1..585: note = Description of Artificial Sequence: Synthetic coding sequence
  source 1..585: mol_type = other DNA
atggccgagaaggtgctggtgaccggcggcgccggctacatcggcagccacaccgtgctggagctgctggaggccggctacctgcccgtggtgatcgacaacttccacaacgccttcagaggcggcggcagcctgcccgagagcctgagaagagtgcaggagctgaccggcagaagcgtggagttcgaggagatggacatcctggaccagggcgccctgcagagactgttcaagaagtacagcttcatggccgtgatccacttcgccggcctgaaggccgtgggcgagagcgtgcagaagcccctggactactacagagtgaacctgaccggcaccatccagctgctggagatcatgaaggcccacggcgtgaagaacctggtgttcagcagcagcgccaccgtgtacggcaacccccagtacctgcccctggacgaggcccaccccaccggcggctgcaccaacccctacggcaagagcaagttcttcatcgaggagatgatcagagacctgtgccaggccgacaagacctggaacgccgtgctgctgagatacttcaaccccaccggcgcccacgccagctag

SEQ ID NO: 104583 - DNA, 327 bp, synthetic construct
  misc_feature 1..327: note = Description of Artificial Sequence: Synthetic coding sequence
  source 1..327: mol_type = other DNA
gtggccatcggcagaagagaggccctgaacgtgttcggcaacgactacgacaccgaggacggcaccggcgtgagagactacatccacgtggtggacctggccaagggccacatcgccgccctgagaaagctgaaggagcagtgcggctgcagaatcccctacaaggtggtggccagaagagagggcgacgtggccgcctgctacgccaaccccagcctggcccaggaggagctgggctggaccgccgccctgggcctggacagaatgtgcgaggacctgtggagatggcagaagcagaaccccagcggcttcggcacccaggcctag

SEQ ID NO: 104584 - DNA, 1119 bp, synthetic construct
  misc_feature 1..1119: note = Description of Artificial Sequence: Synthetic coding sequence
  source 1..1119: mol_type = other DNA
atgaagtacctgagacacagaagacccaacgccaccctgatcctggccatcggcgccttcaccctgctgctgttcagcctgctggtgagcccccccacctgcaaggtgcaggagcagccccccgccatccccgaggccctggcctggcccaccccccccaccagacccgcccccgccccctgccacgccaacaccagcatggtgacccaccccgacttcgccacccagccccagcacgtgcagaacttcctgctgtacagacactgcagacacttccccctgctgcaggacgtgccccccagcaagtgcgcccagcccgtgttcctgctgctggtgatcaagagcagccccagcaactacgtgagaagagagctgctgagaagaacctggggcagagagagaaaggtgagaggcctgcagctgagactgctgttcctggtgggcaccgccagcaacccccacgaggccagaaaggtgaacagactgctggagctggaggcccagacccacggcgacatcctgcagtgggacttccacgacagcttcttcaacctgaccctgaagcaggtgctgttcctgcagtggcaggagaccagatgcgccaacgccagcttcgtgctgaacggcgacgacgacgtgttcgcccacaccgacaacatggtgttctacctgcaggaccacgaccccggcagacacctgttcgtgggccagctgatccagaacgtgggccccatcagagccttctggagcaagtactacgtgcccgaggtggtgacccagaacgagagataccccccctactgcggcggcggcggcttcctgctgagcagattcaccgccgccgccctgagaagagccgcccacgtgctggacatcttccccatcgacgacgtgttcctgggcatgtgcctggagctggagggcctgaagcccgccagccacagcggcatcagaaccagcggcgtgagagcccccagccagagactgagcagcttcgacccctgcttctacagagacctgctgctggtgcacagattcctgccctacgagatgctgctgatgtgggacgccctgaaccagcccaacctgacctgcggcaaccagacccagatctactag

SEQ ID NO: 104585 - DNA, 1137 bp, synthetic construct
  misc_feature 1..1137: note = Description of Artificial Sequence: Synthetic coding sequence
  source 1..1137: mol_type = other DNA
atgctgcccccccagcccagcgccgcccaccagggcagaggcggcagaagcggcctgctgcccaagggccccgccatgctgtgcagactgtgctggctggtgagctacagcctggccgtgctgctgctgggctgcctgctgttcctgagaaaggccgccaagcccgccggcgaccccaccgcccaccagcccttctgggccccccccacccccagacacagcagatgcccccccaaccacaccgtgagcagcgccagcctgagcctgcccagcagacacagactgttcctgacctacagacactgcagaaacttcagcatcctgctggagcccagcggctgcagcaaggacaccttcctgctgctggccatcaagagccagcccggccacgtggagagaagagccgccatcagaagcacctggggcagagtgggcggctgggccagaggcagacagctgaagctggtgttcctgctgggcgtggccggcagcgccccccccgcccagctgctggcctacgagagcagagagttcgacgacatcctgcagtgggacttcaccgaggacttcttcaacctgaccctgaaggagctgcacctgcagagatgggtggtggccgcctgcccccaggcccacttcatgctgaagggcgacgacgacgtgttcgtgcacgtgcccaacgtgctggagttcctggacggctgggaccccgcccaggacctgctggtgggcgacgtgatcagacaggccctgcccaacagaaacaccaaggtgaagtacttcatcccccccagcatgtacagagccacccactaccccccctacgccggcggcggcggctacgtgatgagcagagccaccgtgagaagactgcaggccatcatggaggacgccgagctgttccccatcgacgacgtgttcgtgggcatgtgcctgagaagactgggcctgagccccatgcaccacgccggcttcaagaccttcggcatcagaagacccctggaccccctggacccctgcctgtacagaggcctgctgctggtgcacagactgagccccctggagatgtggaccatgtgggccctggtgaccgacgagggcctgaagtgcgccgccggccccatcccccagagatag

SEQ ID NO: 104586 - DNA, 1062 bp, synthetic construct
  misc_feature 1..1062: note = Description of Artificial Sequence: Synthetic coding sequence
  source 1..1062: mol_type = other DNA
atgctgtgcagactgtgctggctggtgagctacagcctggccgtgctgctgctgggctgcctgctgttcctgagaaaggccgccaagcccgccggcgaccccaccgcccaccagcccttctgggccccccccacccccagacacagcagatgcccccccaaccacaccgtgagcagcgccagcctgagcctgcccagcagacacagactgttcctgacctacagacactgcagaaacttcagcatcctgctggagcccagcggctgcagcaaggacaccttcctgctgctggccatcaagagccagcccggccacgtggagagaagagccgccatcagaagcacctggggcagagtgggcggctgggccagaggcagacagctgaagctggtgttcctgctgggcgtggccggcagcgccccccccgcccagctgctggcctacgagagcagagagttcgacgacatcctgcagtgggacttcaccgaggacttcttcaacctgaccctgaaggagctgcacctgcagagatgggtggtggccgcctgcccccaggcccacttcatgctgaagggcgacgacgacgtgttcgtgcacgtgcccaacgtgctggagttcctggacggctgggaccccgcccaggacctgctggtgggcgacgtgatcagacaggccctgcccaacagaaacaccaaggtgaagtacttcatcccccccagcatgtacagagccacccactaccccccctacgccggcggcggcggctacgtgatgagcagagccaccgtgagaagactgcaggccatcatggaggacgccgagctgttccccatcgacgacgtgttcgtgggcatgtgcctgagaagactgggcctgagccccatgcaccacgccggcttcaagaccttcggcatcagaagacccctggaccccctggacccctgcctgtacagaggcctgctgctggtgcacagactgagccccctggagatgtggaccatgtgggccctggtgaccgacgagggcctgaagtgcgccgccggccccatcccccagagatag

SEQ ID NO: 104587 - DNA, 1062 bp, synthetic construct; identical to SEQ ID NO: 104586
  misc_feature 1..1062: note = Description of Artificial Sequence: Synthetic coding sequence
  source 1..1062: mol_type = other DNA

SEQ ID NO: 104588 - DNA, 1485 bp, synthetic construct
  misc_feature 1..1485: note = Description of Artificial Sequence: Synthetic coding sequence
  source 1..1485: mol_type = other DNA
atgttcgagatcaagaagatctgctgcatcggcgccggctacgtgggcggccccacctgcagcgtgatcgcccacatgtgccccgagatcagagtgaccgtggtggacgtgaacgagagcagaatcaacgcctggaacagccccaccctgcccatctacgagcccggcctgaaggaggtggtggagagctgcagaggcaagaacctgttcttcagcaccaacatcgacgacgccatcaaggaggccgacctggtgttcatcagcgtgaacacccccaccaagacctacggcatgggcaagggcagagccgccgacctgaagtacatcgaggcctgcgccagaagaatcgtgcagaacagcaacggctacaagatcgtgaccgagaagagcaccgtgcccgtgagagccgccgagagcatcagaagaatcttcgacgccaacaccaagcccaacctgaacctgcaggtgctgagcaaccccgagttcctggccgagggcaccgccatcaaggacctgaagaaccccgacagagtgctgatcggcggcgacgagacccccgagggccagagagccgtgcaggccctgtgcgccgtgtacgagcactgggtgcccagagagaagatcctgaccaccaacacctggagcagcgagctgagcaagctggccgccaacgccttcctggcccagagaatcagcagcatcaacagcatcagcgccctgtgcgaggccaccggcgccgacgtggaggaggtggccaccgccatcggcatggaccagagaatcggcaacaagttcctgaaggccagcgtgggcttcggcggcagctgcttccagaaggacgtgctgaacctggtgtacctgtgcgaggccctgaacctgcccgaggtggccagatactggcagcaggtgatcgacatgaacgactaccagagaagaagattcgccagcagaatcatcgacagcctgttcaacaccgtgaccgacaagaagatcgccatcctgggcttcgccttcaagaaggacaccggcgacaccagagagagcagcagcatctacatcagcaagtacctgatggacgagggcgcccacctgcacatctacgaccccaaggtgcccagagagcagatcgtggtggacctgagccaccccggcgtgagcgaggacgaccaggtgagcagactggtgaccatcagcaaggacccctacgaggcctgcgacggcgcccacgccgtggtgatctgcaccgagtgggacatgttcaaggagctggactacgagagaatccacaagaagatgctgaagcccgccttcatcttcgacggcagaagagtgctggacggcctgcacaacgagctgcagaccatcggcttccagatcgagaccatcggcaagaaggtgagcagcaagagaatcccctacgcccccagcggcgagatccccaagttcagcctgcaggacccccccaacaagaagcccaaggtgtag

SEQ ID NO: 104589 - DNA, 1284 bp, synthetic construct
  misc_feature 1..1284: note = Description of Artificial Sequence: Synthetic coding sequence
  source 1..1284: mol_type = other DNA
atgttcgagatcaagaagatctgctgcatcggcgccggctacgtgggcggccccacctgcagcgtgatcgcccacatgtgccccgagatcagagtgaccgtggtggacgtgaacgagagcagaatcaacgcctggaacagccccaccctgcccatctacgagcccggcctgaaggaggtggtggagagctgcagaggcaagaacctgttcttcagcaccaacatcgacgacgccatcaaggaggccgacctggtgttcatcagcgtgctgagcaaccccgagttcctggccgagggcaccgccatcaaggacctgaagaaccccgacagagtgctgatcggcggcgacgagacccccgagggccagagagccgtgcaggccctgtgcgccgtgtacgagcactgggtgcccagagagaagatcctgaccaccaacacctggagcagcgagctgagcaagctggccgccaacgccttcctggcccagagaatcagcagcatcaacagcatcagcgccctgtgcgaggccaccggcgccgacgtggaggaggtggccaccgccatcggcatggaccagagaatcggcaacaagttcctgaaggccagcgtgggcttcggcggcagctgcttccagaaggacgtgctgaacctggtgtacctgtgcgaggccctgaacctgcccgaggtggccagatactggcagcaggtgatcgacatgaacgactaccagagaagaagattcgccagcagaatcatcgacagcctgttcaacaccgtgaccgacaagaagatcgccatcctgggcttcgccttcaagaaggacaccggcgacaccagagagagcagcagcatctacatcagcaagtacctgatggacgagggcgcccacctgcacatctacgaccccaaggtgcccagagagcagatcgtggtggacctgagccaccccggcgtgagcgaggacgaccaggtgagcagactggtgaccatcagcaaggacccctacgaggcctgcgacggcgcccacgccgtggtgatctgcaccgagtgggacatgttcaaggagctggactacgagagaatccacaagaagatgctgaagcccgccttcatcttcgacggcagaagagtgctggacggcctgcacaacgagctgcagaccatcggcttccagatcgagaccatcggcaagaaggtgagcagcaagagaatcccctacgcccccagcggcgagatccccaagttcagcctgcaggacccccccaacaagaagcccaaggtgtag

SEQ ID NO: 104590 - DNA, 168 bp, synthetic construct
  misc_feature 1..168: note = Description of Artificial Sequence: Synthetic coding sequence
  source 1..168: mol_type = other DNA
atgttcgagatcaagaagatctgctgcatcggcgccggctacgtgggcggccccacctgcagcgtgatcgcccacatgtgccccgagatcagagtgaccgtggtggacgtgaacgagagcagaatcaacgcctggaacagccccaccctgcccatctacgaggactag

SEQ ID NO: 104591 - DNA, 258 bp, synthetic construct
  misc_feature 1..258: note = Description of Artificial Sequence: Synthetic coding sequence
  source 1..258: mol_type = other DNA
atgttcgagatcaagaagatctgctgcatcggcgccggctacgtgggcggccccacctgcagcgtgatcgcccacatgtgccccgagatcagagtgaccgtggtggacgtgaacgagagcagaatcaacgcctggaacagccccaccctgcccatctacgagcccggcctgaaggaggtggtggagagctgcagaggcaagaacctgttcttcagcaccaacatcgacgacgccatcaaggaggccgacctggtgtag

SEQ ID NO: 104592 - DNA, 1485 bp, synthetic construct; identical to SEQ ID NO: 104588
  misc_feature 1..1485: note = Description of Artificial Sequence: Synthetic coding sequence
  source 1..1485: mol_type = other DNA

SEQ ID NO: 104593 - DNA, 1194 bp, synthetic construct
  misc_feature 1..1194: note = Description of Artificial Sequence: Synthetic coding sequence
  source 1..1194: mol_type = other DNA
atgggcaagggcagagccgccgacctgaagtacatcgaggcctgcgccagaagaatcgtgcagaacagcaacggctacaagatcgtgaccgagaagagcaccgtgcccgtgagagccgccgagagcatcagaagaatcttcgacgccaacaccaagcccaacctgaacctgcaggtgctgagcaaccccgagttcctggccgagggcaccgccatcaaggacctgaagaaccccgacagagtgctgatcggcggcgacgagacccccgagggccagagagccgtgcaggccctgtgcgccgtgtacgagcactgggtgcccagagagaagatcctgaccaccaacacctggagcagcgagctgagcaagctggccgccaacgccttcctggcccagagaatcagcagcatcaacagcatcagcgccctgtgcgaggccaccggcgccgacgtggaggaggtggccaccgccatcggcatggaccagagaatcggcaacaagttcctgaaggccagcgtgggcttcggcggcagctgcttccagaaggacgtgctgaacctggtgtacctgtgcgaggccctgaacctgcccgaggtggccagatactggcagcaggtgatcgacatgaacgactaccagagaagaagattcgccagcagaatcatcgacagcctgttcaacaccgtgaccgacaagaagatcgccatcctgggcttcgccttcaagaaggacaccggcgacaccagagagagcagcagcatctacatcagcaagtacctgatggacgagggcgcccacctgcacatctacgaccccaaggtgcccagagagcagatcgtggtggacctgagccaccccggcgtgagcgaggacgaccaggtgagcagactggtgaccatcagcaaggacccctacgaggcctgcgacggcgcccacgccgtggtgatctgcaccgagtgggacatgttcaaggagctggactacgagagaatccacaagaagatgctgaagcccgccttcatcttcgacggcagaagagtgctggacggcctgcacaacgagctgcagaccatcggcttccagatcgagaccatcggcaagaaggtgagcagcaagagaatcccctacgcccccagcggcgagatccccaagttcagcctgcaggacccccccaacaagaagcccaaggtgtag

SEQ ID NO: 104594 - DNA, 393 bp, synthetic construct
  misc_feature 1..393: note = Description of Artificial Sequence: Synthetic coding sequence
  source 1..393: mol_type = other DNA
atgttcgagatcaagaagatctgctgcatcggcgccggctacgtgggcggccccacctgcagcgtgatcgcccacatgtgccccgagatcagagtgaccgtggtggacgtgaacgagagcagaatcaacgcctggaacagccccaccctgcccatctacgagcccggcctgaaggaggtggtggagagctgcagaggcaagaacctgttcttcagcaccaacatcgacgacgccatcaaggaggccgacctggtgttcatcagcgtgaacacccccaccaagacctacggcatgggcaagggcagagccgccgacctgaagtacatcgaggcctgcgccagaagaatcgtgcagaacagcaacggctacaagatcgtgaccgagaagagctag

SEQ ID NO: 104595 - DNA, 162 bp, synthetic construct
  misc_feature 1..162: note = Description of Artificial Sequence: Synthetic coding sequence
  source 1..162: mol_type = other DNA
atgttcgagatcaagaagatctgctgcatcggcgccggctacgtgggcggccccacctgcagcgtgatcgcccacatgtgccccgagatcagagtgaccgtggtggacgtgaacgagagcagaatcaacgcctggaacagccccaccctgcccatctactag

SEQ ID NO: 104596 - DNA, 168 bp, synthetic construct; identical to SEQ ID NO: 104590
  misc_feature 1..168: note = Description of Artificial Sequence: Synthetic coding sequence
  source 1..168: mol_type = other DNA

SEQ ID NO: 104597 - DNA, 462 bp, synthetic construct
  misc_feature 1..462: note = Description of Artificial Sequence: Synthetic coding sequence
  source 1..462: mol_type = other DNA
atgttcgagatcaagaagatctgctgcatcggcgccggctacgtgggcggccccacctgcagcgtgatcgcccacatgtgccccgagatcagagtgaccgtggtggacgtgaacgagagcagaatcaacgcctggaacagccccaccctgcccatctacgagcccggcctgaaggaggtggtggagagctgcagaggcaagaacctgttcttcagcaccaacatcgacgacgccatcaaggaggccgacctggtgttcatcagcgtgaacacccccaccaagacctacggcatgggcaagggcagagccgccgacctgaagtacatcgaggcctgcgccagaagaatcgtgcagaacagcaacggctacaagatcgtgaccgagaagagcaccgtgcccgtgagagccgccgagagcatcagaagaatcttcgacgccaacaccaagcccaacctgaactag

SEQ ID NO: 104598 - DNA, 546 bp, synthetic construct
  misc_feature 1..546: note = Description of Artificial Sequence: Synthetic coding sequence
  source 1..546: mol_type = other DNA
atgtggagcagcggcctgctgatccaggacagcaccatcatgttcgagatcaagaagatctgctgcatcggcgccggctacgtgggcggccccacctgcagcgtgatcgcccacatgtgccccgagatcagagtgaccgtggtggacgtgaacgagagcagaatcaacgcctggaacagccccaccctgcccatctacgagcccggcctgaaggaggtggtggagagctgcagaggcaagaacctgttcttcagcaccaacatcgacgacgccatcaaggaggccgacctggtgttcatcagcgtgaacacccccaccaagacctacggcatgggcaagggcagagccgccgacctgaagtacatcgaggcctgcgccagaagaatcgtgcagaacagcaacggctacaagatcgtgaccgagaagagcaccgtgcccgtgagagccgccgagagcatcagaagaatcttcgacgccaacaccaagcccaacctgaacctgcaggtgctgagcaaccccgagttcctggccgagggcaccgcctag

SEQ ID NO: 104599 - DNA, 1185 bp, synthetic construct
  misc_feature 1..1185: note = Description of Artificial Sequence: Synthetic coding sequence
  source 1..1185: mol_type = other DNA
atggccctgctggacctggccctggagggcatggccgtgttcggcttcgtgctgttcctggtgctgtggctgatgcacttcatggccatcatctacaccagactgcacctgaacaagaaggccaccgacaagcagccctacagcaagctgcccggcgtgagcctgctgaagcccctgaagggcgtggaccccaacctgatcaacaacctggagaccttcttcgagctggactaccccaagtacgaggtgctgctgtgcgtgcaggaccacgacgaccccgccatcgacgtgtgcaagaagctgctgggcaagtaccccaacgtggacgccagactgttcatcggcggcaagaaggtgggcatcaaccccaagatcaacaacctgatgcccggctacgaggtggccaagtacgacctgatctggatctgcgacagcggcatcagagtgatccccgacaccctgaccgacatggtgaaccagatgaccgagaaggtgggcctggtgcacggcctgccctacgtggccgacagacagggcttcgccgccaccctggagcaggtgtacttcggcaccagccaccccagatactacatcagcgccaacgtgaccggcttcaagtgcgtgaccggcatgagctgcctgatgagaaaggacgtgctggaccaggccggcggcctgatcgccttcgcccagtacatcgccgaggactacttcatggccaaggccatcgccgacagaggctggagattcgccatgagcacccaggtggccatgcagaacagcggcagctacagcatcagccagttccagagcagaatgatcagatggaccaagctgagaatcaacatgctgcccgccaccatcatctgcgagcccatcagcgagtgcttcgtggccagcctgatcatcggctgggccgcccaccacgtgttcagatgggacatcatggtgttcttcatgtgccactgcctggcctggttcatcttcgactacatccagctgagaggcgtgcagggcggcaccctgtgcttcagcaagctggactacgccgtggcctggttcatcagagagagcatgaccatctacatcttcctgagcgccctgtgggaccccaccatcagctggagaaccggcagatacagactgagatgcggcggcaccgccgaggagatcctggacgtgtag

SEQ ID NO: 104600 - DNA, 4668 bp, synthetic construct
  misc_feature 1..4668: note = Description of Artificial Sequence: Synthetic coding sequence
  source 1..4668: mol_type = other DNA
atgggctgcaagggcgacgccagcggcgcctgcgccgccggcgccctgcccgtgaccggcgtgtgctacaagatgggcgtgctggtggtgctgaccgtgctgtggctgttcagcagcgtgaaggccgacagcaaggccatcaccaccagcctgaccaccaagtggttcagcacccccctgctgctggaggccagcgagttcctggccgaggacagccaggagaagttctggaacttcgtggaggccagccagaacatcggcagcagcgaccacgacggcaccgactacagctactaccacgccatcctggaggccgccttccagttcctgagccccctgcagcagaacctgttcaagttctgcctgagcctgagaagctacagcgccaccatccaggccttccagcagatcgccgccgacgagcccccccccgagggctgcaacagcttcttcagcgtgcacggcaagaagacctgcgagagcgacaccctggaggccctgctgctgaccgccagcgagagacccaagcccctgctgttcaagggcgaccacagataccccagcagcaaccccgagagccccgtggtgatcttctacagcgagatcggcagcgaggagttcagcaacttccacagacagctgatcagcaagagcaacgccggcaagatcaactacgtgttcagacactacatcttcaaccccagaaaggagcccgtgtacctgagcggctacggcgtggagctggccatcaagagcaccgagtacaaggccaaggacgacacccaggtgaagggcaccgaggtgaacaccaccgtgatcggcgagaacgaccccatcgacgaggtgcagggcttcctgttcggcaagctgagagacctgcaccccgacctggagggccagctgaaggagctgagaaagcacctggtggagagcaccaacgagatggcccccctgaaggtgtggcagctgcaggacctgagcttccagaccgccgccagaatcctggccagccccgtggagctggccctggtggtgatgaaggacctgagccagaacttccccaccaaggccagagccatcaccaagaccgccgtgagcagcgagctgagaaccgaggtggaggagaaccagaagtacttcaagggcaccctgggcctgcagcccggcgacagcgccctgttcatcaacggcctgcacatggacctggacacccaggacatcttcagcctgttcgacgtgctgagaaacgaggccagagtgatggagggcctgcacagactgggcatcgagggcctgagcctgcacaacgtgctgaagctgaacatccagcccagcgaggccgactacgccgtggacatcagaagccccgccatcagctgggtgaacaacctggaggtggacagcagatacaacagctggcccagcagcctgcaggagctgctgagacccaccttccccggcgtgatcagacagatcagaaagaacctgcacaacatggtgttcatcgtggaccccgcccacgagaccaccgccgagctgatgaacaccgccgagatgttcctgagcaaccacatccccctgagaatcggcttcatcttcgtggtgaacgacagcgaggacgtggacggcatgcaggacgccggcgtggccgtgctgagagcctacaactacgtggcccaggaggtggacgactaccacgccttccagaccctgacccacatctacaacaaggtgagaaccggcgagaaggtgaaggtggagcacgtggtgagcgtgctggagaagaagtacccctacgtggaggtgaacagcatcctgggcatcgacagcgcctacgacagaaacagaaaggaggccagaggctactacgagcagaccggcgtgggccccctgcccgtggtgctgttcaacggcatgcccttcgagagagagcagctggaccccgacgagctggagaccatcaccatgcacaagatcctggagaccaccaccttcttccagagagccgtgtacctgggcgagctgccccacgaccaggacgtggtggagtacatcatgaaccagcccaacgtggtgcccagaatcaacagcagaatcctgaccgccgagagagactacctggacctgaccgccagcaacaacttcttcgtggacgactacgccagattcaccatcctggacagccagggcaagaccgccgccgtggccaacagcatgaactacctgaccaagaagggcatgagcagcaaggagatctacgacgacagcttcatcagacccgtgaccttctggatcgtgggcgacttcgacagccccagcggcagacagctgctgtacgacgccatcaagcaccagaagagcagcaacaacgtgagaatcagcatgatcaacaaccccgccaaggagatcagctacgagaacacccagatcagcagagccatctgggccgccctgcagacccagaccagcaacgccgccaagaacttcatcaccaagatggccaaggagggcgccgccgaggccctggccgccggcgccgacatcgccgagttcagcgtgggcggcatggacttcagcctgttcaaggaggtgttcgagagcagcaagatggacttcatcctgagccacgccgtgtactgcagagacgtgctgaagctgaagaagggccagagagccgtgatcagcaacggcagaatcatcggccccctggaggacagcgagctgttcaaccaggacgacttccacctgctggagaacatcatcctgaagaccagcggccagaagatcaagagccacatccagcagctgagagtggaggaggacgtggccagcgacctggtgatgaaggtggacgccctgctgagcgcccagcccaagggcgaccccagaatcgagtaccagttcttcgaggacagacacagcgccatcaagctgagacccaaggagggcgagacctacttcgacgtggtggccgtggtggaccccgtgaccagagaggcccagagactggcccccctgctgctggtgctggcccagctgatcaacatgaacctgagagtgttcatgaactgccagagcaagctgagcgacatgcccctgaagagcttctacagatacgtgctggagcccgagatcagcttcaccagcgacaacagcttcgccaagggccccatcgccaagttcctggacatgccccagagccccctgttcaccctgaacctgaacacccccgagagctggatggtggagagcgtgagaaccccctacgacctggacaacatctacctggaggaggtggacagcgtggtggccgccgagtacgagctggagtacctgctgctggagggccactgctacgacatcaccaccggccagccccccagaggcctgcagttcaccctgggcaccagcgccaaccccgtgatcgtggacaccatcgtgatggccaacctgggctacttccagctgaaggccaaccccggcgcctggatcctgagactgagaaagggcagaagcgaggacatctacagaatctacagccacgacggcaccgacagcccccccgacgccgacgaggtggtgatcgtgctgaacaacttcaagagcaagatcatcaaggtgaaggtgcagaagaaggccgacatggtgaacgaggacctgctgagcgacggcaccagcgagaacgagagcggcttctgggacagcttcaagtggggcttcaccggccagaagaccgaggaggtgaagcaggacaaggacgacatcatcaacatcttcagcgtggccagcggccacctgtacgagagattcctgagaatcatgatgctgagcgtgctgaagaacaccaagacccccgtgaagttctggttcctgaagaactacctgagccccaccttcaaggagttcatcccctacatggccaacgagtacaacttccagtacgagctggtgcagtacaagtggcccagatggctgcaccagcagaccgagaagcagagaatcatctggggctacaagatcctgttcctggacgtgctgttccccctggtggtggacaagttcctgttcgtggacgccgaccagatcgtgagaaccgacctgaaggagctgagagacttcaacctggacggcgccccctacggctacacccccttctgcgacagcagaagagagatggacggctacagattctggaagagcggctactgggccagccacctggccggcagaaagtaccacatcagcgccctgtacgtggtggacctgaagaagttcagaaagatcgccgccggcgacagactgagaggccagtaccagggcctgagccaggaccccaacagcctgagcaacctggaccaggacctgcccaacaacatgatccaccaggtgcccatcaagagcctgccccaggagtggctgtggtgcgagacctggtgcgacgacgccagcaagaagagagccaagaccatcgacctgtgcaacaaccccatgaccaaggagcccaagctggaggccgccgtgagaatcgtgcccgagtggcaggactacgaccaggagatcaagcagctgcagatcagattccagaaggagaaggagaccggcgccctgtacaaggagaagaccaaggagcccagcagagagggcccccagaagagagaggagctgtag

SEQ ID NO: 104601 - DNA, 4596 bp, synthetic construct
  misc_feature 1..4596: note = Description of Artificial Sequence: Synthetic coding sequence
  source 1..4596: mol_type = other DNA
atgggcgtgctggtggtgctgaccgtgctgtggctgttcagcagcgtgaaggccgacagcaaggccatcaccaccagcctgaccaccaagtggttcagcacccccctgctgctggaggccagcgagttcctggccgaggacagccaggagaagttctggaacttcgtggaggccagccagaacatcggcagcagcgaccacgacggcaccgactacagctactaccacgccatcctggaggccgccttccagttcctgagccccctgcagcagaacctgttcaagttctgcctgagcctgagaagctacagcgccaccatccaggccttccagcagatcgccgccgacgagcccccccccgagggctgcaacagcttcttcagcgtgcacggcaagaagacctgcgagagcgacaccctggaggccctgctgctgaccgccagcgagagacccaagcccctgctgttcaagggcgaccacagataccccagcagcaaccccgagagccccgtggtgatcttctacagcgagatcggcagcgaggagttcagcaacttccacagacagctgatcagcaagagcaacgccggcaagatcaactacgtgttcagacactacatcttcaaccccagaaaggagcccgtgtacctgagcggctacggcgtggagctggccatcaagagcaccgagtacaaggccaaggacgacacccaggtgaagggcaccgaggtgaacaccaccgtgatcggcgagaacgaccccatcgacgaggtgcagggcttcctgttcggcaagctgagagacctgcaccccgacctggagggccagctgaaggagctgagaaagcacctggtggagagcaccaacgagatggcccccctgaaggtgtggcagctgcaggacctgagcttccagaccgccgccagaatcctggccagccccgtggagctggccctggtggtgatgaaggacctgagccagaacttccccaccaaggccagagccatcaccaagaccgccgtgagcagcgagctgagaaccgaggtggaggagaaccagaagtacttcaagggcaccctgggcctgcagcccggcgacagcgccctgttcatcaacggcctgcacatggacctggacacccaggacatcttcagcctgttcgacgtgctgagaaacgaggccagagtgatggagggcctgcacagactgggcatcgagggcctgagcctgcacaacgtgctgaagctgaacatccagcccagcgaggccgactacgccgtggacatcagaagccccgccatcagctgggtgaacaacctggaggtggacagcagatacaacagctggcccagcagcctgcaggagctgctgagacccaccttccccggcgtgatcagacagatcagaaagaacctgcacaacatggtgttcatcgtggaccccgcccacgagaccaccgccgagctgatgaacaccgccgagatgttcctgagcaaccacatccccctgagaatcggcttcatcttcgtggtgaacgacagcgaggacgtggacggcatgcaggacgccggcgtggccgtgctgagagcctacaactacgtggcccaggaggtggacgactaccacgccttccagaccctgacccacatctacaacaaggtgagaaccggcgagaaggtgaaggtggagcacgtggtgagcgtgctggagaagaagtacccctacgtggaggtgaacagcatcctgggcatcgacagcgcctacgacagaaacagaaaggaggccagaggctactacgagcagaccggcgtgggccccctgcccgtggtgctgttcaacggcatgcccttcgagagagagcagctggaccccgacgagctggagaccatcaccatgcacaagatcctggagaccaccaccttcttccagagagccgtgtacctgggcgagctgccccacgaccaggacgtggtggagtacatcatgaaccagcccaacgtggtgcccagaatcaacagcagaatcctgaccgccgagagagactacctggacctgaccgccagcaacaacttcttcgtggacgactacgccagattcaccatcctggacagccagggcaagaccgccgccgtggccaacagcatgaactacctgaccaagaagggcatgagcagcaaggagatctacgacgacagcttcatcagacccgtgaccttctggatcgtgggcgacttcgacagccccagcggcagacagctgctgtacgacgccatcaagcaccagaagagcagcaacaacgtgagaatcagcatgatcaacaaccccgccaaggagatcagctacgagaacacccagatcagcagagccatctgggccgccctgcagacccagaccagcaacgccgccaagaacttcatcaccaagatggccaaggagggcgccgccgaggccctggccgccggcgccgacatcgccgagttcagcgtgggcggcatggacttcagcctgttcaaggaggtgttcgagagcagcaagatggacttcatcctgagccacgccgtgtactgcagagacgtgctgaagctgaagaagggccagagagccgtgatcagcaacggcagaatcatcggccccctggaggacagcgagctgttcaaccaggacgacttccacctgctggagaacatcatcctgaagaccagcggccagaagatcaagagccacatccagcagctgagagtggaggaggacgtggccagcgacctggtgatgaaggtggacgccctgctgagcgcccagcccaagggcgaccccagaatcgagtaccagttcttcgaggacagacacagcgccatcaagctgagacccaaggagggcgagacctacttcgacgtggtggccgtggtggaccccgtgaccagagaggcccagagactggcccccctgctgctggtgctggcccagctgatcaacatgaacctgagagtgttcatgaactgccagagcaagctgagcgacatgcccctgaagagcttctacagatacgtgctggagcccgagatcagcttcaccagcgacaacagcttcgccaagggccccatcgccaagttcctggacatgccccagagccccctgttcaccctgaacctgaacacccccgagagctggatggtggagagcgtgagaaccccctacgacctggacaacatctacctggaggaggtggacagcgtggtggccgccgagtacgagctggagtacctgctgctggagggccactgctacgacatcaccaccggccagccccccagaggcctgcagttcaccctgggcaccagcgccaaccccgtgatcgtggacaccatcgtgatggccaacctgggctacttccagctgaaggccaaccccggcgcctggatcctgagactgagaaagggcagaagcgaggacatctacagaatctacagccacgacggcaccgacagcccccccgacgccgacgaggtggtgatcgtgctgaacaacttcaagagcaagatcatcaaggtgaaggtgcagaagaaggccgacatggtgaacgaggacctgctgagcgacggcaccagcgagaacgagagcggcttctgggacagcttcaagtggggcttcaccggccagaagaccgaggaggtgaagcaggacaaggacgacatcatcaacatcttcagcgtggccagcggccacctgtacgagagattcctgagaatcatgatgctgagcgtgctgaagaacaccaagacccccgtgaagttctggttcctgaagaactacctgagccccaccttcaaggagttcatcccctacatggccaacgagtacaacttccagtacgagctggtgcagtacaagtggcccagatggctgcaccagcagaccgagaagcagagaatcatctggggctacaagatcctgttcctggacgtgctgttccccctggtggtggacaagttcctgttcgtggacgccgaccagatcgtgagaaccgacctgaaggagctgagagacttcaacctggacggcgccccctacggctacacccccttctgcgacagcagaagagagatggacggctacagattctggaagagcggctactgggccagccacctggccggcagaaagtaccacatcagcgccctgtacgtggtggacctgaagaagttcagaaagatcgccgccggcgacagactgagaggccagtaccagggcctgagccaggaccccaacagcctgagcaacctggaccaggacctgcccaacaacatgatccaccaggtgcccatcaagagcctgccccaggagtggctgtggtgcgagacctggtgcgacgacgccagcaagaagagagccaagaccatcgacctgtgcaacaaccccatgaccaaggagcccaagctggaggccgccgtgagaatcgtgcccgagtggcaggactacgaccaggagatcaagcagctgcagatcagattccagaaggagaaggagaccggcgccctgtacaaggagaagaccaaggagcccagcagagagggcccccagaagagagaggagctgtag

SEQ ID NO: 104602 - DNA, 843 bp, synthetic construct
  misc_feature 1..843: note = Description of Artificial Sequence: Synthetic coding sequence
  source 1..843: mol_type = other DNA
atggcccccgccaaggccaccaacgtggtgagactgctgctgggcagcaccgccctgtggctgagccagctgggcagcggcaccgtggccgccagcaagagcgtgaccgcccacctggccgccaagtggcccgagacccccctgctgctggaggccagcgagttcatggccgaggagagcaacgagaagttctggcagttcctggagaccgtgcaggagctggccatctacaagcagaccgagagcgactacagctactacaacctgatcctgaagaaggccggccagttcctggacaacctgcacatcaacctgctgaagttcgccttcagcatcagagcctacagccccgccatccagatgttccagcagatcgccgccgacgagcccccccccgacggctgcaacgccttcgtggtgatccacaagaagcacacctgcaagatcaacgagatcaagaagctgctgaagaaggccgccagcagaaccagaccctacctgttcaagggcgaccacaagttccccaccaacaaggagaacctgcccgtggtgatcctgtacgccgagatgggcaccagaaccttcagcgccttccacaaggtgctgagcgagaaggcccagaacgaggagatcctgtacgtgctgagacactacatccagaagcccagcagcagaaagatgtacctgagcggctacggcgtggagctggccatcaagagcaccgagtacaaggccctggacgacacccaggtgaagaccgtgaccaacaccaccgtggaggacgagaccgagaccaacgaggtgcagggcttcctgttcggcaagctgaagctggtgtactag

SEQ ID NO: 104603 - DNA, 837 bp, synthetic construct
  misc_feature 1..837: note = Description of Artificial Sequence: Synthetic coding sequence
  source 1..837: mol_type = other DNA
atggcccccgccaaggccaccaacgtggtgagactgctgctgggcagcaccgccctgtggctgagccagctgggcagcggcaccgtggccgccagcaagagcgtgaccgcccacctggccgccaagtggcccgagacccccctgctgctggaggccagcgagttcatggccgaggagagcaacgagaagttctggcagttcctggagaccgtgcaggagctggccatctacaagcagaccgagagcgactacagctactacaacctgatcctgaagaaggccggccagttcctggacaacctgcacatcaacctgctgaagttcgccttcagcatcagagcctacagccccgccatccagatgttccagcagatcgccgccgacgagcccccccccgacggctgcaacgccttcgtggtgatccacaagaagcacacctgcaagatcaacgagatcaagaagctgctgaagaaggccgccagcagaaccagaccctacctgttcaagggcgaccacaagttccccaccaacaaggagaacctgcccgtggtgatcctgtacgccgagatgggcaccagaaccttcagcgccttccacaaggtgctgagcgagaaggcccagaacgaggagatcctgtacgtgctgagacactacatccagaagcccagcagcagaaagatgtacctgagcggctacggcgtggagctggccatcaagagcaccgagtacaaggccctggacgacacccaggtgaagaccgtgaccaacaccaccgtggaggacgagaccgagaccaacgaggtgcagggcttcctgttcggcaagctgaagagctag

SEQ ID NO: 104604 - DNA, 786 bp, synthetic construct
  misc_feature 1..786: note = Description of Artificial Sequence: Synthetic coding sequence
  source 1..786: mol_type = other DNA
atggcccccgccaaggccaccaacgtggtgagactgctgctgggcagcaccgccctgtggctgagccagctgggcagcggcaccgtggccgccagcaagagcgtgaccgcccacctggccgccaagtggcccgagacccccctgctgctggaggccagcgagttcatggccgaggagagcaacgagaagttctggcagttcctggagaccgtgcaggagctggccatctacaagcagaccgagagcgactacagctactacaacctgatcctgaagaaggccggccagttcctggacaacctgcacatcaacctgctgaagttcgccttcagcatcagagcctacagccccgccatccagatgttccagcagatcgccgccgacgagcccccccccgacggctgcaacgccttcgtggtgatccacaagaagcacacctgcaagatcaacgagatcaagaagctgctgaagaaggccgccagcagaaccagaccctacctgttcaagggcgaccacaagttccccaccaacaaggagaacctgcccgtggtgatcctgtacgccgagatgggcaccagaaccttcagcgccttccacaaggtgctgagcgagaaggcccagaacgaggagatcctgtacgtgctgagacactacatccagaagcccagcagcagaaagatgtacctgagcggctacggcgtggagctggccatcaagagcaccgagtacaaggccctggacgacacccaggtgaaggtgttccaggaccccgaggccttcttctag

SEQ ID NO: 104605 - DNA, 4551 bp, synthetic construct
  misc_feature 1..4551: note = Description of Artificial Sequence: Synthetic coding sequence
  source 1..4551: mol_type = other DNA
atggcccccgccaaggccaccaacgtggtgagactgctgctgggcagcaccgccctgtggctgagccagctgggcagcggcaccgtggccgccagcaagagcgtgaccgcccacctggccgccaagtggcccgagacccccctgctgctggaggccagcgagttcatggccgaggagagcaacgagaagttctggcagttcctggagaccgtgcaggagctggccatctacaagcagaccgagagcgactacagctactacaacctgatcctgaagaaggccggccagttcctggacaacctgcacatcaacctgctgaagttcgccttcagcatcagagcctacagccccgccatccagatgttccagcagatcgccgccgacgagcccccccccgacggctgcaacgccttcgtggtgatccacaagaagcacacctgcaagatcaacgagatcaagaagctgctgaagaaggccgccagcagaaccagaccctacctgttcaagggcgaccacaagttccccaccaacaaggagaacctgcccgtggtgatcctgtacgccgagatgggcaccagaaccttcagcgccttccacaaggtgctgagcgagaaggcccagaacgaggagatcctgtacgtgctgagacactacatccagaagcccagcagcagaaagatgtacctgagcggctacggcgtggagctggccatcaagagcaccgagtacaaggccctggacgacacccaggtgaagaccgtgaccaacaccaccgtggaggacgagaccgagaccaacgaggtgcagggcttcctgttcggcaagctgaaggagatctacagcgacctgagagacaacctgaccgccttccagaagtacctgatcgagagcaacaagcagatgatgcccctgaaggtgtgggagctgcaggacctgagcttccaggccgccagccagatcatgagcgcccccgtgtacgacagcatcaagctgatgaaggacatcagccagaacttccccatcaaggccagaagcctgaccagaatcgccgtgaaccagcacatgagagaggagatcaaggagaaccagaaggacctgcaggtgagattcaagatccagcccggcgacgccagactgttcatcaacggcctgagagtggacatggacgtgtacgacgccttcagcatcctggacatgctgaagctggagggcaagatgatgaacggcctgagaaacctgggcatcaacggcgaggacatgagcaagttcctgaagctgaacagccacatctgggagtacacctacgtgctggacatcagacacagcagcatcatgtggatcaacgacctggagaacgacgacctgtacatcacctggcccaccagctgccagaagctgctgaagcccgtgttccccggcagcgtgcccagcatcagaagaaacttccacaacctggtgctgttcatcgaccccgcccaggagtacaccctggacttcatcaagctggccgacgtgttctacagccacgaggtgcccctgagaatcggcttcgtgttcatcctgaacaccgacgacgaggtggacggcgccaacgacgccggcgtggccctgtggagagccttcaactacatcgccgaggagttcgacatcagcgaggccttcatcagcatcgtgcacatgtaccagaaggtgaagaaggaccagaacatcctgaccgtggacaacgtgaagagcgtgctgcagaacaccttcccccacgccaacatctgggacatcctgggcatccacagcaagtacgacgaggagagaaaggccggcgccagcttctacaagatgaccggcctgggccccctgccccaggccctgtacaacggcgagcccttcaagcacgaggagatgaacatcaaggagctgaagatggccgtgctgcagagaatgatggacgccagcgtgtacctgcagagagaggtgttcctgggcaccctgaacgacagaaccaacgccatcgacttcctgatggacagaaacaacgtggtgcccagaatcaacaccctgatcctgagaaccaaccagcagtacctgaacctgatcagcaccagcgtgaccgccgacgtggaggacttcagcaccttcttcttcctggacagccaggacaagagcgccgtgatcgccaagaacatgtactacctgacccaggacgacgagagcatcatcagcgccgtgaccctgtggatcatcgccgacttcgacaagcccagcggcagaaagctgctgttcaacgccctgaagcacatgaagaccagcgtgcacagcagactgggcatcatctacaaccccaccagcaagatcaacgaggagaacaccgccatcagcagaggcatcctggccgccttcctgacccagaagaacatgttcctgagaagcttcctgggccagctggccaaggaggagatcgccaccgccatctacagcggcgacaagatcaagaccttcctgatcgagggcatggacaagaacgccttcgagaagaagtacaacaccgtgggcgtgaacatcttcagaacccaccagctgttctgccaggacgtgctgaagctgagacccggcgagatgggcatcgtgagcaacggcagattcctgggccccctggacgaggacttctacgccgaggacttctacctgctggagaagatcaccttcagcaacctgggcgagaagatcaagggcatcgtggagaacatgggcatcaacgccaacaacatgagcgacttcatcatgaaggtggacgccctgatgagcagcgtgcccaagagagccagcagatacgacgtgaccttcctgagagagaaccacagcgtgatcaagaccaacccccaggagaacgacatgttcttcaacgtgatcgccatcgtggaccccctgaccagagaggcccagaagatggcccagctgctggtggtgctgggcaagatcatcaacatgaagatcaagctgttcatgaactgcagaggcagactgagcgaggcccccctggagagcttctacagattcgtgctggagcccgagctgatgagcggcgccaacgacgtgagcagcctgggccccgtggccaagttcctggacatccccgagagccccctgctgatcctgaacatgatcacccccgagggctggctggtggagaccgtgcacagcaactgcgacctggacaacatccacctgaaggacaccgagaagaccgtgaccgccgagtacgagctggagtacctgctgctggagggccagtgcttcgacaaggtgaccgagcagccccccagaggcctgcagttcaccctgggcaccaagaacaagcccgccgtggtggacaccatcgtgatggcccaccacggctacttccagctgaaggccaaccccggcgcctggatcctgagactgcaccagggcaagagcgaggacatctaccagatcgtgggccacgagggcaccgacagccaggccgacctggaggacatcatcgtggtgctgaacagcttcaagagcaagatcctgaaggtgaaggtgaagaaggagaccgacaagatcaaggaggacatcctgaccgacgaggacgagaagaccaagggcctgtgggacagcatcaagagcttcaccgtgagcctgcacaaggagaacaagaaggagaaggacgtgctgaacatcttcagcgtggccagcggccacctgtacgagagattcctgagaatcatgatgctgagcgtgctgagaaacaccaagacccccgtgaagttctggctgctgaagaactacctgagccccaccttcaaggaggtgatcccccacatggccaaggagtacggcttcagatacgagctggtgcagtacagatggcccagatggctgagacagcagaccgagagacagagaatcatctggggctacaagatcctgttcctggacgtgctgttccccctggccgtggacaagatcatcttcgtggacgccgaccagatcgtgagacacgacctgaaggagctgagagacttcgacctggacggcgccccctacggctacacccccttctgcgacagcagaagagagatggacggctacagattctggaagaccggctactgggccagccacctgctgagaagaaagtaccacatcagcgccctgtacgtggtggacctgaagaagttcagaagaatcggcgccggcgacagactgagaagccagtaccaggccctgagccaggaccccaacagcctgagcaacctggaccaggacctgcccaacaacatgatctaccaggtggccatcaagagcctgccccaggactggctgtggtgcgagacctggtgcgacgacgagagcaagcagagagccaagaccatcgacctgtgcaacaaccccaagaccaaggagagcaagctgaaggccgccgccagaatcgtgcccgagtgggtggagtacgacgccgagatcagacagctgctggaccacctggagaacaagaagcaggacaccatcctgacccacgacgagctgtag

SEQ ID NO: 104606 - DNA, 1119 bp, synthetic construct
  misc_feature 1..1119: note = Description of Artificial Sequence: Synthetic coding sequence
  source 1..1119: mol_type = other DNA
atggcccccgccaaggccaccaacgtggtgagactgctgctgggcagcaccgccctgtggctgagccagctgggcagcggcaccgtggccgccagcaagagcgtgaccgcccacctggccgccaagtggcccgagacccccctgctgctggaggccagcgagttcatggccgaggagagcaacgagaagttctggcagttcctggagaccgtgcaggagctggccatctacaagcagaccgagagcgactacagctactacaacctgatcctgaagaaggccggccagttcctggacaacctgcacatcaacctgctgaagttcgccttcagcatcagagcctacagccccgccatccagatgttccagcagatcgccgccgacgagcccccccccgacggctgcaacgccttcgtggtgatccacaagaagcacacctgcaagatcaacgagatcaagaagctgctgaagaaggccgccagcagaaccagaccctacctgttcaagggcgaccacaagttccccaccaacaaggagaacctgcccgtggtgatcctgtacgccgagatgggcaccagaaccttcagcgccttccacaaggtgctgagcgagaaggcccagaacgaggagatcctgtacgtgctgagacactacatccagaagcccagcagcagaaagatgtacctgagcggctacggcgtggagctggccatcaagagcaccgagtacaaggccctggacgacacccaggtgaagaccgtgaccaacaccaccgtggaggacgagaccgagaccaacgaggtgcagggcttcctgttcggcaagctgaaggagatctacagcgacctgagagacaacctgaccgccttccagaagtacctgatcgagagcaacaagcagatgatgcccctgaaggtgtgggagctgcaggacctgagcttccaggccgccagccagatcatgagcgcccccgtgtacgacagcatcaagctgatgaaggacatcagccagaacttccccatcaaggccagactgagaatgaacatcctgatctgcctgttccagagcaccctgaacgtgaagaacctgagaagcagacacctgtacaacaagacctag

SEQ ID NO: 104607 - DNA, 1527 bp, synthetic construct
  misc_feature 1..1527: note = Description of Artificial Sequence: Synthetic coding sequence
  source 1..1527: mol_type = other DNA
atgagcagattcgtgcaggacctgagcaaggccatgagccaggacggcgccagccagttccaggaggtgatcagacaggagctggagctgagcgtgaagaaggagctggagaagatcctgaccaccgccagcagccacgagttcgagcacaccaagaaggacctggacggcttcagaaagctgttccacagattcctgcaggagaagggccccagcgtggactggggcaagatccagagaccccccgaggacagcatccagccctacgagaagatcaaggccagaggcctgcccgacaacatcagcagcgtgctgaacaagctggtggtggtgaagctgaacggcggcctgggcaccagcatgggctgcaagggccccaagagcctgatcggcgtgagaaacgagaacaccttcctggacctgaccgtgcagcagatcgagcacctgaacaagacctacaacaccgacgtgcccctggtgctgatgaacagcttcaacaccgacgaggacaccaagaagatcctgcagaagtacaaccactgcagagtgaagatctacaccttcaaccagagcagataccccagaatcaacaaggagagcctgctgcccgtggccaaggacgtgagctacagcggcgagaacaccgaggcctggtacccccccggccacggcgacatctacgccagcttctacaacagcggcctgctggacaccttcatcggcgagggcaaggagtacatcttcgtgagcaacatcgacaacctgggcgccaccgtggacctgtacatcctgaaccacctgatgaacccccccaacggcaagagatgcgagttcgtgatggaggtgaccaacaagaccagagccgacgtgaagggcggcaccctgacccagtacgagggcaagctgagactggtggagatcgcccaggtgcccaaggcccacgtggacgagttcaagagcgtgagcaagttcaagatcttcaacaccaacaacctgtggatcagcctggccgccgtgaagagactgcaggagcagaacgccatcgacatggagatcatcgtgaacgccaagaccctggacggcggcctgaacgtgatccagctggagaccgccgtgggcgccgccatcaagagcttcgagaacagcctgggcatcaacgtgcccagaagcagattcctgcccgtgaagaccaccagcgacctgctgctggtgatgagcaacctgtacagcctgaacgccggcagcctgaccatgagcgagaagagagagttccccaccgtgcccctggtgaagctgggcagcagcttcaccaaggtgcaggactacctgagaagattcgagagcatccccgacatgctggagctggaccacctgaccgtgagcggcgacgtgaccttcggcaagaacgtgagcctgaagggcaccgtgatcatcatcgccaaccacggcgacagaatcgacatcccccccggcgccgtgctggagaacaagatcgtgagcggcaacctgagaatcctggaccactag

SEQ ID NO: 104608 - DNA, 1494 bp, synthetic construct
  misc_feature 1..1494: note = Description of Artificial Sequence: Synthetic coding sequence
  source 1..1494: mol_type = other DNA
atgagccaggacggcgccagccagttccaggaggtgatcagacaggagctggagctgagcgtgaagaaggagctggagaagatcctgaccaccgccagcagccacgagttcgagcacaccaagaaggacctggacggcttcagaaagctgttccacagattcctgcaggagaagggccccagcgtggactggggcaagatccagagaccccccgaggacagcatccagccctacgagaagatcaaggccagaggcctgcccgacaacatcagcagcgtgctgaacaagctggtggtggtgaagctgaacggcggcctgggcaccagcatgggctgcaagggccccaagagcctgatcggcgtgagaaacgagaacaccttcctggacctgaccgtgcagcagatcgagcacctgaacaagacctacaacaccgacgtgcccctggtgctgatgaacagcttcaacaccgacgaggacaccaagaagatcctgcagaagtacaaccactgcagagtgaagatctacaccttcaaccagagcagataccccagaatcaacaaggagagcctgctgcccgtggccaaggacgtgagctacagcggcgagaacaccgaggcctggtacccccccggccacggcgacatctacgccagcttctacaacagcggcctgctggacaccttcatcggcgagggcaaggagtacatcttcgtgagcaacatcgacaacctgggcgccaccgtggacctgtacatcctgaaccacctgatgaacccccccaacggcaagagatgcgagttcgtgatggaggtgaccaacaagaccagagccgacgtgaagggcggcaccctgacccagtacgagggcaagctgagactggtggagatcgcccaggtgcccaaggcccacgtggacgagttcaagagcgtgagcaagttcaagatcttcaacaccaacaacctgtggatcagcctggccgccgtgaagagactgcaggagcagaacgccatcgacatggagatcatcgtgaacgccaagaccctggacggcggcctgaacgtgatccagctggagaccgccgtgggcgccgccatcaagagcttcgagaacagcctgggcatcaacgtgcccagaagcagattcctgcccgtgaagaccaccagcgacctgctgctggtgatgagcaacctgtacagcctgaacgccggcagcctgaccatgagcgagaagagagagttccccaccgtgcccctggtgaagctgggcagcagcttcaccaaggtgcaggactacctgagaagattcgagagcatccccgacatgctggagctggaccacctgaccgtgagcggcgacgtgaccttcggcaagaacgtgagcctgaagggcaccgtgatcatcatcgccaaccacggcgacagaatcgacatcccccccggcgccgtgctggagaacaagatcgtgagcggcaacctgagaatcctggaccactag

SEQ ID NO: 104609 - DNA, 1554 bp, synthetic construct
  misc_feature 1..1554: note = Description of Artificial Sequence: Synthetic coding sequence
  source 1..1554: mol_type = other DNA
atgctgctgtaccccgccggcttcagcttcgccagcctgaagagcgacctgagcaaggccatgagccaggacggcgccagccagttccaggaggtgatcagacaggagctggagctgagcgtgaagaaggagctggagaagatcctgaccaccgccagcagccacgagttcgagcacaccaagaaggacctggacggcttcagaaagctgttccacagattcctgcaggagaagggccccagcgtggactggggcaagatccagagaccccccgaggacagcatccagccctacgagaagatcaaggccagaggcctgcccgacaacatcagcagcgtgctgaacaagctggtggtggtgaagctgaacggcggcctgggcaccagcatgggctgcaagggccccaagagcctgatcggcgtgagaaacgagaacaccttcctggacctgaccgtgcagcagatcgagcacctgaacaagacctacaacaccgacgtgcccctggtgctgatgaacagcttcaacaccgacgaggacaccaagaagatcctgcagaagtacaaccactgcagagtgaagatctacaccttcaaccagagcagataccccagaatcaacaaggagagcctgctgcccgtggccaaggacgtgagctacagcggcgagaacaccgaggcctggtacccccccggccacggcgacatctacgccagcttctacaacagcggcctgctggacaccttcatcggcgagggcaaggagtacatcttcgtgagcaacatcgacaacctgggcgccaccgtggacctgtacatcctgaaccacctgatgaacccccccaacggcaagagatgcgagttcgtgatggaggtgaccaacaagaccagagccgacgtgaagggcggcaccctgacccagtacgagggcaagctgagactggtggagatcgcccaggtgcccaaggcccacgtggacgagttcaagagcgtgagcaagttcaagatcttcaacaccaacaacctgtggatcagcctggccgccgtgaagagactgcaggagcagaacgccatcgacatggagatcatcgtgaacgccaagaccctggacggcggcctgaacgtgatccagctggagaccgccgtgggcgccgccatcaagagcttcgagaacagcctgggcatcaacgtgcccagaagcagattcctgcccgtgaagaccaccagcgacctgctgctggtgatgagcaacctgtacagcctgaacgccggcagcctgaccatgagcgagaagagagagttccccaccgtgcccctggtgaagctgggcagcagcttcaccaaggtgcaggactacctgagaagattcgagagcatccccgacatgctggagctggaccacctgaccgtgagcggcgacgtgaccttcggcaagaacgtgagcctgaagggcaccgtgatcatcatcgccaaccacggcgacagaatcgacatcccccccggcgccgtgctggagaacaagatcgtgagcggcaacctgagaatcctggaccactag

SEQ ID NO: 104610 - DNA, 1494 bp, synthetic construct; identical to SEQ ID NO: 104608
  misc_feature 1..1494: note = Description of Artificial Sequence: Synthetic coding sequence
  source 1..1494: mol_type = other DNA

SEQ ID NO: 104611 - DNA, 453 bp, synthetic construct
  misc_feature 1..453: note = Description of Artificial Sequence: Synthetic coding sequence
  source 1..453: mol_type = other DNA
atgagccaggacggcgccagccagttccaggaggtgatcagacaggagctggagctgagcgtgaagaaggagctggagaagatcctgaccaccgccagcagccacgagttcgagcacaccaagaaggacctggacggcttcagaaagctgttccacagattcctgcaggagaagggccccagcgtggactggggcaagatccagagaccccccgaggacagcatccagccctacgagaagatcaaggccagaggcctgcccgacaacatcagcagcgtgctgaacaagctggtggtggtgaagctgaacggcggcctgggcaccagcatgggctgcaagggccccaagagcctgatcggcgtgagaaacgagaacaccttcctggacctgaccgtgcagcagatcgagcacctgaacaagacctacaacaccgacgtgcccctggtgctgtag

SEQ ID NO: 104612 - DNA, 516 bp, synthetic construct
  misc_feature 1..516: note = Description of Artificial Sequence: Synthetic coding sequence
  source 1..516: mol_type = other DNA
atgagccaggacggcgccagccagttccaggaggtgatcagacaggagctggagctgagcgtgaagaaggagctggagaagatcctgaccaccgccagcagccacgagttcgagcacaccaagaaggacctggacggcttcagaaagctgttccacagattcctgcaggagaagggccccagcgtggactggggcaagatccagagaccccccgaggacagcatccagccctacgagaagatcaaggccagaggcctgcccgacaacatcagcagcgtgctgaacaagctggtggtggtgaagctgaacggcggcctgggcaccagcatgggctgcaagggccccaagagcctgatcggcgtgagaaacgagaacaccttcctggacctgaccgtgcagcagatcgagcacctgaacaagacctacaacaccgacgtgcccctggtgctgatgaacagcttcaacaccgacgaggacaccaagaagatcctgcagaagtacaaccactgcagatag

SEQ ID NO: 104613 - DNA, 117 bp, synthetic construct
  misc_feature 1..117: note = Description of Artificial Sequence: Synthetic coding sequence
  source 1..117: mol_type = other DNA
atgagccaggacggcgccagccagttccaggaggtgatcagacaggagctggagctgagcgtgaagaaggagctggagaagatcctgaccaccgccagcagccacgagttcgagtag

SEQ ID NO: 104614 - DNA, 318 bp, synthetic construct
  misc_feature 1..318: note = Description of Artificial Sequence: Synthetic coding sequence
  source 1..318: mol_type = other DNA
atgagccaggacggcgccagccagttccaggaggtgatcagacaggagctggagctgagcgtgaagaaggagctggagaagatcctgaccaccgccagcagccacgagttcgagcacaccaagaaggacctggacggcttcagaaagctgttccacagattcctgcaggagaagggccccagcgtggactggggcaagatccagagaccccccgaggacagcatccagccctacgagaagatcaaggccagaggcctgcccgacaacatcagcagcgtgctgaacaagctggtggtggtgaagctgaacggcggctag

SEQ ID NO: 104615 - DNA, 150 bp, synthetic construct
  misc_feature 1..150: note = Description of Artificial Sequence: Synthetic coding sequence
  source 1..150: mol_type = other DNA
atgagcagattcgtgcaggacctgagcaaggccatgagccaggacggcgccagccagttccaggaggtgatcagacaggagctggagctgagcgtgaagaaggagctggagaagatcctgaccaccgccagcagccacgagttcgagtag

SEQ ID NO: 104616 - DNA, 408 bp, synthetic construct
  misc_feature 1..408: note = Description of Artificial Sequence: Synthetic coding sequence
  source 1..408: mol_type = other DNA
atgagccaggacggcgccagccagttccaggaggtgatcagacaggagctggagctgagcgtgaagaaggagctggagaagatcctgaccaccgccagcagccacgagttcgagcacaccaagaaggacctggacggcttcagaaagctgttccacagattcctgcaggagaagggccccagcgtggactggggcaagatccagagaccccccgaggacagcatccagccctacgagaagatcaaggccagaggcctgcccgacaacatcagcagcgtgctgaacaagctggtggtggtgaagctgaacggcggcctgggcaccagcatgggctgcaagggccccaagagcctgatcggcgtgagaaacgagaacaccttcctggacctgaccgtgcagcagatctag

SEQ ID NO: 104617 - DNA, 642 bp, synthetic construct
  misc_feature 1..642: note = Description of Artificial Sequence: Synthetic coding sequence
  source 1..642: mol_type = other DNA
atgagccaggacggcgccagccagttccaggaggtgatcagacaggagctggagctgagcgtgaagaaggagctggagaagatcctgaccaccgccagcagccacgagttcgagcacaccaagaaggacctggacggcttcagaaagctgttccacagattcctgcaggagaagggccccagcgtggactggggcaagatccagagaccccccgaggacagcatccagccctacgagaagatcaaggccagaggcctgcccgacaacatcagcagcgtgctgaacaagctggtggtggtgaagctgaacggcggcctgggcaccagcatgggctgcaagggccccaagagcctgatcggcgtgagaaacgagaacaccttcctggacctgaccgtgcagcagatcgagcacctgaacaagacctacaacaccgacgtgcccctggtgctgatgaacagcttcaacaccgacgaggacaccaagaagatcctgcagaagtacaaccactgcagagtgaagatctacaccttcaaccagagcagataccccagaatcaacaaggagagcctgctgcccgtggccaaggacgtgagctacagcggcgagaacaccgaggcctggtacccccccggccacggctag

SEQ ID NO: 104618 - DNA, 1278 bp, synthetic construct
  misc_feature 1..1278: note = Description of Artificial Sequence: Synthetic coding sequence
  source 1..1278: mol_type = other DNA
atggtgagcaaggccctgctgagactggtgagcgccgtgaacagaagaagaatgaagctgctgctgggcatcgccctgctggcctacgtggccagcgtgtggggcaacttcgtgaacatgagcttcctgctgaacagaagcatccaggagaacggcgagctgaagatcgagagcaagatcgaggagatggtggagcccctgagagagaagatcagagacctggagaagagcttcacccagaagtacccccccgtgaagttcctgagcgagaaggacagaaagagaatcctgatcaccggcggcgccggcttcgtgggcagccacctgaccgacaagctgatgatggacggccacgaggtgaccgtggtggacaacttcttcaccggcagaaagagaaacgtggagcactggatcggccacgagaacttcgagctgatcaaccacgacgtggtggagcccctgtacatcgaggtggaccagatctaccacctggccagccccgccagcccccccaactacatgtacaaccccatcaagaccctgaagaccaacaccatcggcaccctgaacatgctgggcctggccaagagagtgggcgccagactgctgctggccagcaccagcgaggtgtacggcgaccccgaggtgcacccccagagcgaggactactggggccacgtgaaccccatcggccccagagcctgctacgacgagggcaagagagtggccgagaccatgtgctacgcctacatgaagcaggagggcgtggaggtgagagtggccagaatcttcaacaccttcggccccagaatgcacatgaacgacggcagagtggtgagcaacttcatcctgcaggccctgcagggcgagcccctgaccgtgtacggcagcggcagccagaccagagccttccagtacgtgagcgacctggtgaacggcctggtggccctgatgaacagcaacgtgagcagccccgtgaacctgggcaaccccgaggagcacaccatcctggagttcgcccagctgatcaagaacctggtgggcagcggcagcgagatccagttcctgagcgaggcccaggacgacccccagaagagaaagcccgacatcaagaaggccaagctgatgctgggctgggagcccgtggtgcccctggaggagggcctgaacaaggccatccactacttcagaaaggagctggagtaccaggccaacaaccagtacatccccaagcccaagcccgccagaatcaagaagggcagaaccagacacagctag

SEQ ID NO: 104619 - DNA, 759 bp, synthetic construct
  misc_feature 1..759: note = Description of Artificial Sequence: Synthetic coding sequence
  source 1..759: mol_type = other DNA
atgtacaaccccatcaagaccctgaagaccaacaccatcggcaccctgaacatgctgggcctggccaagagagtgggcgccagactgctgctggccagcaccagcgaggtgtacggcgaccccgaggtgcacccccagagcgaggactactggggccacgtgaaccccatcggccccagagcctgctacgacgagggcaagagagtggccgagaccatgtgctacgcctacatgaagcaggagggcgtggaggtgagagtggccagaatcttcaacaccttcggccccagaatgcacatgaacgacggcagagtggtgagcaacttcatcctgcaggccctgcagggcgagcccctgaccgtgtacggcagcggcagccagaccagagccttccagtacgtgagcgacctggtgaacggcctggtggccctgatgaacagcaacgtgagcagccccgtgaacctgggcaaccccgaggagcacaccatcctggagttcgcccagctgatcaagaacctggtgggcagcggcagcgagatccagttcctgagcgaggcccaggacgacccccagaagagaaagcccgacatcaagaaggccaagctgatgctgggctgggagcccgtggtgcccctggaggagggcctgaacaaggccatccactacttcagaaaggagctggagtaccaggccaacaaccagtacatccccaagcccaagcccgccagaatcaagaagggcagaaccagacacagctag

SEQ ID NO: 104620 - DNA, 1263 bp, synthetic construct
  misc_feature 1..1263: note = Description of Artificial Sequence: Synthetic coding sequence
  source 1..1263: mol_type = other DNA
atggtgagcaaggccctgctgagactggtgagcgccgtgaacagaagaagaatgaagctgctgctgggcatcgccctgctggcctacgtggccagcgtgtggggcaacttcgtgaacatgagaagcatccaggagaacggcgagctgaagatcgagagcaagatcgaggagatggtggagcccctgagagagaagatcagagacctggagaagagcttcacccagaagtacccccccgtgaagttcctgagcgagaaggacagaaagagaatcctgatcaccggcggcgccggcttcgtgggcagccacctgaccgacaagctgatgatggacggccacgaggtgaccgtggtggacaacttcttcaccggcagaaagagaaacgtggagcactggatcggccacgagaacttcgagctgatcaaccacgacgtggtggagcccctgtacatcgaggtggaccagatctaccacctggccagccccgccagcccccccaactacatgtacaaccccatcaagaccctgaagaccaacaccatcggcaccctgaacatgctgggcctggccaagagagtgggcgccagactgctgctggccagcaccagcgaggtgtacggcgaccccgaggtgcacccccagagcgaggactactggggccacgtgaaccccatcggccccagagcctgctacgacgagggcaagagagtggccgagaccatgtgctacgcctacatgaagcaggagggcgtggaggtgagagtggccagaatcttcaacaccttcggccccagaatgcacatgaacgacggcagagtggtgagcaacttcatcctgcaggccctgcagggcgagcccctgaccgtgtacggcagcggcagccagaccagagccttccagtacgtgagcgacctggtgaacggcctggtggccctgatgaacagcaacgtgagcagccccgtgaacctgggcaaccccgaggagcacaccatcctggagttcgcccagctgatcaagaacctggtgggcagcggcagcgagatccagttcctgagcgaggcccaggacgacccccagaagagaaagcccgacatcaagaaggccaagctgatgctgggctgggagcccgtggtgcccctggaggagggcctgaacaaggccatccactacttcagaaaggagctggagtaccaggccaacaaccagtacatccccaagcccaagcccgccagaatcaagaagggcagaaccagacacagctag

SEQ ID NO: 104621 - DNA, 405 bp, synthetic construct
  misc_feature 1..405: note = Description of Artificial Sequence: Synthetic coding sequence
  source 1..405: mol_type = other DNA
atgtacaaccccatcaagaccctgaagaccaacaccatcggcaccctgaacatgctgggcctggccaagagagtgggcgccagactgctgctggccagcaccagcgaggtgtacggcgaccccgaggtgcacccccagagcgaggactactggggccacgtgaaccccatcggccccagagcctgctacgacgagggcaagagagtggccgagaccatgtgctacgcctacatgaagcaggagggcgtggaggtgagagtggccagaatcttcaacaccttcggccccagaatgcacatgaacgacggcagagtggtgagcaacttcatcctgcaggccctgcagggcgagcccctgaccgtgtacggcagcggcagccagaccagagccttccagtacgtgtag

SEQ ID NO: 104622 - DNA, 558 bp, synthetic construct
  misc_feature 1..558: note = Description of Artificial Sequence: Synthetic coding sequence
  source 1..558: mol_type = other DNA
atggtgagcaaggccctgctgagactggtgagcgccgtgaacagaagaagaatgaagctgctgctgggcatcgccctgctggcctacgtggcctggctggccaagagagtgggcgccagactgctgctggccagcaccagcgaggtgtacggcgaccccgaggtgcacccccagagcgaggactactggggccacgtgaaccccatcggccccagagcctgctacgacgagggcaagagagtggccgagaccatgtgctacgcctacatgaagcaggagggcgtggaggtgagagtggccagaatcttcaacaccttcggccccagaatgcacatgaacgacggcagagtggtgagcaacttcatcctgcaggccctgcagggcgagcccctgaccgtgtacggcagcggcagccagaccagagccttccagtacgtgagcgacctggtgaacggcctggtggccctgatgaacagcaacgtgagcagccccgtgaacctggtgagcgcccccctgccccccctgtgcagaaccgcccagaccttcgtgcacctgtag

SEQ ID NO: 104623 - DNA, 159 bp, synthetic construct
  misc_feature 1..159: note = Description of Artificial Sequence: Synthetic coding sequence
  source 1..159: mol_type = other DNA
atgtacaaccccatcaagaccctgaagaccaacaccatcggcaccctgaacatgctgggcctggccaagagagtgggcgccagactgctgctggccagcaccagcgaggtgtacggcgaccccgaggtgcacccccagagcgaggactactggggctag

SEQ ID NO: 104624 - DNA, 366 bp, synthetic construct
  misc_feature 1..366: note = Description of Artificial Sequence: Synthetic coding sequence
  source 1..366: mol_type = other DNA
atgtacaaccccatcaagaccctgaagaccaacaccatcggcaccctgaacatgctgggcctggccaagagagtgggcgccagactgctgctggccagcaccagcgaggtgtacggcgaccccgaggtgcacccccagagcgaggactactggggccacgtgaaccccatcggccccagagcctgctacgacgagggcaagagagtggccgagaccatgtgctacgcctacatgaagcaggagggcgtggaggtgagagtggccagaatcttcaacaccttcggccccagaatgcacatgaacgacggcagagtggtgagcaacttcatcctgcaggccctgcagggcgagcccctgaccgtgtag

SEQ ID NO: 104625 - DNA, 1092 bp, synthetic construct
  misc_feature 1..1092: note = Description of Artificial Sequence: Synthetic coding sequence
  source 1..1092: mol_type = other DNA
atggtggagcccctgagagagaagatcagagacctggagaagagcttcacccagaagtacccccccgtgaagttcctgagcgagaaggacagaaagagaatcctgatcaccggcggcgccggcttcgtgggcagccacctgaccgacaagctgatgatggacggccacgaggtgaccgtggtggacaacttcttcaccggcagaaagagaaacgtggagcactggatcggccacgagaacttcgagctgatcaaccacgacgtggtggagcccctgtacatcgaggtggaccagatctaccacctggccagccccgccagcccccccaactacatgtacaaccccatcaagaccctgaagaccaacaccatcggcaccctgaacatgctgggcctggccaagagagtgggcgccagactgctgctggccagcaccagcgaggtgtacggcgaccccgaggtgcacccccagagcgaggactactggggccacgtgaaccccatcggccccagagcctgctacgacgagggcaagagagtggccgagaccatgtgctacgcctacatgaagcaggagggcgtggaggtgagagtggccagaatcttcaacaccttcggccccagaatgcacatgaacgacggcagagtggtgagcaacttcatcctgcaggccctgcagggcgagcccctgaccgtgtacggcagcggcagccagaccagagccttccagtacgtgagcgacctggtgaacggcctggtggccctgatgaacagcaacgtgagcagccccgtgaacctgggcaaccccgaggagcacaccatcctggagttcgcccagctgatcaagaacctggtgggcagcggcagcgagatccagttcctgagcgaggcccaggacgacccccagaagagaaagcccgacatcaagaaggccaagctgatgctgggctgggagcccgtggtgcccctggaggagggcctgaacaaggccatccactacttcagaaaggagctggagtaccaggccaacaaccagtacatccccaagcccaagcccgccagaatcaagaagggcagaaccagacacagctag

SEQ ID NO: 104626 - DNA, 1680 bp, synthetic construct
  misc_feature 1..1680: note = Description of Artificial Sequence: Synthetic coding sequence
  source 1..1680: mol_type = other DNA
atgagaaagttcgcctactgcaaggtggtgctggccaccagcctgatctgggtgctgctggacatgttcctgctgctgtacttcagcgagtgcaacaagtgcgacgagaagaaggagagaggcctgcccgccggcgacgtgctggagcccgtgcagaagccccacgagggccccggcgagatgggcaagcccgtggtgatccccaaggaggaccaggagaagatgaaggagatgttcaagatcaaccagttcaacctgatggccagcgagatgatcgccctgaacagaagcctgcccgacgtgagactggagggctgcaagaccaaggtgtaccccgacaacctgcccaccaccagcgtggtgatcgtgttccacaacgaggcctggagcaccctgctgagaaccgtgcacagcgtgatcaacagaagccccagacacatgatcgaggagatcgtgctggtggacgacgccagcgagagagacttcctgaagagacccctggagagctacgtgaagaagctgaaggtgcccgtgcacgtgatcagaatggagcagagaagcggcctgatcagagccagactgaagggcgccgccgtgagcaagggccaggtgatcaccttcctggacgcccactgcgagtgcaccgtgggctggctggagcccctgctggccagaatcaagcacgacagaagaaccgtggtgtgccccatcatcgacgtgatcagcgacgacaccttcgagtacatggccggcagcgacatgacctacggcggcttcaactggaagctgaacttcagatggtaccccgtgccccagagagagatggacagaagaaagggcgacagaaccctgcccgtgagaacccccaccatggccggcggcctgttcagcatcgacagagactacttccaggagatcggcacctacgacgccggcatggacatctggggcggcgagaacctggagatcagcttcagaatctggcagtgcggcggcaccctggagatcgtgacctgcagccacgtgggccacgtgttcagaaaggccaccccctacaccttccccggcggcaccggccagatcatcaacaagaacaacagaagactggccgaggtgtggatggacgagttcaagaacttcttctacatcatcagccccggcgtgaccaaggtggactacggcgacatcagcagcagagtgggcctgagacacaagctgcagtgcaagcccttcagctggtacctggagaacatctaccccgacagccagatccccagacactacttcagcctgggcgagatcagaaacgtggagaccaaccagtgcctggacaacatggccagaaaggagaacgagaaggtgggcatcttcaactgccacggcatgggcggcaaccaggtgttcagctacaccgccaacaaggagatcagaaccgacgacctgtgcctggacgtgagcaagctgaacggccccgtgaccatgctgaagtgccaccacctgaagggcaaccagctgtgggagtacgaccccgtgaagctgaccctgcagcacgtgaacagcaaccagtgcctggacaaggccaccgaggaggacagccaggtgcccagcatcagagactgcaacggcagcagaagccagcagtggctgctgagaaacgtgaccctgcccgagatcttctag

SEQ ID NO: 104627 - DNA, 1500 bp, synthetic construct
  misc_feature 1..1500: note = Description of Artificial Sequence: Synthetic coding sequence
  source 1..1500: mol_type = other DNA
atgggcaagcccgtggtgatccccaaggaggaccaggagaagatgaaggagatgttcaagatcaaccagttcaacctgatggccagcgagatgatcgccctgaacagaagcctgcccgacgtgagactggagggctgcaagaccaaggtgtaccccgacaacctgcccaccaccagcgtggtgatcgtgttccacaacgaggcctggagcaccctgctgagaaccgtgcacagcgtgatcaacagaagccccagacacatgatcgaggagatcgtgctggtggacgacgccagcgagagagacttcctgaagagacccctggagagctacgtgaagaagctgaaggtgcccgtgcacgtgatcagaatggagcagagaagcggcctgatcagagccagactgaagggcgccgccgtgagcaagggccaggtgatcaccttcctggacgcccactgcgagtgcaccgtgggctggctggagcccctgctggccagaatcaagcacgacagaagaaccgtggtgtgccccatcatcgacgtgatcagcgacgacaccttcgagtacatggccggcagcgacatgacctacggcggcttcaactggaagctgaacttcagatggtaccccgtgccccagagagagatggacagaagaaagggcgacagaaccctgcccgtgagaacccccaccatggccggcggcctgttcagcatcgacagagactacttccaggagatcggcacctacgacgccggcatggacatctggggcggcgagaacctggagatcagcttcagaatctggcagtgcggcggcaccctggagatcgtgacctgcagccacgtgggccacgtgttcagaaaggccaccccctacaccttccccggcggcaccggccagatcatcaacaagaacaacagaagactggccgaggtgtggatggacgagttcaagaacttcttctacatcatcagccccggcgtgaccaaggtggactacggcgacatcagcagcagagtgggcctgagacacaagctgcagtgcaagcccttcagctggtacctggagaacatctaccccgacagccagatccccagacactacttcagcctgggcgagatcagaaacgtggagaccaaccagtgcctggacaacatggccagaaaggagaacgagaaggtgggcatcttcaactgccacggcatgggcggcaaccaggtgttcagctacaccgccaacaaggagatcagaaccgacgacctgtgcctggacgtgagcaagctgaacggccccgtgaccatgctgaagtgccaccacctgaagggcaaccagctgtgggagtacgaccccgtgaagctgaccctgcagcacgtgaacagcaaccagtgcctggacaaggccaccgaggaggacagccaggtgcccagcatcagagactgcaacggcagcagaagccagcagtggctgctgagaaacgtgaccctgcccgagatcttctag

SEQ ID NO: 104628 - DNA, 1680 bp, synthetic construct; identical to SEQ ID NO: 104626
  misc_feature 1..1680: note = Description of Artificial Sequence: Synthetic coding sequence
  source 1..1680: mol_type = other DNA

SEQ ID NO: 104629 - DNA, 1812 bp, synthetic construct
  misc_feature 1..1812: note = Description of Artificial Sequence: Synthetic coding sequence
  source 1..1812: mol_type = other DNA
atgagaagaaaggagaagagactgctgcaggccgtggccctggtgctggccgccctggtgctgctgcccaacgtgggcctgtgggccctgtacagagagagacagcccgacggcacccccggcggcagcggcgccgccgtggcccccgccgccggccagggcagccacagcagacagaagaagaccttcttcctgggcgacggccagaagctgaaggactggcacgacaaggaggccatcagaagagacgcccagagagtgggcaacggcgagcagggcagaccctaccccatgaccgacgccgagagagtggaccaggcctacagagagaacggcttcaacatctacgtgagcgacaagatcagcctgaacagaagcctgcccgacatcagacaccccaactgcaacagcaagagatacctggagaccctgcccaacaccagcatcatcatccccttccacaacgagggctggagcagcctgctgagaaccgtgcacagcgtgctgaacagaagcccccccgagctggtggccgagatcgtgctggtggacgacttcagcgacagagagcacctgaagaagcccctggaggactacatggccctgttccccagcgtgagaatcctgagaaccaagaagagagagggcctgatcagaaccagaatgctgggcgccagcgtggccaccggcgacgtgatcaccttcctggacagccactgcgaggccaacgtgaactggctgccccccctgctggacagaatcgccagaaacagaaagaccatcgtgtgccccatgatcgacgtgatcgaccacgacgacttcagatacgagacccaggccggcgacgccatgagaggcgccttcgactgggagatgtactacaagagaatccccatcccccccgagctgcagaaggccgaccccagcgaccccttcgagagccccgtgatggccggcggcctgttcgccgtggacagaaagtggttctgggagctgggcggctacgaccccggcctggagatctggggcggcgagcagtacgagatcagcttcaaggtgtggatgtgcggcggcagaatggaggacatcccctgcagcagagtgggccacatctacagaaagtacgtgccctacaaggtgcccgccggcgtgagcctggccagaaacctgaagagagtggccgaggtgtggatggacgagtacgccgagtacatctaccagagaagacccgagtacagacacctgagcgccggcgacgtggccgtgcagaagaagctgagaagcagcctgaactgcaagagcttcaagtggttcatgaccaagatcgcctgggacctgcccaagttctacccccccgtggagccccccgccgccgcctggggcgagatcagaaacgtgggcaccggcctgtgcgccgacaccaagcacggcgccctgggcagccccctgagactggagggctgcgtgagaggcagaggcgaggccgcctggaacaacatgcaggtgttcaccttcacctggagagaggacatcagacccggcgacccccagcacaccaagaagttctgcttcgacgccatcagccacaccagccccgtgaccctgtacgactgccacagcatgaagggcaaccagctgtggaagtacagaaaggacaagaccctgtaccaccccgtgagcggcagctgcatggactgcagcgagagcgaccacagaatcttcatgaacacctgcaaccccagcagcctgacccagcagtggctgttcgagcacaccaacagcaccgtgctggagaagttcaacagaaactag

SEQ ID NO: 104630 - DNA, 831 bp, synthetic construct
  misc_feature 1..831: note = Description of Artificial Sequence: Synthetic coding sequence
  source 1..831: mol_type = other DNA
atgctggcctggagagacggcgagctggaggccgagaccagcagcagcctgttcctgctggccatgcaggtgtggatgtgcggcggcagaatggaggacatcccctgcagcagagtgggccacatctacagaaagtacgtgccctacaaggtgcccgccggcgtgagcctggccagagtgagaaacctgaagagagtggccgaggtgtggatggacgagtacgccgagtacatctaccagagaagacccgagtacagacacctgagcgccggcgacgtggccgtgcagaagaagctgagaagcagcctgaactgcaagagcttcaagtggttcatgaccaagatcgcctgggacctgcccaagttctacccccccgtggagccccccgccgccgcctggggcgagatcagaaacgtgggcaccggcctgtgcgccgacaccaagcacggcgccctgggcagccccctgagactggagggctgcgtgagaggcagaggcgaggccgcctggaacaacatgcaggtgttcaccttcacctggagagaggacatcagacccggcgacccccagcacaccaagaagttctgcttcgacgccatcagccacaccagccccgtgaccctgtacgactgccacagcatgaagggcaaccagctgtggaagtacagaaaggacaagaccctgtaccaccccgtgagcggcagctgcatggactgcagcgagagcgaccacagaatcttcatgaacacctgcaaccccagcagcctgacccagcagtggctgttcgagcacaccaacagcaccgtgctggagaagttcaacagaaactag

SEQ ID NO: 104631 - DNA, 1626 bp, synthetic construct
  misc_feature 1..1626: note = Description of Artificial Sequence: Synthetic coding sequence
  source 1..1626: mol_type = other DNA
atgagaagaaaggagaagagactgctgcaggccgtggccctggtgctggccgccctggtgctgctgcccaacgtgggcctgtgggccctgtacagagagagacagcccgacggcacccccggcggcagcggcgccgccgtggcccccgccgccggccagggcagccacagcagacagaagaagaccttcttcctgggcgacggccagaagctgaaggactggcacgacaaggaggccatcagaagagacgcccagagagtgggcaacggcgagcagggcagaccctaccccatgaccgacgccgagagagtggaccaggcctacagagagaacggcttcaacatctacgtgagcgacaagatcagcctgaacagaagcctgcccgacatcagacaccccaactgcaacagcaagagatacctggagaccctgcccaacaccagcatcatcatccccttccacaacgagggctggagcagcctgctgagaaccgtgcacagcgtgctgaacagaagcccccccgagctggtggccgagatcgtgctggtggacgacttcagcgacagagacagaatcgccagaaacagaaagaccatcgtgtgccccatgatcgacgtgatcgaccacgacgacttcagatacgagacccaggccggcgacgccatgagaggcgccttcgactgggagatgtactacaagagaatccccatcccccccgagctgcagaaggccgaccccagcgaccccttcgagagccccgtgatggccggcggcctgttcgccgtggacagaaagtggttctgggagctgggcggctacgaccccggcctggagatctggggcggcgagcagtacgagatcagcttcaaggtgtggatgtgcggcggcagaatggaggacatcccctgcagcagagtgggccacatctacagaaagtacgtgccctacaaggtgcccgccggcgtgagcctggccagaaacctgaagagagtggccgaggtgtggatggacgagtacgccgagtacatctaccagagaagacccgagtacagacacctgagcgccggcgacgtggccgtgcagaagaagctgagaagcagcctgaactgcaagagcttcaagtggttcatgaccaagatcgcctgggacctgcccaagttctacccccccgtggagccccccgccgccgcctggggcgagatcagaaacgtgggcaccggcctgtgcgccgacaccaagcacggcgccctgggcagccccctgagactggagggctgcgtgagaggcagaggcgaggccgcctggaacaacatgcaggtgttcaccttcacctggagagaggacatcagacccggcgacccccagcacaccaagaagttctgcttcgacgccatcagccacaccagccccgtgaccctgtacgactgccacagcatgaagggcaaccagctgtggaagtacagaaaggacaagaccctgtaccaccccgtgagcggcagctgcatggactgcagcgagagcgaccacagaatcttcatgaacacctgcaaccccagcagcctgacccagcagtggctgttcgagcacaccaacagcaccgtgctggagaagttcaacagaaactag

SEQ ID NO: 104632 - DNA, 1101 bp, synthetic construct
  misc_feature 1..1101: note = Description of Artificial Sequence: Synthetic coding sequence
  source 1..1101: mol_type = other DNA
atgagaagaaaggagaagagactgctgcaggccgtggccctggtgctggccgccctggtgctgctgcccaacgtgggcctgtgggccctgtacagagagagacagcccgacggcacccccggcggcagcggcgccgccgtggcccccgccgccggccagggcagccacagcagacagaagaagaccttcttcctgggcgacggccagaagctgaaggactggcacgacaaggaggccatcagaagagacgcccagagagtgggcaacggcgagcagggcagaccctaccccatgaccgacgccgagagagtggaccaggcctacagagagaacggcttcaacatctacgtgagcgacaagatcagcctgaacagaagcctgcccgacatcagacaccccaactgcaacagcaagagatacctggagaccctgcccaacaccagcatcatcatccccttccacaacgagggctggagcagcctgctgagaaccgtgcacagcgtgctgaacagaagcccccccgagctggtggccgagatcgtgctggtggacgacttcagcgacagagagcacctgaagaagcccctggaggactacatggccctgttccccagcgtgagaatcctgagaaccaagaagagagagggcctgatcagaaccagaatgctgggcgccagcgtggccaccggcgacgtgatcaccttcctggacagccactgcgaggccaacgtgaactggctgccccccctgctggacagaatcgccagaaacagaaagaccatcgtgtgccccatgatcgacgtgatcgaccacgacgacttcagatacgagacccaggccggcgacgccatgagaggcgccttcgactgggagatgtactacaagagaatccccatcccccccgagctgcagaaggccgaccccagcgaccccttcgagagccccgtgatggccggcggcctgttcgccgtggacagaaagtggttctgggagctgggcggctacgaccccggcctggagatctggggcggcgagcagtacgagatcagcttcaaggtgagccagctgagcagaagacccgtgctgggcaccgccagctag

SEQ ID NO: 104633 - DNA, 1746 bp, synthetic construct
  misc_feature 1..1746: note = Description of Artificial Sequence: Synthetic coding sequence
  source 1..1746: mol_type = other DNA
atgtggggcagaaccgccagaagaagatgccccagagagctgagaagaggcagagaggccctgctggtgctgctggccctgctggccctggccggcctgggcagcgtgctgagagcccagagaggcgccggcgccggcgccgccgagcccggcccccccagaacccccagacccggcagaagagagcccgtgatgcccagaccccccgtgcccgccaacgccctgggcgccagaggcgaggccgtgagactgcagctgcagggcgaggagctgagactgcaggaggagagcgtgagactgcaccagatcaacatctacctgagcgacagaatcagcctgcacagaagactgcccgagagatggaaccccctgtgcaaggagaagaagtacgactacgacaacctgcccagaaccagcgtgatcatcgccttctacaacgaggcctggagcaccctgctgagaaccgtgtacagcgtgctggagaccagccccgacatcctgctggaggaggtgatcctggtggacgactacagcgacagagagcacctgaaggagagactggccaacgagctgagcggcctgcccaaggtgagactgatcagagccaacaagagagagggcctggtgagagccagactgctgggcgccagcgccgccagaggcgacgtgctgaccttcctggactgccactgcgagtgccacgagggctggctggagcccctgctgcagagaatccacgaggaggagagcgccgtggtgtgccccgtgatcgacgtgatcgactggaacaccttcgagtacctgggcaacagcggcgagccccagatcggcggcttcgactggagactggtgttcacctggcacaccgtgcccgagagagagagaatcagaatgcagagccccgtggacgtgatcagaagccccaccatggccggcggcctgttcgccgtgagcaagaagtacttcgagtacctgggcagctacgacaccggcatggaggtgtggggcggcgagaacctggagttcagcttcagaatctggcagtgcggcggcgtgctggagacccacccctgcagccacgtgggccacgtgttccccaagcaggccccctacagcagaaacaaggccctggccaacagcgtgagagccgccgaggtgtggatggacgagttcaaggagctgtactaccacagaaaccccagagccagactggagcccttcggcgacgtgaccgagagaaagcagctgagagacaagctgcagtgcaaggacttcaagtggttcctggagaccgtgtaccccgagctgcacgtgcccgaggacagacccggcttcttcggcatgctgcagaacaagggcctgaccgactactgcttcgactacaacccccccgacgagaaccagatcgtgggccaccaggtgatcctgtacctgtgccacggcatgggccagaaccagttcttcgagtacaccagccagaaggagatcagatacaacacccaccagcccgagggctgcatcgccgtggaggccggcatggacaccctgatcatgcacctgtgcgaggagaccgcccccgagaaccagaagttcatcctgcaggaggacggcagcctgttccacgagcagagcaagaagtgcgtgcaggccgccagaaaggagagcagcgacagcttcgtgcccctgctgagagactgcaccaacagcgaccaccagaagtggttcttcaaggagagaatgctgtag

SEQ ID NO: 104634 - DNA, 1671 bp, synthetic construct
  misc_feature 1..1671: note = Description of Artificial Sequence: Synthetic coding sequence
  source 1..1671: mol_type = other DNA
atgagaagattcgtgtactgcaaggtggtgctggccaccagcctgatgtgggtgctggtggacgtgttcctgctgctgtacttcagcgagtgcaacaagtgcgacgacaagaaggagagaagcctgctgcccgccctgagagccgtgatcagcagaaaccaggagggccccggcgagatgggcaaggccgtgctgatccccaaggacgaccaggagaagatgaaggagctgttcaagatcaaccagttcaacctgatggccagcgacctgatcgccctgaacagaagcctgcccgacgtgagactggagggctgcaagaccaaggtgtaccccgacgagctgcccaacaccagcgtggtgatcgtgttccacaacgaggcctggagcaccctgctgagaaccgtgtacagcgtgatcaacagaagcccccactacctgctgagcgaggtgatcctggtggacgacgccagcgagagagacttcctgaagctgaccctggagaactacgtgaagaacctggaggtgcccgtgaagatcatcagaatggaggagagaagcggcctgatcagagccagactgagaggcgccgccgccagcaagggccaggtgatcaccttcctggacgcccactgcgagtgcaccctgggctggctggagcccctgctggccagaatcaaggaggacagaaagaccgtggtgtgccccatcatcgacgtgatcagcgacgacaccttcgagtacatggccggcagcgacatgacctacggcggcttcaactggaagctgaacttcagatggtaccccgtgccccagagagagatggacagaagaaagggcgacagaaccctgcccgtgagaacccccaccatggccggcggcctgttcagcatcgacagaaactacttcgaggagatcggcacctacgacgccggcatggacatctggggcggcgagaacctggagatgagcttcagaatctggcagtgcggcggcagcctggagatcgtgacctgcagccacgtgggccacgtgttcagaaaggccaccccctacaccttccccggcggcaccggccacgtgatcaacaagaacaacagaagactggccgaggtgtggatggacgagttcaaggacttcttctacatcatcagccccggcgtggtgaaggtggactacggcgacgtgagcgtgagaaagaccctgagagagaacctgaagtgcaagcccttcagctggtacctggagaacatctaccccgacagccagatccccagaagatactacagcctgggcgagatcagaaacgtggagaccaaccagtgcctggacaacatgggcagaaaggagaacgagaaggtgggcatcttcaactgccacggcatgggcggcaaccaggtgttcagctacaccgccgacaaggagatcagaaccgacgacctgtgcctggacgtgagcagactgaacggccccgtgatcatgctgaagtgccaccacatgagaggcaaccagctgtgggagtacgacgccgagagactgaccctgagacacgtgaacagcaaccagtgcctggacgagcccagcgaggaggacaagatggtgcccaccatgcaggactgcagcggcagcagaagccagcagtggctgctgagaaacatgaccctgggcacctag

SEQ ID NO: 104635 - DNA, 1686 bp, synthetic construct
  misc_feature 1..1686: note = Description of Artificial Sequence: Synthetic coding sequence
  source 1..1686: mol_type = other DNA
atgagaagattcgtgtactgcaaggtggtgctggccaccagcctgatgtgggtgctggtggacgtgttcctgctgctgtacttcagcgagtgcaacaagtgcgacgacaagaaggagagaagcctgctgcccgccctgagagccgtgatcagcagaaaccaggagggccccggcgagatgggcaaggccgtgctgatccccaaggacgaccaggagaagatgaaggagctgttcaagatcaaccagttcaacctgatggccagcgacctgatcgccctgaacagaagcctgcccgacgtgagactggagggctgcaagaccaaggtgtaccccgacgagctgcccaacaccagcgtggtgatcgtgttccacaacgaggcctggagcaccctgctgagaaccgtgtacagcgtgatcaacagaagcccccactacctgctgagcgaggtgatcctggtggacgacgccagcgagagagacttcctgaagctgaccctggagaactacgtgaagaacctggaggtgcccgtgaagatcatcagaatggaggagagaagcggcctgatcagagccagactgagaggcgccgccgccagcaagggccaggtgatcaccttcctggacgcccactgcgagtgcaccctgggctggctggagcccctgctggccagaatcaaggaggacagaaagaccgtggtgtgccccatcatcgacgtgatcagcgacgacaccttcgagtacatggccggcagcgacatgacctacggcggcttcaactggaagctgaacttcagatggtaccccgtgccccagagagagatggacagaagaaagggcgacagaaccctgcccgtgagaacccccaccatggccggcggcctgttcagcatcgacagaaactacttcgaggagatcggcacctacgacgccggcatggacatctggggcggcgagaacctggagatgagcttcagaatctggcagtgcggcggcagcctggagatcgtgacctgcagccacgtgggccacgtgttcagaaaggccaccccctacaccttccccggcggcaccggccacgtgatcaacaagaacaacagaagactggccgaggtgtggatggacgagttcaaggacttcttctacatcatcagccccggcgtggtgaaggtggactacggcgacgtgagcgtgagaaagaccctgagagagaacctgaagtgcaagcccttcagctggtacctggagaacatctaccccgacagccagatccccagaagatactacagcctgggcgagatcagaaacgtggagaccaaccagtgcctggacaacatgggcagaaaggagaacgagaaggtgggcatcttcaactgccacggcatgggcggcaaccaggtgttcagctacaccgccgacaaggagatcagaaccgacgacctgtgcctggacgtgagcagactgaacggccccgtgatcatgctgaagtgccaccacatgagaggcaaccagctgtgggagtacgacgccgagagctgcctgagcgtgaacaaggtggccgacggcagccagcaccccaccgtggagacctgcaacgacagcaccctgcagaagtggctgctgagaaactacaccagaatggagatcttcagaaacatcttcggcaacagcaccgactacatcctgtag

SEQ ID NO: 104636 - DNA, 60 bp, synthetic construct
  misc_feature 1..60: note = Description of Artificial Sequence: Synthetic coding sequence
  source 1..60: mol_type = other DNA
atgagaagattcgtgtactgcaaggtggtgctggccaccagcctgatgtgggtgctgtag

SEQ ID NO: 104637 - DNA, 1659 bp, synthetic construct
  misc_feature 1..1659: note = Description of Artificial Sequence: Synthetic coding sequence
  source 1..1659: mol_type = other DNA
atgagaagactgaccagaagactggtgctgcccgtgttcggcgtgctgtggatcaccgtgctgctgttcttctgggtgaccaagagaaagctggaggtgcccaccggccccgaggtgcagacccccaagcccagcgacgccgactgggacgacctgtgggaccagttcgacgagagaagatacctgaacgccaagaagtggagagtgggcgacgacccctacaagctgtacgccttcaaccagagagagagcgagagaatcagcagcaacagagccatccccgacaccagacacctgagatgcaccctgctggtgtactgcaccgacctgccccccaccagcatcatcatcaccttccacaacgaggccagaagcaccctgctgagaaccatcagaagcgtgctgaacagaacccccacccacctgatcagagagatcatcctggtggacgacttcagcaacgaccccgacgactgcaagcagctgatcaagctgcccaaggtgaagtgcctgagaaacaacgagagacagggcctggtgagaagcagaatcagaggcgccgacatcgcccagggcaccaccctgaccttcctggacagccactgcgaggtgaacagagactggctgcagcccctgctgcacagagtgaaggaggactacaccagagtggtgtgccccgtgatcgacatcatcaacctggacaccttcacctacatcgagagcgccagcgagctgagaggcggcttcgactggagcctgcacttccagtgggagcagctgagccccgagcagaaggccagaagactggaccccaccgagcccatcagaacccccatcatcgccggcggcctgttcgtgatcgacaaggcctggttcgactacctgggcaagtacgacatggacatggacatctggggcggcgagaacttcgagatcagcttcagagtgtggatgtgcggcggcagcctggagatcgtgccctgcagcagagtgggccacgtgttcagaaagaagcacccctacgtgttccccgacggcaacgccaacacctacatcaagaacaccaagagaaccgccgaggtgtggatggacgagtacaagcagtactactacgccgccagacccttcgccctggagagacccttcggcaacgtggagagcagactggacctgagaaagaacctgagatgccagagcttcaagtggtacctggagaacatctaccccgagctgagcatccccaaggagagcagcatccagaagggcaacatcagacagagacagaagtgcctggagagccagagacagaacaaccaggagacccccaacctgaagctgagcccctgcgccaaggtgaagggcgaggacgccaagagccaggtgtgggccttcacctacacccagcagatcctgcaggaggagctgtgcctgagcgtgatcaccctgttccccggcgcccccgtggtgctggtgctgtgcaagaacggcgacgacagacagcagtggaccaagaccggcagccacatcgagcacatcgccagccacctgtgcctggacaccgacatgttcggcgacggcaccgagaacggcaaggagatcgtggtgaacccctgcgagagcagcctgatgagccagcactgggacatggtgagcagctag

SEQ ID NO: 104638 - DNA, 1560 bp, synthetic construct
  misc_feature 1..1560: note = Description of Artificial Sequence: Synthetic coding sequence
  source 1..1560: mol_type = other DNA
atgagaagactgaccagaagactggtgctgcccgtgttcggcgtgctgtggatcaccgtgctgctgttcttctgggtgaccaagagaaagctggaggtgcccaccggccccgaggtgcagacccccaagcccagcgacgccgactgggacgacctgtgggaccagttcgacgagagaagatacctgaacgccaagaagtggagagtgggcgacgacccctacaagctgtacgccttcaaccagagagagagcgagagaatcagcagcaacagagccatccccgacaccagacacctgagcgtgctgaacagaacccccacccacctgatcagagagatcatcctggtggacgacttcagcaacgaccccgacgactgcaagcagctgatcaagctgcccaaggtgaagtgcctgagaaacaacgagagacagggcctggtgagaagcagaatcagaggcgccgacatcgcccagggcaccaccctgaccttcctggacagccactgcgaggtgaacagagactggctgcagcccctgctgcacagagtgaaggaggactacaccagagtggtgtgccccgtgatcgacatcatcaacctggacaccttcacctacatcgagagcgccagcgagctgagaggcggcttcgactggagcctgcacttccagtgggagcagctgagccccgagcagaaggccagaagactggaccccaccgagcccatcagaacccccatcatcgccggcggcctgttcgtgatcgacaaggcctggttcgactacctgggcaagtacgacatggacatggacatctggggcggcgagaacttcgagatcagcttcagagtgtggatgtgcggcggcagcctggagatcgtgccctgcagcagagtgggccacgtgttcagaaagaagcacccctacgtgttccccgacggcaacgccaacacctacatcaagaacaccaagagaaccgccgaggtgtggatggacgagtacaagcagtactactacgccgccagacccttcgccctggagagacccttcggcaacgtggagagcagactggacctgagaaagaacctgagatgccagagcttcaagtggtacctggagaacatctaccccgagctgagcatccccaaggagagcagcatccagaagggcaacatcagacagagacagaagtgcctggagagccagagacagaacaaccaggagacccccaacctgaagctgagcccctgcgccaaggtgaagggcgaggacgccaagagccaggtgtgggccttcacctacacccagcagatcctgcaggaggagctgtgcctgagcgtgatcaccctgttccccggcgcccccgtggtgctggtgctgtgcaagaacggcgacgacagacagcagtggaccaagaccggcagccacatcgagcacatcgccagccacctgtgcctggacaccgacatgttcggcgacggcaccgagaacggcaaggagatcgtggtgaacccctgcgagagcagcctgatgagccagcactgggacatggtgagcagctag

SEQ ID NO: 104639 - DNA, 1599 bp, synthetic construct
  misc_feature 1..1599: note = Description of Artificial Sequence: Synthetic coding sequence
  source 1..1599: mol_type = other DNA
atgagcttccccatgagcctggccagaagcagcgtgcccttcgccgacagcggcctgagcagcagccagcccagcgacgccgactgggacgacctgtgggaccagttcgacgagagaagatacctgaacgccaagaagtggagagtgggcgacgacccctacaagctgtacgccttcaaccagagagagagcgagagaatcagcagcaacagagccatccccgacaccagacacctgagatgcaccctgctggtgtactgcaccgacctgccccccaccagcatcatcatcaccttccacaacgaggccagaagcaccctgctgagaaccatcagaagcgtgctgaacagaacccccacccacctgatcagagagatcatcctggtggacgacttcagcaacgaccccgacgactgcaagcagctgatcaagctgcccaaggtgaagtgcctgagaaacaacgagagacagggcctggtgagaagcagaatcagaggcgccgacatcgcccagggcaccaccctgaccttcctggacagccactgcgaggtgaacagagactggctgcagcccctgctgcacagagtgaaggaggactacaccagagtggtgtgccccgtgatcgacatcatcaacctggacaccttcacctacatcgagagcgccagcgagctgagaggcggcttcgactggagcctgcacttccagtgggagcagctgagccccgagcagaaggccagaagactggaccccaccgagcccatcagaacccccatcatcgccggcggcctgttcgtgatcgacaaggcctggttcgactacctgggcaagtacgacatggacatggacatctggggcggcgagaacttcgagatcagcttcagagtgtggatgtgcggcggcagcctggagatcgtgccctgcagcagagtgggccacgtgttcagaaagaagcacccctacgtgttccccgacggcaacgccaacacctacatcaagaacaccaagagaaccgccgaggtgtggatggacgagtacaagcagtactactacgccgccagacccttcgccctggagagacccttcggcaacgtggagagcagactggacctgagaaagaacctgagatgccagagcttcaagtggtacctggagaacatctaccccgagctgagcatccccaaggagagcagcatccagaagggcaacatcagacagagacagaagtgcctggagagccagagacagaacaaccaggagacccccaacctgaagctgagcccctgcgccaaggtgaagggcgaggacgccaagagccaggtgtgggccttcacctacacccagcagatcctgcaggaggagctgtgcctgagcgtgatcaccctgttccccggcgcccccgtggtgctggtgctgtgcaagaacggcgacgacagacagcagtggaccaagaccggcagccacatcgagcacatcgccagccacctgtgcctggacaccgacatgttcggcgacggcaccgagaacggcaaggagatcgtggtgaacccctgcgagagcagcctgatgagccagcactgggacatggtgagcagctag

SEQ ID NO: 104640 - DNA, 1554 bp, synthetic construct
  misc_feature 1..1554: note = Description of Artificial Sequence: Synthetic coding sequence
  source 1..1554: mol_type = other DNA
atggcccaggacgagagctgcccccccagcgacgccgactgggacgacctgtgggaccagttcgacgagagaagatacctgaacgccaagaagtggagagtgggcgacgacccctacaagctgtacgccttcaaccagagagagagcgagagaatcagcagcaacagagccatccccgacaccagacacctgagatgcaccctgctggtgtactgcaccgacctgccccccaccagcatcatcatcaccttccacaacgaggccagaagcaccctgctgagaaccatcagaagcgtgctgaacagaacccccacccacctgatcagagagatcatcctggtggacgacttcagcaacgaccccgacgactgcaagcagctgatcaagctgcccaaggtgaagtgcctgagaaacaacgagagacagggcctggtgagaagcagaatcagaggcgccgacatcgcccagggcaccaccctgaccttcctggacagccactgcgaggtgaacagagactggctgcagcccctgctgcacagagtgaaggaggactacaccagagtggtgtgccccgtgatcgacatcatcaacctggacaccttcacctacatcgagagcgccagcgagctgagaggcggcttcgactggagcctgcacttccagtgggagcagctgagccccgagcagaaggccagaagactggaccccaccgagcccatcagaacccccatcatcgccggcggcctgttcgtgatcgacaaggcctggttcgactacctgggcaagtacgacatggacatggacatctggggcggcgagaacttcgagatcagcttcagagtgtggatgtgcggcggcagcctggagatcgtgccctgcagcagagtgggccacgtgttcagaaagaagcacccctacgtgttccccgacggcaacgccaacacctacatcaagaacaccaagagaaccgccgaggtgtggatggacgagtacaagcagtactactacgccgccagacccttcgccctggagagacccttcggcaacgtggagagcagactggacctgagaaagaacctgagatgccagagcttcaagtggtacctggagaacatctaccccgagctgagcatccccaaggagagcagcatccagaagggcaacatcagacagagacagaagtgcctggagagccagagacagaacaaccaggagacccccaacctgaagctgagcccctgcgccaaggtgaagggcgaggacgccaagagccaggtgtgggccttcacctacacccagcagatcctgcaggaggagctgtgcctgagcgtgatcaccctgttccccggcgcccccgtggtgctggtgctgtgcaagaacggcgacgacagacagcagtggaccaagaccggcagccacatcgagcacatcgccagccacctgtgcctggacaccgacatgttcggcgacggcaccgagaacggcaaggagatcgtggtgaacccctgcgagagcagcctgatgagccagcactgggacatggtgagcagctag

SEQ ID NO: 104641 - DNA, 1674 bp, synthetic construct
  misc_feature 1..1674: note = Description of Artificial Sequence: Synthetic coding sequence
  source 1..1674: mol_type = other DNA
atgagaagactgaccagaagactggtgctgcccgtgttcggcgtgctgtggatcaccgtgctgctgttcttctgggtgaccaagagaaagctggaggtgcccaccggccccgaggtgcagacccccaaggtgtggagcctgttcttcaaggtggccggcatgagcccctgggccccccaggtgcccgtgagccccacccccccctaccagagaggccacctgcccaccggcggccacctggccgtgtgccacttcccctgcctgctgcaggaggcccagttccacctgcagacccaggtgttcctgcaggtgagatgcaccctgctggtgtactgcaccgacctgccccccaccagcatcatcatcaccttccacaacgaggccagaagcaccctgctgagaaccatcagaagcgtgctgaacagaacccccacccacctgatcagagagatcatcctggtggacgacttcagcaacgaccccgacgactgcaagcagctgatcaagctgcccaaggtgaagtgcctgagaaacaacgagagacagggcctggtgagaagcagaatcagaggcgccgacatcgcccagggcaccaccctgaccttcctggacagccactgcgaggtgaacagagactggctgcagcccctgctgcacagagtgaaggaggactacaccagagtggtgtgccccgtgatcgacatcatcaacctggacaccttcacctacatcgagagcgccagcgagctgagaggcggcttcgactggagcctgcacttccagtgggagcagctgagccccgagcagaaggccagaagactggaccccaccgagcccatcagaacccccatcatcgccggcggcctgttcgtgatcgacaaggcctggttcgactacctgggcaagtacgacatggacatggacatctggggcggcgagaacttcgagatcagcttcagagtgtggatgtgcggcggcagcctggagatcgtgccctgcagcagagtgggccacgtgttcagaaagaagcacccctacgtgttccccgacggcaacgccaacacctacatcaagaacaccaagagaaccgccgaggtgtggatggacgagtacaagcagtactactacgccgccagacccttcgccctggagagacccttcggcaacgtggagagcagactggacctgagaaagaacctgagatgccagagcttcaagtggtacctggagaacatctaccccgagctgagcatccccaaggagagcagcatccagaagggcaacatcagacagagacagaagtgcctggagagccagagacagaacaaccaggagacccccaacctgaagctgagcccctgcgccaaggtgaagggcgaggacgccaagagccaggtgtgggccttcacctacacccagcagatcctgcaggaggagctgtgcctgagcgtgatcaccctgttccccggcgcccccgtggtgctggtgctgtgcaagaacggcgacgacagacagcagtggaccaagaccggcagccacatcgagcacatcgccagccacctgtgcctggacaccgacatgttcggcgacggcaccgagaacggcaaggagatcgtggtgaacccctgcgagagcagcctgatgagccagcactgggacatggtgagcagctag

SEQ ID NO: 104642 - DNA, 1716 bp, synthetic construct
  misc_feature 1..1716: note = Description of Artificial Sequence: Synthetic coding sequence
  source 1..1716: mol_type = other DNA
atgagaagaagaagcagaatgctgctgtgcttcgccttcctgtgggtgctgggcatcgcctactacatgtacagcggcggcggcagcgccctggccggcggcgccggcggcggcgccggcagaaaggaggactggaacgagatcgaccccatcaagaagaaggacctgcaccacagcaacggcgaggagaaggcccagagcatggagaccctgccccccggcaaggtgagatggcccgacttcaaccaggaggcctacgtgggcggcaccatggtgagaagcggccaggacccctacgccagaaacaagttcaaccaggtggagagcgacaagctgagaatggacagagccatccccgacaccagacacgaccagtgccagagaaagcagtggagagtggacctgcccgccaccagcgtggtgatcaccttccacaacgaggccagaagcgccctgctgagaaccgtggtgagcgtgctgaagaagagccccccccacctgatcaaggagatcatcctggtggacgactacagcaacgaccccgaggacggcgccctgctgggcaagatcgagaaggtgagagtgctgagaaacgacagaagagagggcctgatgagaagcagagtgagaggcgccgacgccgcccaggccaaggtgctgaccttcctggacagccactgcgagtgcaacgagcactggctggagcccctgctggagagagtggccgaggacagaaccagagtggtgagccccatcatcgacgtgatcaacatggacaacttccagtacgtgggcgccagcgccgacctgaagggcggcttcgactggaacctggtgttcaagtgggactacatgacccccgagcagagaagaagcagacagggcaaccccgtggcccccatcaagacccccatgatcgccggcggcctgttcgtgatggacaagttctacttcgaggagctgggcaagtacgacatgatgatggacgtgtggggcggcgagaacctggagatcagcttcagagtgtggcagtgcggcggcagcctggagatcatcccctgcagcagagtgggccacgtgttcagaaagcagcacccctacaccttccccggcggcagcggcaccgtgttcgccagaaacaccagaagagccgccgaggtgtggatggacgagtacaagaacttctactacgccgccgtgcccagcgccagaaacgtgccctacggcaacatccagagcagactggagctgagaaagaagctgagctgcaagcccttcaagtggtacctggagaacgtgtaccccgagctgagagtgcccgaccaccaggacatcgccttcggcgccctgcagcagggcaccaactgcctggacaccctgggccacttcgccgacggcgtggtgggcgtgtacgagtgccacaacgccggcggcaaccaggagtgggccctgaccaaggagaagagcgtgaagcacatggacctgtgcctgaccgtggtggacagagcccccggcagcctgatcaagctgcagggctgcagagagaacgacagcagacagaagtgggagcagatcgagggcaacagcaagctgagacacgtgggcagcaacctgtgcctggacagcagaaccgccaagagcggcggcctgagcgtggaggtgtgcggccccgccctgagccagcagtggaagttcaccctgaacctgcagcagtag

SEQ ID NO: 104643 - DNA, 798 bp, synthetic construct
  misc_feature 1..798: note = Description of Artificial Sequence: Synthetic coding sequence
  source 1..798: mol_type = other DNA
atggtgagaagcggccaggacccctacgccagaaacaagttcaaccaggtggagagcgacaagctgagaatggacagagccatccccgacaccagacacgaccagtgccagagaaagcagtggagagtggacctgcccgccaccagcgtggtgatcaccttccacaacgaggccagaagcgccctgctgagaaccgtggtgagcgtgctgaagaagagccccccccacctgatcaaggagatcatcctggtggacgactacagcaacgaccccgaggacggcgccctgctgggcaagatcgagaaggtgagagtgctgagaaacgacagaagagagggcctgatgagaagcagagtgagaggcgccgacgccgcccaggccaaggtgctgaccttcctggacagccactgcgagtgcaacgagcactggctggagcccctgctggagagagtggccgaggacagaaccagagtggtgagccccatcatcgacgtgatcaacatggacaacttccagtacgtgggcgccagcgccgacctgaagggcggcttcgactggaacctggtgttcaagtgggactacatgacccccgagcagagaagaagcagacagggcaaccccgtggcccccatcaaggacctggtgcccagagtggccgtgtggtggcagcccggcgaccaccccgtgcagccctgcggcaccagagtgcccgaggccgcccccctgcacgtgcccggctggcagtggcactgcctgtgccccaagcacccccccggcagcagaggcctggacggctag

SEQ ID NO: 104644 - DNA, 1086 bp, synthetic construct
  misc_feature 1..1086: note = Description of Artificial Sequence: Synthetic coding sequence
  source 1..1086: mol_type = other DNA
atgagaagaagaagcagaatgctgctgtgcttcgccttcctgtgggtgctgggcatcgcctactacatgtacagcggcggcggcagcgccctggccggcggcgccggcggcggcgccggcagaaaggaggactggaacgagatcgaccccatcaagaagaaggacctgcaccacagcaacggcgccgaggacggcgccctgctgggcaagatcgagaaggtgagagtgctgagaaacgacagaagagagggcctgatgagaagcagagtgagaggcgccgacgccgcccaggccaaggtgctgaccttcctggacagccactgcgagtgcaacgagcactggctggagcccctgctggagagagtggccgaggacagaaccagagtggtgagccccatcatcgacgtgatcaacatggacaacttccagtacgtgggcgccagcgccgacctgaagggcggcttcgactggaacctggtgttcaagtgggactacatgacccccgagcagagaagaagcagacagggcaaccccgtggcccccatcaagacccccatgatcgccggcggcctgttcgtgatggacaagttctacttcgaggagctgggcaagtacgacatgatgatggacgtgtggggcggcgagaacctggagatcagcttcagagtgtggcagtgcggcggcagcctggagatcatcccctgcagcagagtgggccacgtgttcagaaagcagcacccctacaccttccccggcggcagcggcaccgtgttcgccagaaacaccagaagagccgccgaggtgtggatggacgagtacaagaacttctactacgccgccgtgcccagcgccagaaacgtgccctacggcaacatccagagcagactggagctgagaaagaagctgagctgcaagcccttcaagtggtacctggagaacgtgtaccccgagctgagagtgcccgaccaccaggacatcgccttcggcgccctgcagcagggcaccaactgcctggacaccctgggccacttcgccgacggcgtggtgggcgtgtacgagtgccacgtggccggcctgagacagtag

SEQ ID NO: 104645 - DNA, 1602 bp, synthetic construct
  misc_feature 1..1602: note = Description of Artificial Sequence: Synthetic coding sequence
  source 1..1602: mol_type = other DNA
atggccgacagagaggactggaacgagatcgaccccatcaagaagaaggacctgcaccacagcaacggcgaggagaaggcccagagcatggagaccctgccccccggcaaggtgagatggcccgacttcaaccaggaggcctacgtgggcggcaccatggtgagaagcggccaggacccctacgccagaaacaagttcaaccaggtggagagcgacaagctgagaatggacagagccatccccgacaccagacacgaccagtgccagagaaagcagtggagagtggacctgcccgccaccagcgtggtgatcaccttccacaacgaggccagaagcgccctgctgagaaccgtggtgagcgtgctgaagaagagccccccccacctgatcaaggagatcatcctggtggacgactacagcaacgaccccgaggacggcgccctgctgggcaagatcgagaaggtgagagtgctgagaaacgacagaagagagggcctgatgagaagcagagtgagaggcgccgacgccgcccaggccaaggtgctgaccttcctggacagccactgcgagtgcaacgagcactggctggagcccctgctggagagagtggccgaggacagaaccagagtggtgagccccatcatcgacgtgatcaacatggacaacttccagtacgtgggcgccagcgccgacctgaagggcggcttcgactggaacctggtgttcaagtgggactacatgacccccgagcagagaagaagcagacagggcaaccccgtggcccccatcaagacccccatgatcgccggcggcctgttcgtgatggacaagttctacttcgaggagctgggcaagtacgacatgatgatggacgtgtggggcggcgagaacctggagatcagcttcagagtgtggcagtgcggcggcagcctggagatcatcccctgcagcagagtgggccacgtgttcagaaagcagcacccctacaccttccccggcggcagcggcaccgtgttcgccagaaacaccagaagagccgccgaggtgtggatggacgagtacaagaacttctactacgccgccgtgcccagcgccagaaacgtgccctacggcaacatccagagcagactggagctgagaaagaagctgagctgcaagcccttcaagtggtacctggagaacgtgtaccccgagctgagagtgcccgaccaccaggacatcgccttcggcgccctgcagcagggcaccaactgcctggacaccctgggccacttcgccgacggcgtggtgggcgtgtacgagtgccacaacgccggcggcaaccaggagtgggccctgaccaaggagaagagcgtgaagcacatggacctgtgcctgaccgtggtggacagagcccccggcagcctgatcaagctgcagggctgcagagagaacgacagcagacagaagtgggagcagatcgagggcaacagcaagctgagacacgtgggcagcaacctgtgcctggacagcagaaccgccaagagcggcggcctgagcgtggaggtgtgcggccccgccctgagccagcagtggaagttcaccctgaacctgcagcagtag

SEQ ID NO: 104646 - DNA, 1902 bp, synthetic construct
  misc_feature 1..1902: note = Description of Artificial Sequence: Synthetic coding sequence
  source 1..1902: mol_type = other DNA
atggcccacctgaagagactggtgaagctgcacatcaagagacactaccacaagaagttctggaagctgggcgccgtgatcttcttcttcatcatcgtgctggtgctgatgcagagagaggtgagcgtgcagtacagcaaggaggagagcagaatggagagaaacatgaagaacaagaacaagatgctggacctgatgctggaggccgtgaacaacatcaaggacgccatgcccaagatgcagatcggcgcccccgtgagacagaacatcgacgccggcgagagaccctgcctgcagggctactacaccgccgccgagctgaagcccgtgctggacagacccccccaggacagcaacgcccccggcgccagcggcaaggccttcaagaccaccaacctgagcgtggaggagcagaaggagaaggagagaggcgaggccaagcactgcttcaacgccttcgccagcgacagaatcagcctgcacagagacctgggccccgacaccagaccccccgagtgcatcgagcagaagttcaagagatgcccccccctgcccaccaccagcgtgatcatcgtgttccacaacgaggcctggagcaccctgctgagaaccgtgcacagcgtgctgtacagcagccccgccatcctgctgaaggagatcatcctggtggacgacgccagcgtggacgagtacctgcacgacaagctggacgagtacgtgaagcagttcagcatcgtgaagatcgtgagacagagagagagaaagggcctgatcaccgccagactgctgggcgccaccgtggccaccgccgagaccctgaccttcctggacgcccactgcgagtgcttctacggctggctggagcccctgctggccagaatcgccgagaactacaccgccgtggtgagccccgacatcgccagcatcgacctgaacaccttcgagttcaacaagcccagcccctacggcagcaaccacaacagaggcaacttcgactggagcctgagcttcggctgggagagcctgcccgaccacgagaagcagagaagaaaggacgagacctaccccatcaagacccccaccttcgccggcggcctgttcagcatcagcaaggagtacttcgagtacatcggcagctacgacgaggagatggagatctggggcggcgagaacatcgagatgagcttcagagtgtggcagtgcggcggccagctggagatcatgccctgcagcgtggtgggccacgtgttcagaagcaagagcccccacagcttccccaagggcacccaggtgatcgccagaaaccaggtgagactggccgaggtgtggatggacgagtacaaggagatcttctacagaagaaacaccgacgccgccaagatcgtgaagcagaaggccttcggcgacctgagcaagagattcgagatcaagcacagactgcagtgcaagaacttcacctggtacctgaacaacatctaccccgaggtgtacgtgcccgacctgaaccccgtgatcagcggctacatcaagagcgtgggccagcccctgtgcctggacgtgggcgagaacaaccagggcggcaagcccctgatcatgtacacctgccacggcctgggcggcaaccagtacttcgagtacagcgcccagcacgagatcagacacaacatccagaaggagctgtgcctgcacgccgcccagggcctggtgcagctgaaggcctgcacctacaagggccacaagaccgtggtgaccggcgagcagatctgggagatccagaaggaccagctgctgtacaaccccttcctgaagatgtgcctgagcgccaacggcgagcaccccagcctggtgagctgcaaccccagcgaccccctgcagaagtggatcctgagccagaacgactag

SEQ ID NO: 104647 - DNA, 1395 bp, synthetic construct
  misc_feature 1..1395: note = Description of Artificial Sequence: Synthetic coding sequence
  source 1..1395: mol_type = other DNA
atggcccacctgaagagactggtgaagctgcacatcaagagacactaccacaagaagttctggaagctgggcgccgtgatcttcttcttcatcatcgtgctggtgctgatgcagagagaggtgagcgtgcagtacagcaaggaggagagcagaatggagagaaacatgaagaacaagaacaagatgctggacctgatgctggaggccgtgaacaacatcaaggacgccatgcccaagatgcagatcggcgcccccgtgagacagaacatcgacgccggcgagagaccctgcctgcagggctactacaccgccgccgagctgaagcccgtgctggacagacccccccaggacagcaacgcccccggcgccagcggcaaggccttcaagaccaccaacctgagcgtggaggagcagaaggagaaggagagaggcgaggccaagcactgcttcaacgccttcgccagcgacagaatcagcctgcacagagacctgggccccgacaccagaccccccgagtgcatcgagcagaagttcaagagatgcccccccctgcccaccaccagcgtgatcatcgtgttccacaacgaggcctggagcaccctgctgagaaccgtgcacagcgtgctgtacagcagccccgccatcctgctgaaggagatcatcctggtggacgacgccagcgtggacgagtacctgcacgacaagctggacgagtacgtgaagcagttcagcatcgtgaagatcgtgagacagagagagagaaagggcctgatcaccgccagactgctgggcgccaccgtggccaccgccgagaccctgaccttcctggacgcccactgcgagtgcttctacggctggctggagcccctgctggccagaatcgccgagaactacaccgccgtggtgagccccgacatcgccagcatcgacctgaacaccttcgagttcaacaagcccagcccctacggcagcaaccacaacagaggcaacttcgactggagcctgagcttcggctgggagagcctgcccgaccacgagaagcagagaagaaaggacgagacctaccccatcaagacccccaccttcgccggcggcctgttcagcatcagcaaggagtacttcgagtacatcggcagctacgacgaggagatggagatctggggcggcgagaacatcgagatgagcttcagagtgtggcagtgcggcggccagctggagatcatgccctgcagcgtggtgggccacgtgttcagaagcaagagcccccacagcttccccaagggcacccaggtgatcgccagaaaccaggtgagactggccgaggtgtggatggacgagtacaaggagatcttctacagaagaaacaccgacgccgccaagatcgtgaagcagtag

SEQ ID NO: 104648 - DNA, 174 bp, synthetic construct
  misc_feature 1..174: note = Description of Artificial Sequence: Synthetic coding sequence
  source 1..174: mol_type = other DNA
atggcccacctgaagagactggtgaagctgcacatcaagagacactaccacaagaagttctggaagctgggcgccgtgatcttcttcttcatcatcgtgctggtgctgatgcagagagaggtgagcgtgcagtacagcaaggaggagagcagaatggagagaaacatgaagtag

SEQ ID NO: 104649 - DNA, 78 bp, synthetic construct
  misc_feature 1..78: note = Description of Artificial Sequence: Synthetic coding sequence
  source 1..78: mol_type = other DNA
atggcccacctgaagagactggtgaagctgcacatcaagagacactaccacaagaagttctggaagctgggcgcctag

SEQ ID NO: 104650 - DNA, 273 bp, synthetic construct
  misc_feature 1..273: note = Description of Artificial Sequence: Synthetic coding sequence
  source 1..273: mol_type = other DNA
atggcccacctgaagagactggtgaagctgcacatcaagagacactaccacaagaagttctggaagctgggcgccgtgatcttcttcttcatcatcgtgctggtgctgatgcagagagaggtgagcgtgcagtacagcaaggaggagagcagaatggagagaaacatgaagaacaagaacaagatgctggacctgatgctggaggccgtgaacaacatcaaggacgccatgcccaagatgcagatcggcgcccccgtgagacagaacatctag

SEQ ID NO: 104651 - DNA, 36 bp, synthetic construct
  misc_feature 1..36: note = Description of Artificial Sequence: Synthetic coding sequence
  source 1..36: mol_type = other DNA
atggcccacctgaagagactggtgaagctgcactag

SEQ ID NO: 104652 - DNA, 1737 bp, synthetic construct
  misc_feature 1..1737: note = Description of Artificial Sequence: Synthetic coding sequence
  source 1..1737: mol_type = other DNA
atggccgtgagatggacctgggccggcaagagctgcctgctgctggccttcctgaccgtggcctacatcttcgtggagctgctggtgagcaccttccacgccagcgccggcgccggcagagccagagagctgggcagcagaagactgagcgacctgcagaagaacaccgaggacctgagcagacccctgtacaagaagccccccgccgacagcagagccctgggcgagtggggcaaggccagcaagctgcagctgaacgaggacgagctgaagcagcaggaggagctgatcgagagatacgccatcaacatctacctgagcgacagaatcagcctgcacagacacatcgaggacaagagaatgtacgagtgcaagagccagaagttcaactacagaaccctgcccaccaccagcgtgatcatcgccttctacaacgaggcctggagcaccctgctgagaaccatccacagcgtgctggagaccagccccgccgtgctgctgaaggagatcatcctggtggacgacctgagcgacagagtgtacctgaagacccagctggagacctacatcagcaacctggacagagtgagactgatcagaaccaacaagagagagggcctggtgagagccagactgatcggcgccaccttcgccaccggcgacgtgctgaccttcctggactgccactgcgagtgcaacagcggctggctggagcccctgctggagagaatcggcagagacgagaccgccgtggtgtgccccgtgatcgacaccatcgactggaacaccttcgagttctacatgcagatcggcgagcccatgatcggcggcttcgactggagactgaccttccagtggcacagcgtgcccaagcaggagagagacagaagaatcagcagaatcgaccccatcagaagccccaccatggccggcggcctgttcgccgtgagcaagaagtacttccagtacctgggcacctacgacaccggcatggaggtgtggggcggcgagaacctggagctgagcttcagagtgtggcagtgcggcggcaagctggagatccacccctgcagccacgtgggccacgtgttccccaagagagccccctacgccagacccaacttcctgcagaacaccgccagagccgccgaggtgtggatggacgagtacaaggagcacttctacaacagaaacccccccgccagaaaggaggcctacggcgacatcagcgagagaaagctgctgagagagagactgagatgcaagagcttcgactggtacctgaagaacgtgttccccaacctgcacgtgcccgaggacagacccggctggcacggcgccatcagaagcagaggcatcagcagcgagtgcctggactacaacagccccgacaacaaccccaccggcgccaacctgagcctgttcggctgccacggccagggcggcaaccagttcttcgagtacaccagcaacaaggagatcagattcaacagcgtgaccgagctgtgcgccgaggtgcccgagcagaagaactacgtgggcatgcagaactgccccaaggacggcttccccgtgcccgccaacatcatctggcacttcaaggaggacggcaccatcttccacccccacagcggcctgtgcctgagcgcctacagaacccccgagggcagacccgacgtgcagatgagaacctgcgacgccctggacaagaaccagatctggagcttcgagaagtag

SEQ ID NO: 104653 - DNA, 1869 bp, synthetic construct
  misc_feature 1..1869: note = Description of Artificial Sequence: Synthetic coding sequence
  source 1..1869: mol_type = other DNA
atgagactgctgagaagaagacacatgcccctgagactggccatggtgggctgcgccttcgtgctgttcctgttcctgctgcacagagacgtgagcagcagagaggaggccaccgagaagccctggctgaagagcctggtgagcagaaaggaccacgtgctggacctgatgctggaggccatgaacaacctgagagacagcatgcccaagctgcagatcagagcccccgaggcccagcagaccctgttcagcatcaaccagagctgcctgcccggcttctacacccccgccgagctgaagcccttctgggagagacccccccaggaccccaacgcccccggcgccgacggcaaggccttccagaagagcaagtggacccccctggagacccaggagaaggaggagggctacaagaagcactgcttcaacgccttcgccagcgacagaatcagcctgcagagaagcctgggccccgacaccagaccccccgagtgcgtggaccagaagttcagaagatgcccccccctggccaccaccagcgtgatcatcgtgttccacaacgaggcctggagcaccctgctgagaaccgtgtacagcgtgctgcacaccacccccgccatcctgctgaaggagatcatcctggtggacgacgccagcaccgaggagcacctgaaggagaagctggagcagtacgtgaagcagctgcaggtggtgagagtggtgagacaggaggagagaaagggcctgatcaccgccagactgctgggcgccagcgtggcccaggccgaggtgctgaccttcctggacgcccactgcgagtgcttccacggctggctggagcccctgctggccagaatcgccgaggacaagaccgtggtggtgagccccgacatcgtgaccatcgacctgaacaccttcgagttcgccaagcccgtgcagagaggcagagtgcacagcagaggcaacttcgactggagcctgaccttcggctgggagaccctgcccccccacgagaagcagagaagaaaggacgagacctaccccatcaagagccccaccttcgccggcggcctgttcagcatcagcaagagctacttcgagcacatcggcacctacgacaaccagatggagatctggggcggcgagaacgtggagatgagcttcagagtgtggcagtgcggcggccagctggagatcatcccctgcagcgtggtgggccacgtgttcagaaccaagagcccccacaccttccccaagggcaccagcgtgatcgccagaaaccaggtgagactggccgaggtgtggatggacagctacaagaagatcttctacagaagaaacctgcaggccgccaagatggcccaggagaagagcttcggcgacatcagcgagagactgcagctgagagagcagctgcactgccacaacttcagctggtacctgcacaacgtgtaccccgagatgttcgtgcccgacctgacccccaccttctacggcgccatcaagaacctgggcaccaaccagtgcctggacgtgggcgagaacaacagaggcggcaagcccctgatcatgtacagctgccacggcctgggcggcaaccagtacttcgagtacaccacccagagagacctgagacacaacatcgccaagcagctgtgcctgcacgtgagcaagggcgccctgggcctgggcagctgccacttcaccggcaagaacagccaggtgcccaaggacgaggagtgggagctggcccaggaccagctgatcagaaacagcggcagcggcacctgcctgaccagccaggacaagaagcccgccatggccccctgcaaccccagcgacccccaccagctgtggctgttcgtgtag

SEQ ID NO: 104654 - DNA, 1869 bp, synthetic construct; identical to SEQ ID NO: 104653
  misc_feature 1..1869: note = Description of Artificial Sequence: Synthetic coding sequence
  source 1..1869: mol_type = other DNA

SEQ ID NO: 104655 - DNA, 1812 bp, synthetic construct
  misc_feature 1..1812: note = Description of Artificial Sequence: Synthetic coding sequence
  source 1..1812: mol_type = other DNA
atgagactgctgagaagaagacacatgcccctgagactggccatggtgggctgcgccttcgtgctgttcctgttcctgctggtgagcagaaaggaccacgtgctggacctgatgctggaggccatgaacaacctgagagacagcatgcccaagctgcagatcagagcccccgaggcccagcagaccctgttcagcatcaaccagagctgcctgcccggcttctacacccccgccgagctgaagcccttctgggagagacccccccaggaccccaacgcccccggcgccgacggcaaggccttccagaagagcaagtggacccccctggagacccaggagaaggaggagggctacaagaagcactgcttcaacgccttcgccagcgacagaatcagcctgcagagaagcctgggccccgacaccagaccccccgagtgcgtggaccagaagttcagaagatgcccccccctggccaccaccagcgtgatcatcgtgttccacaacgaggcctggagcaccctgctgagaaccgtgtacagcgtgctgcacaccacccccgccatcctgctgaaggagatcatcctggtggacgacgccagcaccgaggagcacctgaaggagaagctggagcagtacgtgaagcagctgcaggtggtgagagtggtgagacaggaggagagaaagggcctgatcaccgccagactgctgggcgccagcgtggcccaggccgaggtgctgaccttcctggacgcccactgcgagtgcttccacggctggctggagcccctgctggccagaatcgccgaggacaagaccgtggtggtgagccccgacatcgtgaccatcgacctgaacaccttcgagttcgccaagcccgtgcagagaggcagagtgcacagcagaggcaacttcgactggagcctgaccttcggctgggagaccctgcccccccacgagaagcagagaagaaaggacgagacctaccccatcaagagccccaccttcgccggcggcctgttcagcatcagcaagagctacttcgagcacatcggcacctacgacaaccagatggagatctggggcggcgagaacgtggagatgagcttcagagtgtggcagtgcggcggccagctggagatcatcccctgcagcgtggtgggccacgtgttcagaaccaagagcccccacaccttccccaagggcaccagcgtgatcgccagaaaccaggtgagactggccgaggtgtggatggacagctacaagaagatcttctacagaagaaacctgcaggccgccaagatggcccaggagaagagcttcggcgacatcagcgagagactgcagctgagagagcagctgcactgccacaacttcagctggtacctgcacaacgtgtaccccgagatgttcgtgcccgacctgacccccaccttctacggcgccatcaagaacctgggcaccaaccagtgcctggacgtgggcgagaacaacagaggcggcaagcccctgatcatgtacagctgccacggcctgggcggcaaccagtacttcgagtacaccacccagagagacctgagacacaacatcgccaagcagctgtgcctgcacgtgagcaagggcgccctgggcctgggcagctgccacttcaccggcaagaacagccaggtgcccaaggacgaggagtgggagctggcccaggaccagctgatcagaaacagcggcagcggcacctgcctgaccagccaggacaagaagcccgccatggccccctgcaaccccagcgacccccaccagctgtggctgttcgtgtag

SEQ ID NO: 104656 - DNA, 1974 bp, synthetic construct
  misc_feature 1..1974: note = Description of Artificial Sequence: Synthetic coding sequence
  source 1..1974: mol_type = other DNA
atgagactgaagatcggcttcatcctgagaagcctgctggtggtgggcagcttcctgggcctggtggtgctgtggagcagcctgacccccagacccgacgaccccagccccctgagcagaatgagagaggacagagacgtgaacgaccccatgcccaacagaggcggcaacggcctggcccccggcgaggacagattcaagcccgtggtgccctggccccacgtggagggcgtggaggtggacctggagagcatcagaagaatcaacaaggccaagaacgagcaggagcaccacgccggcggcgacagccagaaggacatcatgcagagacagtacctgaccttcaagccccagaccttcacctaccacgaccccgtgctgagacccggcatcctgggcaacttcgagcccaaggagcccgagccccccggcgtggtgggcggccccggcgagaaggccaagcccctggtgctgggccccgagttcaagcaggccatccaggccagcatcaaggagttcggcttcaacatggtggccagcgacatgatcagcctggacagaagcgtgaacgacctgagacaggaggagtgcaagtactggcactacgacgagaacctgctgaccagcagcgtggtgatcgtgttccacaacgagggctggagcaccctgatgagaaccgtgcacagcgtgatcaagagaacccccagaaagtacctggccgagatcgtgctgatcgacgacttcagcaacaaggagcacctgaaggagaagctggacgagtacatcaagctgtggaacggcctggtgaaggtgttcagaaacgagagaagagagggcctgatccaggccagaagcatcggcgcccagaaggccaagctgggccaggtgctgatctacctggacgcccactgcgaggtggccgtgaactggtacgcccccctggtggcccccatcagcaaggacagaaccatctgcaccgtgcccctgatcgacgtgatcaacggcaacacctacgagatcatcccccagggcggcggcgacgaggacggctacgccagaggcgcctgggactggagcatgctgtggaagagagtgcccctgaccccccaggagaagagactgagaaagaccaagaccgagccctacagaagccccgccatggccggcggcctgttcgccatcgagagagagttcttcttcgagctgggcctgtacgaccccggcctgcagatctggggcggcgagaacttcgagatcagctacaagatctggcagtgcggcggcaagctgctgttcgtgccctgcagcagagtgggccacatctacagactggagggctggcagggcaaccccccccccatctacgtgggcagcagccccaccctgaagaactacgtgagagtggtggaggtgtggtgggacgagtacaaggactacttctacgccagcagacccgagagccaggccctgccctacggcgacatcagcgagctgaagaagttcagagaggaccacaactgcaagagcttcaagtggttcatggaggagatcgcctacgacatcaccagccactaccccctgccccccaagaacgtggactggggcgagatcagaggcttcgagaccgcctactgcatcgacagcatgggcaagaccaacggcggcttcgtggagctgggcccctgccacagaatgggcggcaaccagctgttcagaatcaacgaggccaaccagctgatgcagtacgaccagtgcctgaccaagggcgccgacggcagcaaggtgatgatcacccactgcaacctgaacgagttcaaggagtggcagtacttcaagaacctgcacagattcacccacatccccagcggcaagtgcctggacagaagcgaggtgctgcaccaggtgttcatcagcaactgcgacagcagcaagaccacccagaagtgggagatgaacaacatccacagcgtgtag

SEQ ID NO: 104657 - DNA, 717 bp, synthetic construct
  misc_feature 1..717: note = Description of Artificial Sequence: Synthetic coding sequence
  source 1..717: mol_type = other DNA
atgagaaccgtgcacagcgtgatcaagagaacccccagaaagtacctggccgagatcgtgctgatcgacgacttcagcaacaaggagcacctgaaggagaagctggacgagtacatcaagctgtggaacggcctggtgaaggtgttcagaaacgagagaagagagggcctgatccaggccagaagcatcggcgcccagaaggccaagctgggccaggtgctgatctacctggacgcccactgcgaggtggccgtgaactggtacgcccccctggtggcccccatcagcaaggacagaaccacctgcaccgtgcccctgatcgactacatcgacggcaacgactacagcatcgagccccagcagggcggcgacgaggacggcttcgccagaggcgcctgggactggagcctgctgtggaagagaatccccctgagccacaaggagaaggccaagagaaagcacaagaccgagccctacagaagccccgccatggccggcggcctgttcgccatcgagagagagttcttcttcgagctgggcctgtacgaccccggcctgcagatctggggcggcaagaccctgagaagccacaccagatacggcagcgtggtggccaactactacctgttcctggtgctggtgctggacatcagcaccgtgctgagagccggcaaggagatcctgagacccttcatgctgggcctgctgcagctgtag

SEQ ID NO: 104658 - DNA, 1914 bp, synthetic construct
  misc_feature 1..1914: note = Description of Artificial Sequence: Synthetic coding sequence
  source 1..1914: mol_type = other DNA
atgatgttctggagaaagctgcccaaggccctgttcatcggcctgaccctggccatcgccgtgaacctgctgctggtgttcagcagcaagggcaccctgcagaacctgttcaccggcggcctgcacagagagctgcccctgcacctgaacaagagatacggcgccgtgatcaagagactgagccacctggaggtggagctgcaggacctgaaggagagcatgaagctggccctgagacagcaggagaacgtgaacagcaccctgaagagagccaaggacgaggtgagacccctgctgaaggccatggagaccaaggtgaacgagaccaagaagcacaagacccagatgaagctgttcccccacagccagctgttcagacagtggggcgaggacctgagcgaggcccagcagaaggccgcccaggacctgttcagaaagttcggctacaacgcctacctgagcaaccagctgcccctgaacagaaccatccccgacaccagagactacagatgcctgagaaagacctaccccagccagctgcccagcctgagcgtgatcctgatcttcgtgaacgaggccctgagcatcatccagagagccatcaccagcatcatcaacagaacccccagcagactgctgaaggagatcatcctggtggacgacttcagcagcaacggcgagctgaaggtgcacctggacgagaagatcaagctgtacaaccagaagtaccccggcctgctgaagatcatcagacaccccgagagaaagggcctggcccaggccagaaacaccggctgggaggccgccaccgccgacgtggtggccatcctggacgcccacatcgaggtgaacgtgggctgggccgagcccatcctggccagaatccaggaggacagaaccgtgatcgtgagccccgtgttcgacaacatcagattcgacaccttcaagctggacaagtacgagctggccgtggacggcttcaactgggagctgtggtgcagatacgacgccctgccccaggcctggatcgacctgcacgacgtgaccgcccccgtgaagagccccagcatcatgggcatcctggccgccaacagacacttcctgggcgagatcggcagcctggacggcggcatgctgatctacggcggcgagaacgtggagctgagcctgagagtgtggcagtgcggcggcaaggtggagatcctgccctgcagcagaatcgcccacctggagagacaccacaagccctacgccctggacctgaccgccgccctgaagagaaacgccctgagagtggccgagatctggatggacgagcacaagcacatggtgtacctggcctggaacatccccctgcagaacagcggcatcgacttcggcgacgtgagcagcagaatggccctgagagagaagctgaagtgcaagaccttcgactggtacctgaagaacgtgtaccccctgctgaagcccctgcacaccatcgtgggctacggcagaatgaagaacctgctggacgagaacgtgtgcctggaccagggccccgtgcccggcaacacccccatcatgtactactgccacgagttcagcagccagaacgtgtactaccacctgaccggcgagctgtacgtgggccagctgatcgccgaggccagcgccagcgacagatgcctgaccgaccccggcaaggccgagaagcccaccctggagccctgcagcaaggccgccaagaacagactgcacatctactgggacttcaagcccggcggcgccgtgatcaacagagacaccaagagatgcctggagatgaagaaggacctgctgggcagccacgtgctggtgctgcagacctgcagcacccaggtgtgggagatccagcacaccgtgagagactggggccagaccaacagccagtag

SEQ ID NO: 104659 - DNA, 648 bp, synthetic construct
  misc_feature 1..648: note = Description of Artificial Sequence: Synthetic coding sequence
  source 1..648: mol_type = other DNA
atggagttcgactgcgagggcctgagaagactgctgggcaagtacaagttcagagacctgaccgtggaggagctgagaaacgtgaacgtgttcttcccccacttcaagtacagcatggacacctacgtgttcaaggacagcagccagaaggacctgctgaacttcaccggcaccatccccgtgatgtaccagggcaacacctacaacatccccatcagattctggatcctggacagccaccccttcgccccccccatctgcttcctgaagcccaccgccaacatgggcatcctggtgggcaagcacgtggacgcccagggcagaatctacctgccctacctgcagaactggagccaccccaagagcgtgatcgtgggcctgatcaaggagatgatcgccaagttccaggaggagctgcccatgtacagcctgagcagcagcgacgaggccagacaggtggacctgctggcctacatcgccaagatcaccgagggcgtgagcgacaccaacagcaagagctgggccaaccacgagaacaagaccgtgaacaagatcaccgtggtgggcggcggcgagctgggcatcgcctgcaccctggccatcagcgccaaggtggagagcagaagcgtgacccaggccggcgtgtag

SEQ ID NO: 104660 - DNA, 1416 bp, synthetic construct
  misc_feature 1..1416: note = Description of Artificial Sequence: Synthetic coding sequence
  source 1..1416: mol_type = other DNA
atggagttcgactgcgagggcctgagaagactgctgggcaagtacaagttcagagacctgaccgtggaggagctgagaaacgtgaacgtgttcttcccccacttcaagtacagcatggacacctacgtgttcaaggacagcagccagaaggacctgctgaacttcaccggcaccatccccgtgatgtaccagggcaacacctacaacatccccatcagattctggatcctggacagccaccccttcgccccccccatctgcttcctgaagcccaccgccaacatgggcatcctggtgggcaagcacgtggacgcccagggcagaatctacctgccctacctgcagaactggagccaccccaagagcgtgatcgtgggcctgatcaaggagatgatcgccaagttccaggaggagctgcccatgtacagcctgagcagcagcgacgaggccagacaggtggacctgctggcctacatcgccaagatcaccgagggcgtgagcgacaccaacagcaagagctgggccaaccacgagaacaagaccgtgaacaagatcaccgtggtgggcggcggcgagctgggcatcgcctgcaccctggccatcagcgccaagggcatcgccgacagactggtgctgctggacctgagcgagggcaccaagggcgccaccatggacctggagatcttcaacctgcccaacgtggagatcagcaaggacctgagcgccagcgcccacagcaaggtggtgatcttcaccgtgaacagcctgggcagcagccagagctacctggacgtggtgcagagcaacgtggacatgttcagagccctggtgcccgccctgggccactacagccagcacagcgtgctgctggtggccagccagcccgtggagatcatgacctacgtgacctggaagctgagcaccttccccgccaacagagtgatcggcatcggctgcaacctggacagccagagactgcagtacatcatcaccaacgtgctgaaggcccagaccagcggcaaggaggtgtgggtgatcggcgagcagggcgaggacaaggtgctgacctggagcggccaggaggaggtggtgagccacaccagccaggtgcagctgagcaacagagccatggagctgctgagagtgaagggccagagaagctggagcgtgggcctgagcgtggccgacatggtggacagcatcgtgaacaacaagaagaaggtgcacagcgtgagcgccctggccaagggctactacgacatcaacagcgaggtgttcctgagcctgccctgcatcctgggcaccaacggcgtgagcgaggtgatcaagaccaccctgaaggaggacaccgtgaccgagaagctgcagagcagcgccagcagcatccacagcctgcagcagcagctgaagctgtag

SEQ ID NO: 104661 - DNA, 747 bp, synthetic construct
  misc_feature 1..747: note = Description of Artificial Sequence: Synthetic coding sequence
  source 1..747: mol_type = other DNA
atggacctggagatcttcaacctgcccaacgtggagatcagcaaggacctgagcgccagcgcccacagcaaggtggtgatcttcaccgtgaacagcctgggcagcagccagagctacctggacgtggtgcagagcaacgtggacatgttcagagccctggtgcccgccctgggccactacagccagcacagcgtgctgctggtggccagccagcccgtggagatcatgacctacgtgacctggaagctgagcaccttccccgccaacagagtgatcggcatcggctgcaacctggacagccagagactgcagtacatcatcaccaacgtgctgaaggcccagaccagcggcaaggaggtgtgggtgatcggcgagcagggcgaggacaaggtgctgacctggagcggccaggaggaggtggtgagccacaccagccaggtgcagctgagcaacagagccatggagctgctgagagtgaagggccagagaagctggagcgtgggcctgagcgtggccgacatggtggacagcatcgtgaacaacaagaagaaggtgcacagcgtgagcgccctggccaagggctactacgacatcaacagcgaggtgttcctgagcctgccctgcatcctgggcaccaacggcgtgagcgaggtgatcaagaccaccctgaaggaggacaccgtgaccgagaagctgcagagcagcgccagcagcatccacagcctgcagcagcagctgaagctgtag

SEQ ID NO: 104662 - DNA, 1140 bp, synthetic construct
  misc_feature 1..1140: note = Description of Artificial Sequence: Synthetic coding sequence
  source 1..1140: mol_type = other DNA
atggagttcgactgcgagggcctgagaagactgctgggcaagtacaagttcagagacctgaccgtggaggagctgagaaacgtgaacgtgttcttcccccacttcaagtacagcatggacacctacgtgttcaaggacagcagccagaaggacctgctgaacttcaccggcaccatccccgtgatgtaccagggcaacacctacaacatccccatcagattctggatcctggacagccaccccttcgccccccccatctgcttcctgaagcccaccgccaacatgggcatcctggtgggcaagcacgtggacgcccagggcagaatctacctgccctacctgcagaactggagccaccccaagagcgtgatcgtgggcctgatcaaggagatgatcgccaagttccaggaggagctgcccatgtacagcctgagcagcagcgacgaggccagacaggtggacctgctggcctacatcgccaagatcaccgagggcgtgagcgacaccaacagcaagagctgggccaaccacgagaacaagaccgtgaacaagatcaccgtggtgggcggcggcgagctgggcatcgcctgcaccctggccatcagcgccaagggcatcgccgacagactggtgctgctggacctgagcgagggcaccaagggcgccaccatggacctggagatcttcaacctgcccaacgtggagatcagcaaggacctgagcgccagcgcccacagcaaggtggtgatcttcaccgtgaacagcctgggcagcagccagagctacctggacgtggtgcagagcaacgtggacatgttcagagccctggtgcccgccctgggccactacagccagcacagcgtgctgctggtggccagccagcccgtggagatcatgacctacgtgacctggaagctgagcaccttccccgccaacagagtgatcggcatcggctgcaacctggacagccagagactgcagtacatcatcaccaacgtgctgaaggcccagaccagcggcaaggaggtgtgggtgatcggcgagcagggcgaggacaaggtgctgacctggagcggccaggaggaggtggtgagccacaccagccaggtgcagctgagcaacagagacatcatgatctag

SEQ ID NO: 104663 - DNA, 1350 bp, synthetic construct
  misc_feature 1..1350: note = Description of Artificial Sequence: Synthetic coding sequence
  source 1..1350: mol_type = other DNA
atggagttcgactgcgagggcctgagaagactgctgggcaagtacaagttcagagacctgaccgtggaggagctgagaaacgtgaacgtgttcttcccccacttcaagtacagcatggacacctacggcaacacctacaacatccccatcagattctggatcctggacagccaccccttcgccccccccatctgcttcctgaagcccaccgccaacatgggcatcctggtgggcaagcacgtggacgcccagggcagaatctacctgccctacctgcagaactggagccaccccaagagcgtgatcgtgggcctgatcaaggagatgatcgccaagttccaggaggagctgcccatgtacagcctgagcagcagcgacgaggccagacaggtggacctgctggcctacatcgccaagatcaccgagggcgtgagcgacaccaacagcaagagctgggccaaccacgagaacaagaccgtgaacaagatcaccgtggtgggcggcggcgagctgggcatcgcctgcaccctggccatcagcgccaagggcatcgccgacagactggtgctgctggacctgagcgagggcaccaagggcgccaccatggacctggagatcttcaacctgcccaacgtggagatcagcaaggacctgagcgccagcgcccacagcaaggtggtgatcttcaccgtgaacagcctgggcagcagccagagctacctggacgtggtgcagagcaacgtggacatgttcagagccctggtgcccgccctgggccactacagccagcacagcgtgctgctggtggccagccagcccgtggagatcatgacctacgtgacctggaagctgagcaccttccccgccaacagagtgatcggcatcggctgcaacctggacagccagagactgcagtacatcatcaccaacgtgctgaaggcccagaccagcggcaaggaggtgtgggtgatcggcgagcagggcgaggacaaggtgctgacctggagcggccaggaggaggtggtgagccacaccagccaggtgcagctgagcaacagagccatggagctgctgagagtgaagggccagagaagctggagcgtgggcctgagcgtggccgacatggtggacagcatcgtgaacaacaagaagaaggtgcacagcgtgagcgccctggccaagggctactacgacatcaacagcgaggtgttcctgagcctgccctgcatcctgggcaccaacggcgtgagcgaggtgatcaagaccaccctgaaggaggacaccgtgaccgagaagctgcagagcagcgccagcagcatccacagcctgcagcagcagctgaagctgtag

SEQ ID NO: 104664 - DNA, 429 bp, synthetic construct
  misc_feature 1..429: note = Description of Artificial Sequence: Synthetic coding sequence
  source 1..429: mol_type = other DNA
atgggcgacaagccccccggcttcagaggcagcagagactggatcggctgcgtggaggccagcctgtgcctggcccacttcggcggcccccagggcagactgtgccacgtgcccagaggcgtgggcctgcacggcgagctggagagactgtacagccacttcgccggcggcggcggccccgtgatggtgggcggcgacgccgacgccagaagcaaggccctgctgggcgtgtgcgtgggcagcggcaccgaggcctacgtgctggtgctggacccccactactggggcacccccaagagccccagcgagctgcaggccgccggctgggtgggctggcaggaggtgagcgccgccttcgaccccaacagcttctacaacctgtgcctgaccagcctgagcagccagcagcagcagagaaccctggactag

SEQ ID NO: 104665 - DNA, 1410 bp, synthetic construct
  misc_feature 1..1410: note = Description of Artificial Sequence: Synthetic coding sequence
  source 1..1410: mol_type = other DNA
atggtgatcagcgagagcatggacatcctgttcagaatcagaggcggcctggacctggccttccagctggccacccccaacgagatcttcctgaagaaggccctgaagcacgtgctgagcgacctgagcaccaagctgagcagcaacgccctggtgttcagaatctgccacagcagcgtgtacatctggcccagcagcgacatcaacaccatccccggcgagctgaccgacgccagcgcctgcaagaacatcctgagattcatccagttcgagcccgaggaggacatcaagagaaagttcatgagaaagaaggacaagaagctgagcgacatgcaccagatcgtgaacatcgacctgatgctggagatgagcaccagcctggccgccgtgacccccatcatcgagagagagagcggcggccaccactacgtgaacatgaccctgcccgtggacgccgtgatcagcgtggcccccgaggagacctggggcaaggtgagaaagctgctggtggacgccatccacaaccagctgaccgacatggagaagtgcatcctgaagtacatgaagggcaccagcatcgtggtgcccgagcccctgcacttcctgctgcccggcaagaagaacctggtgaccatcagctaccccagcggcatccccgacggccagctgcaggcctacagaaaggagctgcacgacctgttcaacctgccccacgacagaccctacttcaagagaagcaacgcctaccacttccccgacgagccctacaaggacggctacatcagaaacccccacacctacctgaacccccccaacatggagaccggcatgatctacgtggtgcagggcatctacggctaccaccactacatgcaggacagaatcgacgacaacggctggggctgcgcctacagaagcctgcagaccatctgcagctggttcaagcaccagggctacaccgagagaagcatccccacccacagagagatccagcaggccctggtggacgccggcgacaagcccgccaccttcgtgggcagcagacagtggatcggcagcatcgaggtgcagctggtgctgaaccagctgatcggcatcaccagcaagatcctgttcgtgagccagggcagcgagatcgccagccagggcagagagctggccaaccacttccagagcgagggcacccccgtgatgatcggcggcggcgtgctggcccacaccatcctgggcgtggcctggaacgagatcaccggccagatcaagttcctgatcctggacccccactacaccggcgccgaggacctgcaggtgatcctggagaagggctggtgcggctggaagggccccgacttctggaacaaggacgcctactacaacctgtgcctgccccagagacccaacatgatctag

SEQ ID NO: 104666 - DNA, 2484 bp, synthetic construct
  misc_feature 1..2484: note = Description of Artificial Sequence: Synthetic coding sequence
  source 1..2484: mol_type = other DNA
atggtggtgcagaagccccacggcaccatggagtacaccgccggcaaccaggacaccctgaacagcatcgccctgaagttcaacatcacccccaacaagctggtggagctgaacaagctgttcacccacaccatcgtgcccggccaggtgctgttcgtgcccgacgccaacagccccagcagcaccctgagactgagcagcagcagccccggcgccaccgtgagccccagcagcagcgacgccgagtacgacaagctgcccgacgccgacctggccagaaaggccctgaagcccatcgagagagtgctgagcagcaccagcgaggaggacgagcccggcgtggtgaagttcctgaagatgaactgcagatacttcaccgacggcaagggcgtggtgggcggcgtgatgatcgtgacccccaacaacatcatgttcgacccccacaagagcgaccccctggtgatcgagaacggctgcgaggagtacggcctgatctgccccatggaggaggtggtgagcatcgccctgtacaacgacatcagccacatgaagatcaaggacgccctgcccagccccggcgagtgggaggacctggccagcgagaaggacatcaaccccttcagcaagttcaagagcatcaacaaggagaagagacagcagaacggcgagaagatcatgaccagcgacagcagacccatcgtgcccctggagaagagcaccggccacacccccaccaagcccagcggcagcagcgtgagcgagaagctgaagaagctggacagcagcagagagaccagccacggcagccccaccgtgaccaagctgagcaaggagcccagcgacaccagcagcgccttcgagagcaccgccaaggagaacttcctgggcgaggacgacgacttcgtggacctggaggagctgagcagccagaccggcggcggcatgcacaagaaggacaccctgaaggagtgcctgagcctggaccccgaggagagaaagaaggccgagagccagatcaacaacagcgccgtggagatgcaggtgcagagcgccctggccttcctgggcaccgagaacgacgtggagctgaagggcgccctggacctggagacctgcgagaagcaggacatcatgcccgaggtggacaagcagagcggcagccccgagagcagagtggagaacaccctgaacatccacgaggacctggacaaggtgaagctgatcgagtactacctgaccaagaacaaggagggcccccaggtgagcgagaacctgcagaagaccgagctgagcgacggcaagagcatcgagcccggcggcatcgacatcaccctgagcagcagcctgagccaggccggcgaccccatcaccgagggcaacaaggagcccgacaagacctgggtgaagaagggcgagcccctgcccgtgaagctgaacagcagcaccgaggccaacgtgatcaaggaggccctggacagcagcctggagagcaccctggacaacagctgccagggcgcccagatggacaacaagagcgaggtgcagctgtggctgctgaagagaatccaggtgcccatcgaggacatcctgcccagcaaggaggagaagagcaagaccccccccatgttcctgtgcatcaaggtgggcaagcccatgagaaagagcttcgccacccacaccgccgccatggtgcagcagtacggcaagagaagaaagcagcccgagtactggttcgccgtgcccagagagagagtggaccacctgtacaccttcttcgtgcagtggagccccgacgtgtacggcaaggacgccaaggagcagggcttcgtggtggtggagaaggaggagctgaacatgatcgacaacttcttcagcgagcccaccaccaagagctgggagatcatcaccgtggaggaggccaagagaagaaagagcacctgcagctactacgaggacgaggacgaggaggtgctgcccgtgctgagaccccacagcgccctgctggagaacatgcacatcgagcagctggccagaagactgcccgccagagtgcagggctacccctggagactggcctacagcaccctggagcacggcaccagcctgaagaccctgtacagaaagagcgccagcctggacagccccgtgctgctggtgatcaaggacatggacaaccagatcttcggcgcctacgccacccaccccttcaagttcagcgaccactactacggcaccggcgagaccttcctgtacaccttcagcccccacttcaaggtgttcaagtggagcggcgagaacagctacttcatcaacggcgacatcagcagcctggagctgggcggcggcggcggcagattcggcctgtggctggacgccgacctgtaccacggcagaagcaacagctgcagcaccttcaacaacgacatcctgagcaagaaggaggacttcatcgtgcaggacctggaggtgtgggccttcgactag

SEQ ID NO: 104667 - DNA, 735 bp, synthetic construct; identical to SEQ ID NO: 98916
  misc_feature 1..735: note = Description of Artificial Sequence: Synthetic coding sequence
  source 1..735: mol_type = other DNA

SEQ ID NO: 104668 - DNA, 741 bp, synthetic construct
  misc_feature 1..741: note = Description of Artificial Sequence: Synthetic coding sequence
  source 1..741: mol_type = other DNA
atggccgccgccgccgccaccaagatcctgctgtgcctgcccctgctgctgctgctgagcggctggagcagagccggcagagccgacccccacagcctgtgctacgacatcaccgtgatccccaagttcagacccggccccagatggtgcgccgtgcagggccaggtggacgagaagaccttcctgcactacgactgcggcaacaagaccgtgacccccgtgagccccctgggcaagaagctgaacgtgaccaccgcctggaaggcccagaaccccgtgctgagagaggtggtggacatcctgaccgagcagctgagagacatccagctggagaactacacccccaaggagcccctgaccctgcaggccagaatgagctgcgagcagaaggccgagggccacagcagcggcagctggcagttcagcttcgacggccagatcttcctgctgttcgacagcgagaagagaatgtggaccaccgtgcaccccggcgccagaaagatgaaggagaagtgggagaacgacaaggtggtggccatgagcttccactacttcagcatgggcgactgcatcggctggctggaggacttcctgatgggcatggacagcaccctggagcccagcgccggcgcccccctggccatgagcagcggcaccacccagctgagagccaccgccaccaccctgatcctgtgctgcctgctgatcatcctgccctgcttcatcctgcccggcatctag

SEQ ID NO: 104669 - DNA, 510 bp, synthetic construct
  misc_feature 1..510: note = Description of Artificial Sequence: Synthetic coding sequence
  source 1..510: mol_type = other DNA
atggccgccgccgccagccccgccatcctgcccagactggccatcctgccctacctgctgttcgactggagcggcaccggcagagccgacgcccacagcctgtggtacaacttcaccatcatccacctgcccagacacggccagcagtggtgcgaggtgcagagccaggtggaccagaagaacttcctgagctacgactgcggcagcgacaaggtgctgagcatgggccacctggaggagcagctgtacgccaccgacgcctggggcaagcagctggagatgctgagagaggtgggccagagactgagactggagctggccgacaccgagctggaggacttcacccccagcggccccctgaccctgcaggtgagaatgagctgcgagtgcgaggccgacggctacatcagaggcagctggcagttcagcttcgacggcagaaagttcctgctgttcgacagcaacaacagaaagtggaccgtggtgcacgccggcctgggcaccagctag

SEQ ID NO: 104670 - DNA, 735 bp, synthetic construct
  misc_feature 1..735: note = Description of Artificial Sequence: Synthetic coding sequence
  source 1..735: mol_type = other DNA
atggccgccgccgccagccccgccatcctgcccagactggccatcctgccctacctgctgttcgactggagcggcaccggcagagccgacgcccacagcctgtggtacaacttcaccatcatccacctgcccagacacggccagcagtggtgcgaggtgcagagccaggtggaccagaagaacttcctgagctacgactgcggcagcgacaaggtgctgagcatgggccacctggaggagcagctgtacgccaccgacgcctggggcaagcagctggagatgctgagagaggtgggccagagactgagactggagctggccgacaccgagctggaggacttcacccccagcggccccctgaccctgcaggtgagaatgagctgcgagtgcgaggccgacggctacatcagaggcagctggcagttcagcttcgacggcagaaagttcctgctgttcgacagcaacaacagaaagtggaccgtggtgcacgccggcgccagaagaatgaaggagaagtgggagaaggacagcggcctgaccaccttcttcaagatggtgagcatgagagactgcaagagctggctgagagacttcctgatgcacagaaagaagagactggagcccaccgccccccccaccatggcccccggcctggcccagcccaaggccatcgccaccaccctgagcccctggagcttcctgatcatcctgtgcttcatcctgcccggcatctag

SEQ ID NO: 104671 - DNA, 393 bp, synthetic construct
  misc_feature 1..393: note = Description of Artificial Sequence: Synthetic coding sequence
  source 1..393: mol_type = other DNA
atggccgccgccgccagccccgccatcctgcccagactggccatcctgccctacctgctgttcgactggagcggcaccggcagagccgaggagcagctgtacgccaccgacgcctggggcaagcagctggagatgctgagagaggtgggccagagactgagactggagctggccgacaccgagctggaggacttcacccccagcggccccctgaccctgcaggtgagaatgagctgcgagtgcgaggccgacggctacatcagaggcagctggcagttcagcttcgacggcagaaagttcctgctgttcgacagcaacaacagaaagtggaccgtggtgcacgccggcgccagaagaatgaaggagaagtgggagaagagccacctggagtag

SEQ ID NO: 104672 - DNA, 735 bp, synthetic construct; identical to SEQ ID NO: 104670
  misc_feature 1..735: note = Description of Artificial Sequence: Synthetic coding sequence
  source 1..735: mol_type = other DNA

SEQ ID NO: 104673 - DNA, 663 bp, synthetic construct
  misc_feature 1..663: note = Description of Artificial Sequence: Synthetic coding sequence
  source 1..663: mol_type = other DNA
atgaaggtgaagaagggcggcggcggcgccggcaccgccaccgagagcgcccccggccccagcggccagagcgtggcccccatcccccagccccccgccgagagcgagagcggcagcgagagcgagcccgacgccggccccggccccagacccggccccctgcagagaaagcagcccatcggccccgaggacgtgctgggcctgcagagaatcaccggcgactacctgtgcagccccgaggagaacatctacaagatcgacttcgtgagattcaagatcagagacatggacagcggcaccgtgctgttcgagatcaagaagccccccgtgagcgagagactgcccatcaacagaagagacctggaccccaacgccggcagattcgtgagataccagttcacccccgccttcctgagactgagacaggtgggcgccaccgtggagttcaccgtgggcgacaagcccgtgaacaacttcagaatgatcgagagacactacttcagaaaccagctgctgaagagcttcgacttccacttcggcttctgcatccccagcagcaagaacacctgcgagcacatctacgacttcccccccctgagcgaggagctgagcgccagagccggcagcagcggcagcggcgaggtgggcgccagcagagactag

SEQ ID NO: 104674 - DNA, 723 bp, synthetic construct
  misc_feature 1..723: note = Description of Artificial Sequence: Synthetic coding sequence
  source 1..723: mol_type = other DNA
atgaaggtgaagaagggcggcggcggcgccggcaccgccaccgagagcgcccccggccccagcggccagagcgtggcccccatcccccagccccccgccgagagcgagagcggcagcgagagcgagcccgacgccggccccggccccagacccggccccctgcagagaaagcagcccatcggccccgaggacgtgctgggcctgcagagaatcaccggcgactacctgtgcagccccgaggagaacatctacaagatcgacttcgtgagattcaagatcagagacatggacagcggcaccgtgctgttcgagatcaagaagccccccgtgagcgagagactgcccatcaacagaagagacctggaccccaacgccggcagattcgtgagataccagttcacccccgccttcctgagactgagacaggtgggcgccaccgtggagttcaccgtgggcgacaagcccgtgaacaacttcagaatgatcgagagacactacttcagaaaccagctgctgaagagcttcgacttccacttcggcttctgcatccccagcagcaagaacacctgcgagcacatctacgacttcccccccctgagcgaggagctgatcagcgagatgatcagacacccctacgagacccagagcgacagcttctacttcgtggacgacagactggtgatgcacaacaaggccgactacagctacagcggcaccccctag

SEQ ID NO: 104675 - DNA, 627 bp, synthetic construct
  misc_feature 1..627: note = Description of Artificial Sequence: Synthetic coding sequence
  source 1..627: mol_type = other DNA
atgaaggtgaagaagggcggcggcggcgccggcaccgccaccgagagcgcccccggccccagcggccagagcgtggcccccatcccccagccccccgccgagagcgagagcggcagcgagagcgagcccgacgccggccccggccccagacccggccccctgcagagaaagcagcccatcggccccgaggacgtgctgggcctgcagagaatcaccggcggcgccagacccctgttccccgcctggagattcaagatcagagacatggacagcggcaccgtgctgttcgagatcaagaagccccccgtgagcgagagactgcccatcaacagaagagacctggaccccaacgccggcagattcgtgagataccagttcacccccgccttcctgagactgagacaggtgggcgccaccgtggagttcaccgtgggcgacaagcccgtgaacaacttcagaatgatcgagagacactacttcagaaaccagctgctgaagagcttcgacttccacttcggcttctgcatccccagcagcaagaacacctgcgagcacatctacgacttcccccccctgagcgaggagctgagcgccagagccggcagcagcggcagcggcgaggtgtag

SEQ ID NO: 104676 - DNA, 5112 bp, synthetic construct
  misc_feature 1..5112: note = Description of Artificial Sequence: Synthetic coding sequence
  source 1..5112: mol_type = other DNA
ctgagcctgctgtgcgtgagcctgaagaaggccaagttcgacggcgcccaggagaagttcaacacctacgtgaccctgaaggtgcagaacgtgaagagcaccaccatcgccgtgagaggcagccagcccagctgggagcaggacttcatgttcgagatcaacagactggacctgggcctgaccgtggaggtgtggaacaagggcctgatctgggacaccatggtgggcaccgtgtggatccccctgagaaccatcagacagagcaacgaggagggccccggcgagtggctgaccctggacagccaggtgatcatggccgacagcgagatctgcggcaccaaggaccccaccttccacagaatcctgctggacaccagattcgagctgcccctggacatccccgaggaggaggccagatactgggccaagaagctggagcagctgaacgccatgagagaccaggacgagtacagcttccaggacgagcaggacaagcccctgcccgtgcccagcaaccagtgctgcaactggaactacttcggctggggcgagcagcacaacgacgaccccgacagcgccgtggacgacagagacagcgactacagaagcgagaccagcaacagcatcccccccccctactacaccaccagccagcccaacgccagcgtgcaccagtacagcgtgagacccccccccctgggcagcagagagagctacagcgacagcatgcacagctacgaggagttcagcgagccccaggccctgagccccaccggcagcagcagatacgccagcagcggcgagctgagccagggcagcagccagctgagcgaggacttcgaccccgacgagcacagcctgcagggcagcgacatggaggacgagagagacagagacagctaccacagctgccacagcagcgtgagctaccacaaggacagccccagatgggaccaggacgaggaggagctggaggaggacctggaggacttcctggaggaggaggagctgcccgaggacgaggaggagctggaggaggaggaggaggaggtgcccgacgacctgggcagctacgcccagagagaggacgtggccgtggccgagcccaaggacttcaagagaatcagcctgccccccgccgcccccggcaaggaggacaaggcccccgtggcccccaccgaggcccccgacatggccaaggtggcccccaagcccgccacccccgacaaggtgcccgccgccgagcagatccccgaggccgagccccccaaggacgaggagagcttcagacccagagaggacgaggagggccaggagggccaggacagcatgagcagagccaaggccaactggctgagagccttcaacaaggtgagaatgcagctgcaggaggccagaggcgagggcgagatgagcaagagcctgtggttcaagggcggccccggcggcggcctgatcatcatcgacagcatgcccgacatcagaaagagaaagcccatccccctggtgagcgacctggccatgagcctggtgcagagcagaaaggccggcatcaccagcgccctggccagcagcaccctgaacaacgaggagctgaagaaccacgtgtacaagaagaccctgcaggccctgatctaccccatcagctgcaccaccccccacaacttcgaggtgtggaccgccaccacccccacctactgctacgagtgcgagggcctgctgtggggcatcgccagacagggcatgagatgcaccgagtgcggcgtgaagtgccacgagaagtgccaggacctgctgaacgccgactgcctgcagagagccgccgagaagagcagcaagcacggcgccgaggacagaacccagaacatcatcatggtgctgaaggacagaatgaagatcagagagagaaacaagcccgagatcttcgagctgatccaggagatcttcgccgtgaccaagaccgcccacacccagcagatgaaggccgtgaagcagagcgtgctggacggcaccagcaagtggagcgccaagatcagcatcaccgtggtgtgcgcccagggcctgcaggccaaggacaagaccggcagcagcgacccctacgtgaccgtgcaggtgggcaagaccaagaagagaaccaagaccatctacggcaacctgaaccccgtgtgggaggagaacttccacttcgagtgccacaacagcagcgacagaatcaaggtgagagtgtgggacgaggacgacgacatcaagagcagagtgaagcagagattcaagagagagagcgacgacttcctgggccagaccatcatcgaggtgagaaccctgagcggcgagatggacgtgtggtacaacctggacaagagaaccgacaagagcgccgtgagcggcgccatcagactgcacatcagcgtggagatcaagggcgaggagaaggtggccccctaccacgtgcagtacacctgcctgcacgagaacctgttccacttcgtgaccgacgtgcagaacaacggcgtggtgaagatccccgacgccaagggcgacgacgcctggaaggtgtactacgacgagaccgcccaggagatcgtggacgagttcgccatgagatacggcgtggagagcatctaccaggccatgacccacttcgcctgcctgagcagcaagtacatgtgccccggcgtgcccgccgtgatgagcaccctgctggccaacatcaacgcctactacgcccacaccaccgccagcaccaacgtgagcgccagcgacagattcgccgccagcaacttcggcaaggagagattcgtgaagctgctggaccagctgcacaacagcctgagaatcgacctgagcatgtacagaaacaacttccccgccagcagccccgagagactgcaggacctgaagagcaccgtggacctgctgaccagcatcaccttcttcagaatgaaggtgcaggagctgcagagcccccccagagccagccaggtggtgaaggactgcgtgaaggcctgcctgaacagcacctacgagtacatcttcaacaactgccacgagctgtacagcagagagtaccagaccgaccccgccaagaagggcgaggtgctgcccgaggagcagggccccagcatcaagaacctggacttctggagcaagctgatcaccctgatcgtgagcatcatcgaggaggacaagaacagctacaccccctgcctgaaccagttcccccaggagctgaacgtgggcaagatcagcgccgaggtgatgtggaacctgttcgcccaggacatgaagtacgccatggaggagcacgacaagcacagactgtgcaagagcgccgactacatgaacctgcacttcaaggtgaagtggctgtacaacgagtacgtgaccgagctgcccgccttcaaggacagagtgcccgagtaccccgcctggttcgagcccttcgtgatccagtggctggacgagaacgaggaggtgagcagagacttcctgcacggcgccctggagagagacaagaaggacggcttccagcagaccagcgagcacgccctgttcagctgcagcgtggtggacgtgttcagccagctgaaccagagcttcgagatcatcaagaagctggagtgccccgacccccagatcgtgggccactacatgagaagattcgccaagaccatcagcaacgtgctgctgcagtacgccgacatcatcagcaaggacttcgccagctactgcagcaaggagaaggagaaggtgccctgcatcctgatgaacaacacccagcagctgagagtgcagctggagaagatgttcgaggccatgggcggcaaggagctggacgccgaggccagcgacatcctgaaggagctgcaggtgaagctgaacaacgtgctggacgagctgagcagagtgttcgccaccagcttccagccccacatcgaggagtgcgtgaagcagatgggcgacatcctgagccaggtgaagggcaccggcaacgtgcccgccagcgcctgcagcagcgtggcccaggacgccgacaacgtgctgcagcccatcatggacctgctggacagcaacctgaccctgttcgccaagatctgcgagaagaccgtgctgaagagagtgctgaaggagctgtggaagctggtgatgaacaccatggagaagaccatcgtgctgccccccctgaccgaccagaccctgcagggcaacctgctgagaaagcacggcaagggcctggagaagggcagagtgaagctgcccagccacagcgacggcacccagatgatcttcaacgccgccaaggagctgggccagctgagcaagctgaaggaccacatggtgagagaggaggccaagagcctgacccccaagcagtgcgccgtggtggagctggccctggacaccatcaagcagtacttccacgccggcggcgtgggcctgaagaagaccttcctggagaagagccccgacctgcagagcctgagatacgccctgagcctgtacacccaggccaccgacctgctgatcaagaccttcgtgcagacccagagcgcccagggcctgggcgtggaggaccccgtgggcgaggtgagcgtgcacgtggagctgttcacccaccccggcaccggcgagcacaaggtgaccgtgaaggtggtggccgccaacgacctgaagtggcagaccagcggcatcttcagacccttcatcgaggtgaacatcatcggcccccagctgagcgacaagaagagaaagttcgccaccaagagcaagaacaacagctgggcccccaagtacaacgagagcttccagttcaccctgagcgccgacgccggccccgagtgctacgagctgcaggtgtgcgtgaaggactactgcttcgccagagaggacagaaccgtgggcctggccgtgctgcagctgagagagctggcccagagaggcagcgccgcctgctggctgcccctgggcagaagaatccacatggacgacaccggcctgaccgtgctgagaatcctgagccagagaagcaacgacgaggtggccaaggagttcgtgaagctgaagagcgacaccagaagcgccgaggagggcggcgccgcccccgccccctag

SEQ ID NO: 104677 - DNA, 5376 bp, synthetic construct
  misc_feature 1..5376: note = Description of Artificial Sequence: Synthetic coding sequence
  source 1..5376: mol_type = other DNA
atgggcggcggcggcacctgcaccatcagcgtgcaggtgagagtgtgcaccggcggcaacctgctgggcggcagaagaagacccctgagcccctgcaacgaggaggtgtggggcgaggcccccctgcccggcgccagacccttcaacgccccccccgccagaagcgcccccgcccccagcggcgtgcccggcctgagactgcccgccccccaccagagacacagcagacccggcagactgagacccacctgcgagctgggcgacatgagcctgctgtgcgtgggcgtgaagaaggccaagttcgacggcgcccaggagaagttcaacacctacgtgaccctgaaggtgcagaacgtgaagagcaccaccatcgccgtgagaggcagccagcccagctgggagcaggacttcatgttcgagatcaacagactggacctgggcctgaccgtggaggtgtggaacaagggcctgatctgggacaccatggtgggcaccgtgtggatccccctgagaaccatcagacagagcaacgaggagggccccggcgagtggctgaccctggacagccaggtgatcatggccgacagcgagatctgcggcaccaaggaccccaccttccacagaatcctgctggacaccagattcgagctgcccctggacatccccgaggaggaggccagatactgggccaagaagctggagcagctgaacgccatgagagaccaggacgagtacagcttccaggacgagcaggacaagcccctgcccgtgcccagcaaccagtgctgcaactggaactacttcggctggggcgagcagcacaacgacgaccccgacagcgccgtggacgacagagacagcgactacagaagcgagaccagcaacagcatcccccccccctactacaccaccagccagcccaacgccagcgtgcaccagtacagcgtgagacccccccccctgggcagcagagagagctacagcgacagcatgcacagctacgaggagttcagcgagccccaggccctgagccccaccggcagcagcagatacgccagcagcggcgagctgagccagggcagcagccagctgagcgaggacttcgaccccgacgagcacagcctgcagggcagcgacatggaggacgagagagacagagacagctaccacagctgccacagcagcgtgagctaccacaaggacagccccagatgggaccaggacgaggaggagctggaggaggacctggaggacttcctggaggaggaggagctgcccgaggacgaggaggagctggaggaggaggaggaggaggtgcccgacgacctgggcagctacgcccagagagaggacgtggccgtggccgagcccaaggacttcaagagaatcagcctgccccccgccgcccccggcaaggaggacaaggcccccgtggcccccaccgaggcccccgacatggccaaggtggcccccaagcccgccacccccgacaaggtgcccgccgccgagcagatccccgaggccgagccccccaaggacgaggagagcttcagacccagagaggacgaggagggccaggagggccaggacagcatgagcagagccaaggccaactggctgagagccttcaacaaggtgagaatgcagctgcaggaggccagaggcgagggcgagatgagcaagagcctgtggttcaagggcggccccggcggcggcctgatcatcatcgacagcatgcccgacatcagaaagagaaagcccatccccctggtgagcgacctggccatgagcctggtgcagagcagaaaggccggcatcaccagcgccctggccagcagcaccctgaacaacgaggagctgaagaaccacgtgtacaagaagaccctgcaggccctgatctaccccatcagctgcaccaccccccacaacttcgaggtgtggaccgccaccacccccacctactgctacgagtgcgagggcctgctgtggggcatcgccagacagggcatgagatgcaccgagtgcggcgtgaagtgccacgagaagtgccaggacctgctgaacgccgactgcctgcagagagccgccgagaagagcagcaagcacggcgccgaggacagaacccagaacatcatcatggtgctgaaggacagaatgaagatcagagagagaaacaagcccgagatcttcgagctgatccaggagatcttcgccgtgaccaagaccgcccacacccagcagatgaaggccgtgaagcagagcgtgctggacggcaccagcaagtggagcgccaagatcagcatcaccgtggtgtgcgcccagggcctgcaggccaaggacaagaccggcagcagcgacccctacgtgaccgtgcaggtgggcaagaccaagaagagaaccaagaccatctacggcaacctgaaccccgtgtgggaggagaacttccacttcgagtgccacaacagcagcgacagaatcaaggtgagagtgtgggacgaggacgacgacatcaagagcagagtgaagcagagattcaagagagagagcgacgacttcctgggccagaccatcatcgaggtgagaaccctgagcggcgagatggacgtgtggtacaacctggacaagagaaccgacaagagcgccgtgagcggcgccatcagactgcacatcagcgtggagatcaagggcgaggagaaggtggccccctaccacgtgcagtacacctgcctgcacgagaacctgttccacttcgtgaccgacgtgcagaacaacggcgtggtgaagatccccgacgccaagggcgacgacgcctggaaggtgtactacgacgagaccgcccaggagatcgtggacgagttcgccatgagatacggcgtggagagcatctaccaggccatgacccacttcgcctgcctgagcagcaagtacatgtgccccggcgtgcccgccgtgatgagcaccctgctggccaacatcaacgcctactacgcccacaccaccgccagcaccaacgtgagcgccagcgacagattcgccgccagcaacttcggcaaggagagattcgtgaagctgctggaccagctgcacaacagcctgagaatcgacctgagcatgtacagaaacaacttccccgccagcagccccgagagactgcaggacctgaagagcaccgtggacctgctgaccagcatcaccttcttcagaatgaaggtgcaggagctgcagagcccccccagagccagccaggtggtgaaggactgcgtgaaggcctgcctgaacagcacctacgagtacatcttcaacaactgccacgagctgtacagcagagagtaccagaccgaccccgccaagaagggcgaggtgctgcccgaggagcagggccccagcatcaagaacctggacttctggagcaagctgatcaccctgatcgtgagcatcatcgaggaggacaagaacagctacaccccctgcctgaaccagttcccccaggagctgaacgtgggcaagatcagcgccgaggtgatgtggaacctgttcgcccaggacatgaagtacgccatggaggagcacgacaagcacagactgtgcaagagcgccgactacatgaacctgcacttcaaggtgaagtggctgtacaacgagtacgtgaccgagctgcccgccttcaaggacagagtgcccgagtaccccgcctggttcgagcccttcgtgatccagtggctggacgagaacgaggaggtgagcagagacttcctgcacggcgccctggagagagacaagaaggacggcttccagcagaccagcgagcacgccctgttcagctgcagcgtggtggacgtgttcagccagctgaaccagagcttcgagatcatcaagaagctggagtgccccgacccccagatcgtgggccactacatgagaagattcgccaagaccatcagcaacgtgctgctgcagtacgccgacatcatcagcaaggacttcgccagctactgcagcaaggagaaggagaaggtgccctgcatcctgatgaacaacacccagcagctgagagtgcagctggagaagatgttcgaggccatgggcggcaaggagctggacgccgaggccagcgacatcctgaaggagctgcaggtgaagctgaacaacgtgctggacgagctgagcagagtgttcgccaccagcttccagccccacatcgaggagtgcgtgaagcagatgggcgacatcctgagccaggtgaagggcaccggcaacgtgcccgccagcgcctgcagcagcgtggcccaggacgccgacaacgtgctgcagcccatcatggacctgctggacagcaacctgaccctgttcgccaagatctgcgagaagaccgtgctgaagagagtgctgaaggagctgtggaagctggtgatgaacaccatggagaagaccatcgtgctgccccccctgaccgaccagaccatgatcggcaacctgctgagaaagcacggcaagggcctggagaagggcagagtgaagctgcccagccacagcgacggcacccagatgatcttcaacgccgccaaggagctgggccagctgagcaagctgaaggaccacatggtgagagaggaggccaagagcctgacccccaagcagtgcgccgtggtggagctggccctggacaccatcaagcagtacttccacgccggcggcgtgggcctgaagaagaccttcctggagaagagccccgacctgcagagcctgagatacgccctgagcctgtacacccaggccaccgacctgctgatcaagaccttcgtgcagacccagagcgcccagggcctgggcgtggaggaccccgtgggcgaggtgagcgtgcacgtggagctgttcacccaccccggcaccggcgagcacaaggtgaccgtgaaggtggtggccgccaacgacctgaagtggcagaccagcggcatcttcagacccttcatcgaggtgaacatcatcggcccccagctgagcgacaagaagagaaagttcgccaccaagagcaagaacaacagctgggcccccaagtacaacgagagcttccagttcaccctgagcgccgacgccggccccgagtgctacgagctgcaggtgtgcgtgaaggactactgcttcgccagagaggacagaaccgtgggcctggccgtgctgcagctgagagagctggcccagagaggcagcgccgcctgctggctgcccctgggcagaagaatccacatggacgacaccggcctgaccgtgctgagaatcctgagccagagaagcaacgacgaggtggccaaggagttcgtgaagctgaagagcgacaccagaagcgccgaggagggcggcgccgcccccgccccctag

SEQ ID NO: 104678 - DNA, 5112 bp, synthetic construct
  misc_feature 1..5112: note = Description of Artificial Sequence: Synthetic coding sequence
  source 1..5112: mol_type = other DNA
atgagcctgctgtgcgtgggcgtgaagaaggccaagttcgacggcgcccaggagaagttcaacacctacgtgaccctgaaggtgcagaacgtgaagagcaccaccatcgccgtgagaggcagccagcccagctgggagcaggacttcatgttcgagatcaacagactggacctgggcctgaccgtggaggtgtggaacaagggcctgatctgggacaccatggtgggcaccgtgtggatccccctgagaaccatcagacagagcaacgaggagggccccggcgagtggctgaccctggacagccaggtgatcatggccgacagcgagatctgcggcaccaaggaccccaccttccacagaatcctgctggacaccagattcgagctgcccctggacatccccgaggaggaggccagatactgggccaagaagctggagcagctgaacgccatgagagaccaggacgagtacagcttccaggacgagcaggacaagcccctgcccgtgcccagcaaccagtgctgcaactggaactacttcggctggggcgagcagcacaacgacgaccccgacagcgccgtggacgacagagacagcgactacagaagcgagaccagcaacagcatcccccccccctactacaccaccagccagcccaacgccagcgtgcaccagtacagcgtgagacccccccccctgggcagcagagagagctacagcgacagcatgcacagctacgaggagttcagcgagccccaggccctgagccccaccggcagcagcagatacgccagcagcggcgagctgagccagggcagcagccagctgagcgaggacttcgaccccgacgagcacagcctgcagggcagcgacatggaggacgagagagacagagacagctaccacagctgccacagcagcgtgagctaccacaaggacagccccagatgggaccaggacgaggaggagctggaggaggacctggaggacttcctggaggaggaggagctgcccgaggacgaggaggagctggaggaggaggaggaggaggtgcccgacgacctgggcagctacgcccagagagaggacgtggccgtggccgagcccaaggacttcaagagaatcagcctgccccccgccgcccccggcaaggaggacaaggcccccgtggcccccaccgaggcccccgacatggccaaggtggcccccaagcccgccacccccgacaaggtgcccgccgccgagcagatccccgaggccgagccccccaaggacgaggagagcttcagacccagagaggacgaggagggccaggagggccaggacagcatgagcagagccaaggccaactggctgagagccttcaacaaggtgagaatgcagctgcaggaggccagaggcgagggcgagatgagcaagagcctgtggttcaagggcggccccggcggcggcctgatcatcatcgacagcatgcccgacatcagaaagagaaagcccatccccctggtgagcgacctggccatgagcctggtgcagagcagaaaggccggcatcaccagcgccctggccagcagcaccctgaacaacgaggagctgaagaaccacgtgtacaagaagaccctgcaggccctgatctaccccatcagctgcaccaccccccacaacttcgaggtgtggaccgccaccacccccacctactgctacgagtgcgagggcctgctgtggggcatcgccagacagggcatgagatgcaccgagtgcggcgtgaagtgccacgagaagtgccaggacctgctgaacgccgactgcctgcagagagccgccgagaagagcagcaagcacggcgccgaggacagaacccagaacatcatcatggtgctgaaggacagaatgaagatcagagagagaaacaagcccgagatcttcgagctgatccaggagatcttcgccgtgaccaagaccgcccacacccagcagatgaaggccgtgaagcagagcgtgctggacggcaccagcaagtggagcgccaagatcagcatcaccgtggtgtgcgcccagggcctgcaggccaaggacaagaccggcagcagcgacccctacgtgaccgtgcaggtgggcaagaccaagaagagaaccaagaccatctacggcaacctgaaccccgtgtgggaggagaacttccacttcgagtgccacaacagcagcgacagaatcaaggtgagagtgtgggacgaggacgacgacatcaagagcagagtgaagcagagattcaagagagagagcgacgacttcctgggccagaccatcatcgaggtgagaaccctgagcggcgagatggacgtgtggtacaacctggacaagagaaccgacaagagcgccgtgagcggcgccatcagactgcacatcagcgtggagatcaagggcgaggagaaggtggccccctaccacgtgcagtacacctgcctgcacgagaacctgttccacttcgtgaccgacgtgcagaacaacggcgtggtgaagatccccgacgccaagggcgacgacgcctggaaggtgtactacgacgagaccgcccaggagatcgtggacgagttcgccatgagatacggcgtggagagcatctaccaggccatgacccacttcgcctgcctgagcagcaagtacatgtgccccggcgtgcccgccgtgatgagcaccctgctggccaacatcaacgcctactacgcccacaccaccgccagcaccaacgtgagcgccagcgacagattcgccgccagcaacttcggcaaggagagattcgtgaagctgctggaccagctgcacaacagcctgagaatcgacctgagcatgtacagaaacaacttccccgccagcagccccgagagactgcaggacctgaagagcaccgtggacctgctgaccagcatcaccttcttcagaatgaaggtgcaggagctgcagagcccccccagagccagccaggtggtgaaggactgcgtgaaggcctgcctgaacagcacctacgagtacatcttcaacaactgccacgagctgtacagcagagagtaccagaccgaccccgccaagaagggcgaggtgctgcccgaggagcagggccccagcatcaagaacctggacttctggagcaagctgatcaccctgatcgtgagcatcatcgaggaggacaagaacagctacaccccctgcctgaaccagttcccccaggagctgaacgtgggcaagatcagcgccgaggtgatgtggaacctgttcgcccaggacatgaagtacgccatggaggagcacgacaagcacagactgtgcaagagcgccgactacatgaacctgcacttcaaggtgaagtggctgtacaacgagtacgtgaccgagctgcccgccttcaaggacagagtgcccgagtaccccgcctggttcgagcccttcgtgatccagtggctggacgagaacgaggaggtgagcagagacttcctgcacggcgccctggagagagacaagaaggacggcttccagcagaccagcgagcacgccctgttcagctgcagcgtggtggacgtgttcagccagctgaaccagagcttcgagatcatcaagaagctggagtgccccgacccccagatcgtgggccactacatgagaagattcgccaagaccatcagcaacgtgctgctgcagtacgccgacatcatcagcaaggacttcgccagctactgcagcaaggagaaggagaaggtgccctgcatcctgatgaacaacacccagcagctgagagtgcagctggagaagatgttcgaggccatgggcggcaaggagctggacgccgaggccagcgacatcctgaaggagctgcaggtgaagctgaacaacgtgctggacgagctgagcagagtgttcgccaccagcttccagccccacatcgaggagtgcgtgaagcagatgggcgacatcctgagccaggtgaagggcaccggcaacgtgcccgccagcgcctgcagcagcgtggcccaggacgccgacaacgtgctgcagcccatcatggacctgctggacagcaacctgaccctgttcgccaagatctgcgagaagaccgtgctgaagagagtgctgaaggagctgtggaagctggtgatgaacaccatggagaagaccatcgtgctgccccccctgaccgaccagaccatgatcggcaacctgctgagaaagcacggcaagggcctggagaagggcagagtgaagctgcccagccacagcgacggcacccagatgatcttcaacgccgccaaggagctgggccagctgagcaagctgaaggaccacatggtgagagaggaggccaagagcctgacccccaagcagtgcgccgtggtggagctggccctggacaccatcaagcagtacttccacgccggcggcgtgggcctgaagaagaccttcctggagaagagccccgacctgcagagcctgagatacgccctgagcctgtacacccaggccaccgacctgctgatcaagaccttcgtgcagacccagagcgcccagggcctgggcgtggaggaccccgtgggcgaggtgagcgtgcacgtggagctgttcacccaccccggcaccggcgagcacaaggtgaccgtgaaggtggtggccgccaacgacctgaagtggcagaccagcggcatcttcagacccttcatcgaggtgaacatcatcggcccccagctgagcgacaagaagagaaagttcgccaccaagagcaagaacaacagctgggcccccaagtacaacgagagcttccagttcaccctgagcgccgacgccggccccgagtgctacgagctgcaggtgtgcgtgaaggactactgcttcgccagagaggacagaaccgtgggcctggccgtgctgcagctgagagagctggcccagagaggcagcgccgcctgctggctgcccctgggcagaagaatccacatggacgacaccggcctgaccgtgctgagaatcctgagccagagaagcaacgacgaggtggccaaggagttcgtgaagctgaagagcgacaccagaagcgccgaggagggcggcgccgcccccgccccctag

SEQ ID NO: 104679 - DNA, 1293 bp, synthetic construct
  misc_feature 1..1293: note = Description of Artificial Sequence: Synthetic coding sequence
  source 1..1293: mol_type = other DNA
atggccaccctgagcgtgaagcccagcagaagattccagctgcccgactggcacaccaacagctacctgctgagcaccaacgcccagctgcagagagacgccagccaccagatcagacaggaggccagagtgctgagaaacgagaccaacaaccagaccatctgggacgagcacgacaacagaaccagactggtggagagaatcgacaccgtgaacagatggaaggagatgctggacaagtgcctgaccgacctggacgccgagatcgacgccctgacccagatgaaggagagcgccgagcagaacctgcaggccaagaacctgcccctggacgtggccatcgagtgcctgaccctgagagagagcagaagagacatcgacgtggtgaaggaccccgtggaggacgagctgcacaaggaggtggaggtgatcgaggccaccaagaaggccctgcagcagaaggtgagccaggccttcgagcagctgtgcctgctgcaggaggtgcagcagcagctgaacagcgaccacagaggcaagatggagaccctggagatcgacagaggctgcctgagcctgaacctgagaagccccaacatcagcctgaaggtggaccccaccagagtgcccgacggcagcaccaccctgcagcagtgggacgacttcagcagattcaacaaggacagagccgaggccgagatgaaggccgccaccgagctgagagaggccaccgccctgaccatcgccgagaccaacaacgagctggaggcccagagagtggccaccgagttcgccttcagaaagagactgagagagatggagaaggtgtacagcgagctgaagtggcaggagaagaacaccctggaggagatcgccgagctgcaggaggacatcagacacctggaggaggacctgagaaccaagctgctgagcctgaagctgagccacaccagactggaggccagaacctacagacccaacgtggagctgtgcagagaccaggcccagtacggcctgaccgacgaggtgcaccagctggaggccaccatcgccgccctgaagcagaagctggcccaggcccaggacgccctggacgccctgtgcaagcacctggccagactgcaggccgacatcgcctgcaaggccaacagcatgctgctggacaccaagtgcatggacaccagaagaaagctgaccgtgcccgccgagagattcgtgcccgaggtggacaccttcaccagaaccaccaacagcaccctgagccccctgaagagctgccagctggagctggcctag

SEQ ID NO: 104680 - DNA, 3429 bp, synthetic construct
  misc_feature 1..3429: note = Description of Artificial Sequence: Synthetic coding sequence
  source 1..3429: mol_type = other DNA
atggccaccctgctgagccacccccagcagagaccccccttcctgagacaggccatcaagatcagaagaagaagagtgagagacctgcaggacccccccccccagatggcccccgagatccagccccccagccaccacttcagccccgagcagagagccctgctgtacgaggacgccctgtacaccgtgctgcacagactgggccaccccgagcccaaccacgtgaccgaggccagcgagctgctgagatacctgcaggaggccttccacgtggagcccgaggagcaccagcagaccctgcagagagtgagagagctggagaagcccatcttctgcctgaaggccaccgtgaagcaggccaagggcatcctgggcaaggacgtgagcggcttcagcgacccctactgcctgctgggcatcgagcagggcgtgggcgtgcccggcggcagccccggcagcagacacagacagaaggccgtggtgagacacaccatccccgaggaggagacccacagaacccaggtgatcacccagaccctgaaccccgtgtgggacgagaccttcatcctggagttcgaggacatcaccaacgccagcttccacctggacatgtgggacctggacaccgtggagagcgtgagacagaagctgggcgagctgaccgacctgcacggcctgagaagaatcttcaaggaggccagaaaggacaagggccaggacgacttcctgggcaacgtggtgctgagactgcaggacctgagatgcagagaggaccagtggtaccccctggagcccagaaccgagacctaccccgacagaggccagtgccacctgcagttccagctgatccacaagagaagagccaccagcgccagcagaagccagcccagctacaccgtgcacctgcacctgctgcagcagctggtgagccacgaggtgacccagcacgaggccggcagcaccagctgggacggcagcctgagcccccaggccgccaccgtgctgttcctgcacgccacccagaaggacctgagcgacttccaccagagcatggcccagtggctggcctacagcagactgtaccagagcctggagttccccagcagctgcctgctgcaccccatcaccagcatcgagtaccagtggatccagggcagactgaaggccgagcagcaggaggagctggccgccagcttcagcagcctgctgacctacggcctgagcctgatcagaagattcagaagcgtgttccccctgagcgtgagcgacagccccgccagactgcagagcctgctgagagtgctggtgcagatgtgcaagatgaaggccttcggcgagctgtgccccaacaccgcccccctgccccagctggtgaccgaggccctgcagaccggcaccaccgagtggttccacctgaagcagcagcaccaccagcccatggtgcagggcatccccgaggccggcaaggccctgctgggcctggtgcaggacgtgatcggcgacctgcaccagtgccagagaacctgggacaagatcttccacaacaccctgaagatccacctgttcagcatggccttcagagagctgcagtggctggtggccaagagagtgcaggaccacaccaccgtggtgggcgacgtggtgagccccgagatgggcgagagcctgttccagctgtacatcagcctgaaggagctgtgccagctgagaatgagcagcagcgagagagacggcgtgctggccctggacaacttccacagatggttccagcccgccatccccagctggctgcagaagacctacaacgaggccctggccagagtgcagagagccgtgcagatggacgagctggtgcccctgggcgagctgaccaagcacagcaccagcgccgtggacctgagcacctgcttcgcccagatcagccacaccgccagacagctggactggcccgaccccgaggaggccttcatgatcaccgtgaagttcgtggaggacacctgcagactggccctggtgtactgcagcctgatcaaggccagagccagagagctgagcagcggccagaaggaccagggccaggccgccaacatgctgtgcgtggtggtgaacgacatggagcagctgagactggtgatcggcaagctgcccgcccagctggcctgggaggccctggagcagagagtgggcgccgtgctggagcagggccagctgcagaacaccctgcacgcccagctgcagagcgccctggccggcctgggccacgagatcagaaccggcgtgagaaccctggccgagcagctggaggtgggcatcgccaagcacatccagaagctggtgggcgtgagagagagcgtgctgcccgaggacgccatcctgcccctgatgaagttcctggaggtggagctgtgctacatgaacaccaacctggtgcaggagaacttcagcagcctgctgaccctgctgtggacccacaccctgaccgtgctggtggaggccgccgccagccagagaagcagcagcctggccagcaacagactgaagatcgccctgcagaacctggagatctgcttccacgccgagggctgcggcctgccccccaaggccctgcacaccgccaccttccaggccctgcagagagacctggagctgcaggccgccagcagcagagagctgatcagaaagtacttctgcagcagaatccagcagcaggccgagaccaccagcgaggagctgggcgccgtgaccgtgaaggccagctacagagccagcgagcagaagctgagagtggagctgctgagcgccagcagcctgctgcccctggacagcaacggcagcagcgaccccttcgtgcagctgaccctggagcccagacacgagttccccgagctggccgccagagagacccagaagcacaagaaggacctgcaccccctgttcgacgagaccttcgagttcctggtgcccgccgagccctgcagaaaggccggcgcctgcctgctgctgaccgtgctggactacgacaccctgggcgccgacgacctggagggcgaggccttcctgcccctgagagaggtgcccggcctgagcggcagcgaggagcccggcgaggtgccccagaccagactgcccctgacctaccccgcccccaacggcgaccccatcctgcagctgctggagggcagaaagggcgacagagaggcccaggtgttcgtgagactgagaagacacagagccaagcagggcatcggccccagcgtgagctggccctggcccatctgcctgctggccttcctgttccagcccctgggctggggccccggcagcctgggccccggcctgcaggcccagagcctgctggagaagggcgagggcaccctgcccaagatgagactgcagctgccctggggcgagggcggcggccactactag

SEQ ID NO: 104681 - DNA, 2835 bp, synthetic construct
  misc_feature 1..2835: note = Description of Artificial Sequence: Synthetic coding sequence
  source 1..2835: mol_type = other DNA
atggccaccctgctgagccacccccagcagagaccccccttcctgagacaggccatcaagatcagaagaagaagagtgagagacctgcaggacccccccccccagatggcccccgagatccagccccccagccaccacttcagccccgagcagagagccctgctgtacgaggacgccctgtacaccgtgctgcacagactgggccaccccgagcccaaccacgtgaccgaggccagcgagctgctgagatacctgcaggaggccttccacgtggagcccgaggagcaccagcagaccctgcagagagtgagagagctggagaagcccatcttctgcctgaaggccaccgtgaagcaggccaagggcatcctgggcaaggacgtgagcggcttcagcgacccctactgcctgctgggcatcgagcagggcgtgggcgtgcccggcggcagccccggcagcagacacagacagaaggccgtggtgagacacaccatccccgaggaggagacccacagaacccaggtgatcacccagaccctgaaccccgtgtgggacgagaccttcatcctggagttcgaggacatcaccaacgccagcttccacctggacatgtgggacctggacaccgtggagagcgtgagacagaagctgggcgagctgaccgacctgcacggcctgagaagaatcttcaaggaggccagaaaggacaagggccaggacgacttcctgggcaacgtggtgctgagactgcaggacctgagatgcagagaggaccagtggtaccccctggagcccagaaccgagacctaccccgacagaggccagtgccacctgcagttccagctgatccacaagagaagagccaccagcgccagcagaagccagcccagctacaccgtgcacctgcacctgctgcagcagctggtgagccacgaggtgacccagcacgaggccggcagcaccagctgggacggcagcctgagcccccaggccgccaccgtgctgttcctgcacgccacccagaaggacctgagcgacttccaccagagcatggcccagtggctggcctacagcagactgtaccagagcctggagttccccagcagctgcctgctgcaccccatcaccagcatcgagtaccagtggatccagggcagactgaaggccgagcagcaggaggagctggccgccagcttcagcagcctgctgacctacggcctgagcctgatcagaagattcagaagcgtgttccccctgagcgtgagcgacagccccgccagactgcagagcctgctgagagtgctggtgcagatgtgcaagatgaaggccttcggcgagctgtgccccaacaccgcccccctgccccagctggtgaccgaggccctgcagaccggcaccaccgagtggttccacctgaagcagcagcaccaccagcccatggtgcagggcatccccgaggccggcaaggccctgctgggcctggtgcaggacgtgatcggcgacctgcaccagtgccagagaacctgggacaagatcttccacaacaccctgaagatccacctgttcagcatggccttcagagagctgcagtggctggtggccaagagagtgcaggaccacaccaccgtggtgggcgacgtggtgagccccgagatgggcgagagcctgttccagctgtacatcagcctgaaggagctgtgccagctgagaatgagcagcagcgagagagacggcgtgctggccctggacaacttccacagatggttccagcccgccatccccagctggctgcagaagacctacaacgaggccctggccagagtgcagagagccgtgcagatggacgagctggtgcccctgggcgagctgaccaagcacagcaccagcgccgtggacctgagcacctgcttcgcccagatcagccacaccgccagacagctggactggcccgaccccgaggaggccttcatgatcaccgtgaagttcgtggaggacacctgcagactggccctggtgtactgcagcctgatcaaggccagagccagagagctgagcagcggccagaaggaccagggccaggccgccaacatgctgtgcgtggtggtgaacgacatggagcagctgagactggtgatcggcaagctgcccgcccagctggcctgggaggccctggagcagagagtgggcgccgtgctggagcagggccagctgcagaacaccctgcacgcccagctgcagagcgccctggccggcctgggccacgagatcagaaccggcgtgagaaccctggccgagcagctggaggtgggcatcgccaagcacatccagaagctggtgggcgtgagagagagcgtgctgcccgaggacgccatcctgcccctgatgaagttcctggaggtggagctgtgctacatgaacaccaacctggtgcaggagaacttcagcagcctgctgaccctgctgtggacccacaccctgaccgtgctggtggaggccgccgccagccagagaagcagcagcctggccagcaacagactgaagatcgccctgcagaacctggagatctgcttccacgccgagggctgcggcctgccccccaagaccctgcccctgcccgccagccagaagagctgctgcggcggccagggcatcggccccagcgtgagctggccctggcccatctgcctgctggccttcctgttccagcccctgggctggggccccggcagcctgggccccggcctgcaggcccagagcctgctggagaagggcgagggcaccctgcccaagatgagactgcagctgccctggggcgagggcggcggccactactag

SEQ ID NO: 104682 - DNA, 2790 bp, synthetic construct
  misc_feature 1..2790: note = Description of Artificial Sequence: Synthetic coding sequence
  source 1..2790: mol_type = other DNA
atgaccgccagcagcgtggagcagctgagaaaggagggcaacgagctgttcaagtgcggcgactacggcggcgccctggccgcctacacccaggccctgggcctggacgccaccccccaggaccaggccgtgctgcacagaaacagagccgcctgccacctgaagctggaggactacgacaaggccgagaccgaggccagcaaggccatcgagaaggacggcggcgacgtgaaggccctgtacagaagaagccaggccctggagaagctgggcagactggaccaggccgtgctggacctgcagagatgcgtgagcctggagcccaagaacaaggtgttccaggaggccctgagaaacatcggcggccagatccaggagaaggtgagatacatgagcagcaccgacgccaaggtggagcagatgttccagatcctgctggaccccgaggagaagggcaccgagaagaagcagaaggccagccagaacctggtggtgctggccagagaggacgccggcgccgagaagatcttcagaagcaacggcgtgcagctgctgcagagactgctggacatgggcgagaccgacctgatgctggccgccctgagaaccctggtgggcatctgcagcgagcaccagagcagaaccgtggccaccctgagcatcctgggcaccagaagagtggtgagcatcctgggcgtggagagccaggccgtgagcctggccgcctgccacctgctgcaggtgatgttcgacgccctgaaggagggcgtgaagaagggcttcagaggcaaggagggcgccatcatcgtggaccccgccagagagctgaaggtgctgatcagcaacctgctggacctgctgaccgaggtgggcgtgagcggccagggcagagacaacgccctgaccctgctgatcaaggccgtgcccagaaagagcctgaaggaccccaacaacagcctgaccctgtgggtgatcgaccagggcctgaagaagatcctggaggtgggcggcagcctgcaggacccccccggcgagctggccgtgaccgccaacagcagaatgagcgccagcatcctgctgagcaagctgttcgacgacctgaagtgcgacgccgagagagagaacttccacagactgtgcgagaactacatcaagagctggttcgagggccagggcctggccggcaagctgagagccatccagaccgtgagctgcctgctgcagggcccctgcgacgccggcaacagagccctggagctgagcggcgtgatggagagcgtgatcgccctgtgcgccagcgagcaggaggaggagcagctggtggccgtggaggccctgatccacgccgccggcaaggccaagagagccagcttcatcaccgccaacggcgtgagcctgctgaaggacctgtacaagtgcagcgagaaggacagcatcagaatcagagccctggtgggcctgtgcaagctgggcagcgccggcggcaccgacttcagcatgaagcagttcgccgagggcagcaccctgaagctggccaagcagtgcagaaagtggctgtgcaacgaccagatcgacgccggcaccagaagatgggccgtggagggcctggcctacctgaccttcgacgccgacgtgaaggaggagttcgtggaggacgccgccgccctgaaggccctgttccagctgagcagactggaggagagaagcgtgctgttcgccgtggccagcgccctggtgaactgcaccaacagctacgactacgaggagcccgaccccaagatggtggagctggccaagtacgccaagcagcacgtgcccgagcagcaccccaaggacaagcccagcttcgtgagagccagagtgaagaagctgctggccgccggcgtggtgagcgccatggtgtgcatggtgaagaccgagagccccgtgctgaccagcagctgcagagagctgctgagcagagtgttcctggccctggtggaggaggtggaggacagaggcaccgtggtggcccagggcggcggcagagccctgatccccctggccctggagggcaccgacgtgggccagaccaaggccgcccaggccctggccaagctgaccatcaccagcaaccccgagatgaccttccccggcgagagaatctacgaggtggtgagacccctggtgagcctgctgcacctgaactgcagcggcctgcagaacttcgaggccctgatggccctgaccaacctggccggcatcagcgagagactgagacagaagatcctgaaggagaaggccgtgcccatgatcgagggctacatgttcgaggagcacgagatgatcagaagagccgccaccgagtgcatgtgcaacctggccatgagcaaggaggtgcaggacctgttcgaggcccagggcaacgacagactgaagctgctggtgctgtacagcggcgaggacgacgagctgctgcagagagccgccgccggcggcctggccatgctgaccagcatgagacccaccctgtgcagcagaatcccccaggtgaccacccactggctggagatcctgcaggccctgctgctgagcagcaaccaggagctgcagcacagaggcgccgtggtggtgctgaacatggtggaggccagcagagagatcgccagcaccctgatggagagcgagatgatggagatcctgagcgtgctggccaagggcgaccacagccccgtgaccagagccgccgccgcctgcctggacaaggccgtggagtacggcctgatccagcccaaccaggacggcgagtag

SEQ ID NO: 104683 - DNA, 2835 bp, synthetic construct
  misc_feature 1..2835: note = Description of Artificial Sequence: Synthetic coding sequence
  source 1..2835: mol_type = other DNA
atgaccgtgagcggccccggcacccccgagcccagacccgccacccccggcgccagcagcgtggagcagctgagaaaggagggcaacgagctgttcaagtgcggcgactacggcggcgccctggccgcctacacccaggccctgggcctggacgccaccccccaggaccaggccgtgctgcacagaaacagagccgcctgccacctgaagctggaggactacgacaaggccgagaccgaggccagcaaggccatcgagaaggacggcggcgacgtgaaggccctgtacagaagaagccaggccctggagaagctgggcagactggaccaggccgtgctggacctgcagagatgcgtgagcctggagcccaagaacaaggtgttccaggaggccctgagaaacatcggcggccagatccaggagaaggtgagatacatgagcagcaccgacgccaaggtggagcagatgttccagatcctgctggaccccgaggagaagggcaccgagaagaagcagaaggccagccagaacctggtggtgctggccagagaggacgccggcgccgagaagatcttcagaagcaacggcgtgcagctgctgcagagactgctggacatgggcgagaccgacctgatgctggccgccctgagaaccctggtgggcatctgcagcgagcaccagagcagaaccgtggccaccctgagcatcctgggcaccagaagagtggtgagcatcctgggcgtggagagccaggccgtgagcctggccgcctgccacctgctgcaggtgatgttcgacgccctgaaggagggcgtgaagaagggcttcagaggcaaggagggcgccatcatcgtggaccccgccagagagctgaaggtgctgatcagcaacctgctggacctgctgaccgaggtgggcgtgagcggccagggcagagacaacgccctgaccctgctgatcaaggccgtgcccagaaagagcctgaaggaccccaacaacagcctgaccctgtgggtgatcgaccagggcctgaagaagatcctggaggtgggcggcagcctgcaggacccccccggcgagctggccgtgaccgccaacagcagaatgagcgccagcatcctgctgagcaagctgttcgacgacctgaagtgcgacgccgagagagagaacttccacagactgtgcgagaactacatcaagagctggttcgagggccagggcctggccggcaagctgagagccatccagaccgtgagctgcctgctgcagggcccctgcgacgccggcaacagagccctggagctgagcggcgtgatggagagcgtgatcgccctgtgcgccagcgagcaggaggaggagcagctggtggccgtggaggccctgatccacgccgccggcaaggccaagagagccagcttcatcaccgccaacggcgtgagcctgctgaaggacctgtacaagtgcagcgagaaggacagcatcagaatcagagccctggtgggcctgtgcaagctgggcagcgccggcggcaccgacttcagcatgaagcagttcgccgagggcagcaccctgaagctggccaagcagtgcagaaagtggctgtgcaacgaccagatcgacgccggcaccagaagatgggccgtggagggcctggcctacctgaccttcgacgccgacgtgaaggaggagttcgtggaggacgccgccgccctgaaggccctgttccagctgagcagactggaggagagaagcgtgctgttcgccgtggccagcgccctggtgaactgcaccaacagctacgactacgaggagcccgaccccaagatggtggagctggccaagtacgccaagcagcacgtgcccgagcagcaccccaaggacaagcccagcttcgtgagagccagagtgaagaagctgctggccgccggcgtggtgagcgccatggtgtgcatggtgaagaccgagagccccgtgctgaccagcagctgcagagagctgctgagcagagtgttcctggccctggtggaggaggtggaggacagaggcaccgtggtggcccagggcggcggcagagccctgatccccctggccctggagggcaccgacgtgggccagaccaaggccgcccaggccctggccaagctgaccatcaccagcaaccccgagatgaccttccccggcgagagaatctacgaggtggtgagacccctggtgagcctgctgcacctgaactgcagcggcctgcagaacttcgaggccctgatggccctgaccaacctggccggcatcagcgagagactgagacagaagatcctgaaggagaaggccgtgcccatgatcgagggctacatgttcgaggagcacgagatgatcagaagagccgccaccgagtgcatgtgcaacctggccatgagcaaggaggtgcaggacctgttcgaggcccagggcaacgacagactgaagctgctggtgctgtacagcggcgaggacgacgagctgctgcagagagccgccgccggcggcctggccatgctgaccagcatgagacccaccctgtgcagcagaatcccccaggtgaccacccactggctggagatcctgcaggccctgctgctgagcagcaaccaggagctgcagcacagaggcgccgtggtggtgctgaacatggtggaggccagcagagagatcgccagcaccctgatggagagcgagatgatggagatcctgagcgtgctggccaagggcgaccacagccccgtgaccagagccgccgccgcctgcctggacaaggccgtggagtacggcctgatccagcccaaccaggacggcgagtag

SEQ ID NO: 104684 - DNA, 2409 bp, synthetic construct
  misc_feature 1..2409: note = Description of Artificial Sequence: Synthetic coding sequence
  source 1..2409: mol_type = other DNA
atggccggcaccagcgagagaagcctgatcagcagcatcagccagcccaaggccatcgagtgcttcgaggtgaagaagaaggccttcctgacccacggcagataccacggcagcggcgccaccccccccaagaccaaggaccccaagcccgagaccttctgcggccagaccggcctgcccaccatggaggtgagaatcaacgtgagcagacagcaggtggagaaggtgttcggcctggaggagtactggtgccagtgcgtggcctggagcagcagcggcaccaccaagagccagaaggcctacatcagaatcgcctacctgagaaagaacttcgagcaggagcccctggccaaggaggtgagcctggagcagggcatcgtgctgccctgcagaccccccgagggcatcccccccgccgaggtggagtggctgagaaacgaggacctggtggaccccagcctggaccccaacgtgtacatcaccagagagcacagcctggtggtgagacaggccagactggccgacaccgccaactacacctgcgtggccaagaacatcgtggccagaagaagaagcgccagcgccgccgtgatcgtgtacgtggacggcagctggagcccctggagcaagtggagcgcctgcggcctggactgcacccactggagaagcagagagtgcagcgaccccgcccccagaaacggcggcgaggagtgccagggcaccgacctggacaccagaaactgcaccagcgacctgtgcgtgcacaccgccagcggccccgaggacgtggccctgtacgtgggcctgatcgccgtggccgtgtgcctggtgctgctgctgctggtgctgatcctggtgtactgcagaaagaaggagggcctggacagcgacgtggccgacagcagcatcctgaccagcggcttccagcccgtgagcatcaagcccagcaaggccgacaacccccacctgctgaccatccagcccgacctgagcaccaccaccaccacctaccagggcagcctgtgccccagacaggacggccccagccccaagttccagctgaccaacggccacctgctgagccccctgggcggcggcagacacaccctgcaccacagcagccccaccagcgaggccgaggagttcgtgagcagactgagcacccagaactacttcagaagcctgcccagaggcaccagcaacatgacctacggcaccttcaacttcctgggcggcagactgatgatccccaacaccggcatcagcctgctgatcccccccgacgccatccccagaggcaagatctacgagatctacctgaccctgcacaagcccgaggacgtgagactgcccctggccggctgccagaccctgctgagccccatcgtgagctgcggcccccccggcgtgctgctgaccagacccgtgatcctggccatggaccactgcggcgagcccagccccgacagctggagcctgagactgaagaagcagagctgcgagggcagctgggaggacgtgctgcacctgggcgaggaggcccccagccacctgtactactgccagctggaggccagcgcctgctacgtgttcaccgagcagctgggcagattcgccctggtgggcgaggccctgagcgtggccgccgccaagagactgaagctgctgctgttcgcccccgtggcctgcaccagcctggagtacaacatcagagtgtactgcctgcacgacacccacgacgccctgaaggaggtggtgcagctggagaagcagctgggcggccagctgatccaggagcccagagtgctgcacttcaaggacagctaccacaacctgagactgagcatccacgacgtgcccagcagcctgtggaagagcaagctgctggtgagctaccaggagatccccttctaccacatctggaacggcacccagagatacctgcactgcaccttcaccctggagagagtgagccccagcaccagcgacctggcctgcaagctgtgggtgtggcaggtggagggcgacggccagagcttcagcatcaacttcaacatcaccaaggacaccagattcgccgagctgctggccctggagagcgaggccggcgtgcccgccctggtgggccccagcgccttcaagatccccttcctgatcagacagaagatcatcagcagcctggaccccccctgcagaagaggcgccgactggagaaccctggcccagaagctgcacctggacagccacctgagcttcttcgccagcaagcccagccccaccgccatgatcctgaacctgtgggaggccagacacttccccaacggcaacctgagccagctggccgccgccgtggccggcctgggccagcccgacgccggcctgttcaccgtgagcgaggccgagtgctag

SEQ ID NO: 104685 - DNA, 2529 bp, synthetic construct
  misc_feature 1..2529: note = Description of Artificial Sequence: Synthetic coding sequence
  source 1..2529: mol_type = other DNA
atggccgtgagacccggcctgtggcccgccctgctgggcatcgtgctggccgcctggctgagaggcagcggcgcccagcagagcgccaccgtggccaaccccgtgcccggcgccaaccccgacctgctgccccacttcctggtggagcccgaggacgtgtacatcgtgaagaacaagcccgtgctgctggtgtgcaaggccgtgcccgccacccagatcttcttcaagtgcaacggcgagtgggtgagacaggtggaccacgtgatcgagagaagcaccgacggcagcagcggcctgcccaccatggaggtgagaatcaacgtgagcagacagcaggtggagaaggtgttcggcctggaggagtactggtgccagtgcgtggcctggagcagcagcggcaccaccaagagccagaaggcctacatcagaatcgcctacctgagaaagaacttcgagcaggagcccctggccaaggaggtgagcctggagcagggcatcgtgctgccctgcagaccccccgagggcatcccccccgccgaggtggagtggctgagaaacgaggacctggtggaccccagcctggaccccaacgtgtacatcaccagagagcacagcctggtggtgagacaggccagactggccgacaccgccaactacacctgcgtggccaagaacatcgtggccagaagaagaagcgccagcgccgccgtgatcgtgtacgtggacggcagctggagcccctggagcaagtggagcgcctgcggcctggactgcacccactggagaagcagagagtgcagcgaccccgcccccagaaacggcggcgaggagtgccagggcaccgacctggacaccagaaactgcaccagcgacctgtgcgtgcacaccgccagcggccccgaggacgtggccctgtacgtgggcctgatcgccgtggccgtgtgcctggtgctgctgctgctggtgctgatcctggtgtactgcagaaagaaggagggcctggacagcgacgtggccgacagcagcatcctgaccagcggcttccagcccgtgagcatcaagcccagcaaggccgacaacccccacctgctgaccatccagcccgacctgagcaccaccaccaccacctaccagggcagcctgtgccccagacaggacggccccagccccaagttccagctgaccaacggccacctgctgagccccctgggcggcggcagacacaccctgcaccacagcagccccaccagcgaggccgaggagttcgtgagcagactgagcacccagaactacttcagaagcctgcccagaggcaccagcaacatgacctacggcaccttcaacttcctgggcggcagactgatgatccccaacaccggcatcagcctgctgatcccccccgacgccatccccagaggcaagatctacgagatctacctgaccctgcacaagcccgaggacgtgagactgcccctggccggctgccagaccctgctgagccccatcgtgagctgcggcccccccggcgtgctgctgaccagacccgtgatcctggccatggaccactgcggcgagcccagccccgacagctggagcctgagactgaagaagcagagctgcgagggcagctgggaggacgtgctgcacctgggcgaggaggcccccagccacctgtactactgccagctggaggccagcgcctgctacgtgttcaccgagcagctgggcagattcgccctggtgggcgaggccctgagcgtggccgccgccaagagactgaagctgctgctgttcgcccccgtggcctgcaccagcctggagtacaacatcagagtgtactgcctgcacgacacccacgacgccctgaaggaggtggtgcagctggagaagcagctgggcggccagctgatccaggagcccagagtgctgcacttcaaggacagctaccacaacctgagactgagcatccacgacgtgcccagcagcctgtggaagagcaagctgctggtgagctaccaggagatccccttctaccacatctggaacggcacccagagatacctgcactgcaccttcaccctggagagagtgagccccagcaccagcgacctggcctgcaagctgtgggtgtggcaggtggagggcgacggccagagcttcagcatcaacttcaacatcaccaaggacaccagattcgccgagctgctggccctggagagcgaggccggcgtgcccgccctggtgggccccagcgccttcaagatccccttcctgatcagacagaagatcatcagcagcctggaccccccctgcagaagaggcgccgactggagaaccctggcccagaagctgcacctggacagccacctgagcttcttcgccagcaagcccagccccaccgccatgatcctgaacctgtgggaggccagacacttccccaacggcaacctgagccagctggccgccgccgtggccggcctgggccagcccgacgccggcctgttcaccgtgagcgaggccgagtgctag

SEQ ID NO: 104686 - DNA, 2838 bp, synthetic construct
  misc_feature 1..2838: note = Description of Artificial Sequence: Synthetic coding sequence
  source 1..2838: mol_type = other DNA
atgggcgccagaagcggcgccagaggcgccctgctgctggccctgctgctgtgctgggaccccagactgagccaggccggcaccgacagcggcagcgaggtgctgcccgacagcttccccagcgcccccgccgagcccctgccctacttcctgcaggagccccaggacgcctacatcgtgaagaacaagcccgtggagctgagatgcagagccttccccgccacccagatctacttcaagtgcaacggcgagtgggtgagccagaacgaccacgtgacccaggagggcctggacgaggccaccggcctgagagtgagagaggtgcagatcgaggtgagcagacagcaggtggaggagctgttcggcctggaggactactggtgccagtgcgtggcctggagcagcgccggcaccaccaagagcagaagagcctacgtgagaatcgcctacctgagaaagaacttcgaccaggagcccctgggcaaggaggtgcccctggaccacgaggtgctgctgcagtgcagaccccccgagggcgtgcccgtggccgaggtggagtggctgaagaacgaggacgtgatcgaccccacccaggacaccaacttcctgctgaccatcgaccacaacctgatcatcagacaggccagactgagcgacaccgccaactacacctgcgtggccaagaacatcgtggccaagagaagaagcaccaccgccaccgtgatcgtgtacgtgaacggcggctggagcagctgggccgagtggagcccctgcagcaacagatgcggcagaggctggcagaagagaaccagaacctgcaccaaccccgcccccctgaacggcggcgccttctgcgagggccaggccttccagaagaccgcctgcaccaccatctgccccgtggacggcgcctggaccgagtggagcaagtggagcgcctgcagcaccgagtgcgcccactggagaagcagagagtgcatggccccccccccccagaacggcggcagagactgcagcggcaccctgctggacagcaagaactgcaccgacggcctgtgcatgcagaacaagaagaccctgagcgaccccaacagccacctgctggaggccagcggcgacgccgccctgtacgccggcctggtggtggccatcttcgtggtggtggccatcctgatggccgtgggcgtggtggtgtacagaagaaactgcagagacttcgacaccgacatcaccgacagcagcgccgccctgaccggcggcttccaccccgtgaacttcaagaccgccagacccagcaacccccagctgctgcaccccagcgtgccccccgacctgaccgccagcgccggcatctacagaggccccgtgtacgccctgcaggacagcaccgacaagatccccatgaccaacagccccctgctggaccccctgcccagcctgaaggtgaaggtgtacagcagcagcaccaccggcagcggccccggcctggccgacggcgccgacctgctgggcgtgctgccccccggcacctaccccagcgacttcgccagagacacccacttcctgcacctgagaagcgccagcctgggcagccagcagctgctgggcctgcccagagaccccggcagcagcgtgagcggcaccttcggctgcctgggcggcagactgagcatccccggcaccggcgtgagcctgctggtgcccaacggcgccatcccccagggcaagttctacgagatgtacctgctgatcaacaaggccgagagcaccctgcccctgagcgagggcacccagaccgtgctgagccccagcgtgacctgcggccccaccggcctgctgctgtgcagacccgtgatcctgaccatgccccactgcgccgaggtgagcgccagagactggatcttccagctgaagacccaggcccaccagggccactgggaggaggtggtgaccctggacgaggagaccctgaacaccccctgctactgccagctggagcccagagcctgccacatcctgctggaccagctgggcacctacgtgttcaccggcgagagctacagcagaagcgccgtgaagagactgcagctggccgtgttcgcccccgccctgtgcaccagcctggagtacagcctgagagtgtactgcctggaggacacccccgtggccctgaaggaggtgctggagctggagagaaccctgggcggctacctggtggaggagcccaagcccctgatgttcaaggacagctaccacaacctgagactgagcctgcacgacctgccccacgcccactggagaagcaagctgctggccaagtaccaggagatccccttctaccacatctggagcggcagccagaaggccctgcactgcaccttcaccctggagagacacagcctggccagcaccgagctgacctgcaagatctgcgtgagacaggtggagggcgagggccagatcttccagctgcacaccaccctggccgagacccccgccggcagcctggacaccctgtgcagcgcccccggcagcaccgtgaccacccagctgggcccctacgccttcaagatccccctgagcatcagacagaagatctgcaacagcctggacgcccccaacagcagaggcaacgactggagaatgctggcccagaagctgagcatggacagatacctgaactacttcgccaccaaggccagccccaccggcgtgatcctggacctgtgggaggccctgcagcaggacgacggcgacctgaacagcctggccagcgccctggaggagatgggcaagagcgagatgctggtggccgtggccaccgacggcgactgctag

SEQ ID NO: 104687 - DNA, 2805 bp, synthetic construct
  misc_feature 1..2805: note = Description of Artificial Sequence: Synthetic coding sequence
  source 1..2805: mol_type = other DNA
atgggcgccagaagcggcgccagaggcgccctgctgctggccctgctgctgtgctgggaccccagactgagccaggccggcaccgacagcggcagcgaggtgctgcccgacagcttccccagcgcccccgccgagcccctgccctacttcctgcaggagccccaggacgcctacatcgtgaagaacaagcccgtggagctgagatgcagagccttccccgccacccagatctacttcaagtgcaacggcgagtgggtgagccagaacgaccacgtgacccaggagggcctggacgaggccaccggcctgagagtgagagaggtgcagatcgaggtgagcagacagcaggtggaggagctgttcggcctggaggactactggtgccagtgcgtggcctggagcagcgccggcaccaccaagagcagaagagcctacgtgagaatcgcctacctgagaaagaacttcgaccaggagcccctgggcaaggaggtgcccctggaccacgaggtgctgctgcagtgcagaccccccgagggcgtgcccgtggccgaggtggagtggctgaagaacgaggacgtgatcgaccccacccaggacaccaacttcctgctgaccatcgaccacaacctgatcatcagacaggccagactgagcgacaccgccaactacacctgcgtggccaagaacatcgtggccaagagaagaagcaccaccgccaccgtgatcgtgtacgtgaacggcggctggagcagctgggccgagtggagcccctgcagcaacagatgcggcagaggctggcagaagagaaccagaacctgcaccaaccccgcccccctgaacggcggcgccttctgcgagggccaggccttccagaagaccgcctgcaccaccatctgccccgtggacggcgcctggaccgagtggagcaagtggagcgcctgcagcaccgagtgcgcccactggagaagcagagagtgcatggccccccccccccagaacggcggcagagactgcagcggcaccctgctggacagcaagaactgcaccgacggcctgtgcatgcagatgctggaggccagcggcgacgccgccctgtacgccggcctggtggtggccatcttcgtggtggtggccatcctgatggccgtgggcgtggtggtgtacagaagaaactgcagagacttcgacaccgacatcaccgacagcagcgccgccctgaccggcggcttccaccccgtgaacttcaagaccgccagacccagcaacccccagctgctgcaccccagcgtgccccccgacctgaccgccagcgccggcatctacagaggccccgtgtacgccctgcaggacagcaccgacaagatccccatgaccaacagccccctgctggaccccctgcccagcctgaaggtgaaggtgtacagcagcagcaccaccggcagcggccccggcctggccgacggcgccgacctgctgggcgtgctgccccccggcacctaccccagcgacttcgccagagacacccacttcctgcacctgagaagcgccagcctgggcagccagcagctgctgggcctgcccagagaccccggcagcagcgtgagcggcaccttcggctgcctgggcggcagactgagcatccccggcaccggcgtgagcctgctggtgcccaacggcgccatcccccagggcaagttctacgagatgtacctgctgatcaacaaggccgagagcaccctgcccctgagcgagggcacccagaccgtgctgagccccagcgtgacctgcggccccaccggcctgctgctgtgcagacccgtgatcctgaccatgccccactgcgccgaggtgagcgccagagactggatcttccagctgaagacccaggcccaccagggccactgggaggaggtggtgaccctggacgaggagaccctgaacaccccctgctactgccagctggagcccagagcctgccacatcctgctggaccagctgggcacctacgtgttcaccggcgagagctacagcagaagcgccgtgaagagactgcagctggccgtgttcgcccccgccctgtgcaccagcctggagtacagcctgagagtgtactgcctggaggacacccccgtggccctgaaggaggtgctggagctggagagaaccctgggcggctacctggtggaggagcccaagcccctgatgttcaaggacagctaccacaacctgagactgagcctgcacgacctgccccacgcccactggagaagcaagctgctggccaagtaccaggagatccccttctaccacatctggagcggcagccagaaggccctgcactgcaccttcaccctggagagacacagcctggccagcaccgagctgacctgcaagatctgcgtgagacaggtggagggcgagggccagatcttccagctgcacaccaccctggccgagacccccgccggcagcctggacaccctgtgcagcgcccccggcagcaccgtgaccacccagctgggcccctacgccttcaagatccccctgagcatcagacagaagatctgcaacagcctggacgcccccaacagcagaggcaacgactggagaatgctggcccagaagctgagcatggacagatacctgaactacttcgccaccaaggccagccccaccggcgtgatcctggacctgtgggaggccctgcagcaggacgacggcgacctgaacagcctggccagcgccctggaggagatgggcaagagcgagatgctggtggccgtggccaccgacggcgactgctag

SEQ ID NO: 104688 - DNA, 2673 bp, synthetic construct
  misc_feature 1..2673: note = Description of Artificial Sequence: Synthetic coding sequence
  source 1..2673: mol_type = other DNA
gacgacgacttcttccacgagctgcccgagaccttccccagcgacccccccgagcccctgccccacttcctgatcgagcccgaggaggcctacatcgtgaagaacaagcccgtgaacctgtactgcaaggccagccccgccacccagatctacttcaagtgcaacagcgagtgggtgcaccagaaggaccacatcgtggacgagagagtggacgagaccagcggcctgatcgtgagagaggtgagcatcgagatcagcagacagcaggtggaggagctgttcggccccgaggactactggtgccagtgcgtggcctggagcagcgccggcaccaccaagagcagaaaggcctacgtgagaatcgcctacctgagaaagaccttcgagcaggagcccctgggcaaggaggtgagcctggagcaggaggtgctgctgcagtgcagaccccccgagggcatccccgtggccgaggtggagtggctgaagaacgaggacatcatcgaccccgtggaggacagaaacttctacatcaccatcgaccacaacctgatcatcaagcaggccagactgagcgacaccgccaactacacctgcgtggccaagaacatcgtggccaagagaaagagcaccaccgccaccgtgatcgtgtacgtgaacggcggctggagcacctggaccgagtggagcgtgtgcaacagcagatgcggcagaggctaccagaagagaaccagaacctgcaccaaccccgcccccctgaacggcggcgccttctgcgagggccagagcgtgcagaagatcgcctgcaccaccctgtgccccgtggacggcagatggaccccctggagcaagtggagcacctgcggcaccgagtgcacccactggagaagaagagagtgcaccgcccccgcccccaagaacggcggcaaggactgcgacggcctggtgctgcagagcaagaactgcaccgacggcctgtgcatgcagaccgcccccgacagcgacgacgtggccctgtacgtgggcatcgtgatcgccgtgatcgtgtgcctggccatcagcgtggtggtggccctgttcgtgtacagaaagaaccacagagacttcgagagcgacatcatcgacagcagcgccctgaacggcggcttccagcccgtgaacatcaaggccgccagacaggacctgctggccgtgccccccgacctgaccagcgccgccgccatgtacagaggccccgtgtacgccctgcacgacgtgagcgacaagatccccatgaccaacagccccatcctggaccccctgcccaacctgaagatcaaggtgtacaacaccagcggcgccgtgaccccccaggacgacctgagcgagttcaccagcaagctgagcccccagatgacccagagcctgctggagaacgaggccctgagcctgaagaaccagagcctggccagacagaccgaccccagctgcaccgccttcggcagcttcaacagcctgggcggccacctgatcgtgcccaacagcggcgtgagcctgctgatccccgccggcgccatcccccagggcagagtgtacgagatgtacgtgaccgtgcacagaaaggagaccatgagaccccccatggacgacagccagaccctgctgacccccgtggtgagctgcggcccccccggcgccctgctgaccagacccgtggtgctgaccatgcaccactgcgccgaccccaacaccgaggactggaagatcctgctgaagaaccaggccgcccagggccagtgggaggacgtggtggtggtgggcgaggagaacttcaccaccccctgctacatccagctggacgccgaggcctgccacatcctgaccgagaacctgagcacctacgccctggtgggccacagcaccaccaaggccgccgccaagagactgaagctggccatcttcggccccctgtgctgcagcagcctggagtacagcatcagagtgtactgcctggacgacacccaggacgccctgaaggagatcctgcacctggagagacagatgggcggccagctgctggaggagcccaaggccctgcacttcaagggcagcacccacaacctgagactgagcatccacgacatcgcccacagcctgtggaagagcaagctgctggccaagtaccaggagatccccttctaccacgtgtggagcggcagccagagaaacctgcactgcaccttcaccctggagagattcagcctgaacaccgtggagctggtgtgcaagctgtgcgtgagacaggtggagggcgagggccagatcttccagctgaactgcaccgtgagcgaggagcccaccggcatcgacctgcccctgctggaccccgccaacaccatcaccaccgtgaccggccccagcgccttcagcatccccctgcccatcagacagaagctgtgcagcagcctggacgccccccagaccagaggccacgactggagaatgctggcccacaagctgaacctggacagatacctgaactacttcgccaccaagagcagccccaccggcgtgatcctggacctgtgggaggcccagaacttccccgacggcaacctgagcatgctggccgccgtgctggaggagatgggcagacacgagaccgtggtgagcctggccgccgagggccagtactag

SEQ ID NO: 104689 - DNA, 2796 bp, synthetic construct
  misc_feature 1..2796: note = Description of Artificial Sequence: Synthetic coding sequence
  source 1..2796: mol_type = other DNA
atgagaaagggcctgagagccaccgccgccagatgcggcctgggcctgggctacctgctgcagatgctggtgctgcccgccctggccctgctgagcgccagcggcaccggcagcgccgcccaggacgacgacttcttccacgagctgcccgagaccttccccagcgacccccccgagcccctgccccacttcctgatcgagcccgaggaggcctacatcgtgaagaacaagcccgtgaacctgtactgcaaggccagccccgccacccagatctacttcaagtgcaacagcgagtgggtgcaccagaaggaccacatcgtggacgagagagtggacgagaccagcggcctgatcgtgagagaggtgagcatcgagatcagcagacagcaggtggaggagctgttcggccccgaggactactggtgccagtgcgtggcctggagcagcgccggcaccaccaagagcagaaaggcctacgtgagaatcgcctacctgagaaagaccttcgagcaggagcccctgggcaaggaggtgagcctggagcaggaggtgctgctgcagtgcagaccccccgagggcatccccgtggccgaggtggagtggctgaagaacgaggacatcatcgaccccgtggaggacagaaacttctacatcaccatcgaccacaacctgatcatcaagcaggccagactgagcgacaccgccaactacacctgcgtggccaagaacatcgtggccaagagaaagagcaccaccgccaccgtgatcgtgtacgtgaacggcggctggagcacctggaccgagtggagcgtgtgcaacagcagatgcggcagaggctaccagaagagaaccagaacctgcaccaaccccgcccccctgaacggcggcgccttctgcgagggccagagcgtgcagaagatcgcctgcaccaccctgtgccccgtggacggcagatggaccccctggagcaagtggagcacctgcggcaccgagtgcacccactggagaagaagagagtgcaccgcccccgcccccaagaacggcggcaaggactgcgacggcctggtgctgcagagcaagaactgcaccgacggcctgtgcatgcagaccgcccccgacagcgacgacgtggccctgtacgtgggcatcgtgatcgccgtgatcgtgtgcctggccatcagcgtggtggtggccctgttcgtgtacagaaagaaccacagagacttcgagagcgacatcatcgacagcagcgccctgaacggcggcttccagcccgtgaacatcaaggccgccagacaggacctgctggccgtgccccccgacctgaccagcgccgccgccatgtacagaggccccgtgtacgccctgcacgacgtgagcgacaagatccccatgaccaacagccccatcctggaccccctgcccaacctgaagatcaaggtgtacaacaccagcggcgccgtgaccccccaggacgacctgagcgagttcaccagcaagctgagcccccagatgacccagagcctgctggagaacgaggccctgagcctgaagaaccagagcctggccagacagaccgaccccagctgcaccgccttcggcagcttcaacagcctgggcggccacctgatcgtgcccaacagcggcgtgagcctgctgatccccgccggcgccatcccccagggcagagtgtacgagatgtacgtgaccgtgcacagaaaggagaccatgagaccccccatggacgacagccagaccctgctgacccccgtggtgagctgcggcccccccggcgccctgctgaccagacccgtggtgctgaccatgcaccactgcgccgaccccaacaccgaggactggaagatcctgctgaagaaccaggccgcccagggccagtgggaggacgtggtggtggtgggcgaggagaacttcaccaccccctgctacatccagctggacgccgaggcctgccacatcctgaccgagaacctgagcacctacgccctggtgggccacagcaccaccaaggccgccgccaagagactgaagctggccatcttcggccccctgtgctgcagcagcctggagtacagcatcagagtgtactgcctggacgacacccaggacgccctgaaggagatcctgcacctggagagacagatgggcggccagctgctggaggagcccaaggccctgcacttcaagggcagcacccacaacctgagactgagcatccacgacatcgcccacagcctgtggaagagcaagctgctggccaagtaccaggagatccccttctaccacgtgtggagcggcagccagagaaacctgcactgcaccttcaccctggagagattcagcctgaacaccgtggagctggtgtgcaagctgtgcgtgagacaggtggagggcgagggccagatcttccagctgaactgcaccgtgagcgaggagcccaccggcatcgacctgcccctgctggaccccgccaacaccatcaccaccgtgaccggccccagcgccttcagcatccccctgcccatcagacagaagctgtgcagcagcctggacgccccccagaccagaggccacgactggagaatgctggcccacaagctgaacctggacagatacctgaactacttcgccaccaagagcagccccaccggcgtgatcctggacctgtgggaggcccagaacttccccgacggcaacctgagcatgctggccgccgtgctggaggagatgggcagacacgagaccgtggtgagcctggccgccgagggccagtactag

SEQ ID NO: 104690 - DNA, 3153 bp, synthetic construct
  misc_feature 1..3153: note = Description of Artificial Sequence: Synthetic coding sequence
  source 1..3153: mol_type = other DNA
atggagcccggcagaggcggcaccgagaccgtgggcaagttcgagttcagcagaaaggacctgatcggccacggcgccttcgccgtggtgttcaagggcagacacagagagaagcacgacctggaggtggccgtgaagtgcatcaacaagaagaacctggccaagagccagaccctgctgggcaaggagatcaagatcctgaaggagctgaagcacgagaacatcgtggccctgtacgacttccaggagatggccaacagcgtgtacctggtgatggagtactgcaacggcggcgacctggccgactacctgcacgccatgagaaccctgagcgaggacaccatcagactgttcctgcagcagatcgccggcgccatgagactgctgcacagcaagggcatcatccacagagacctgaagccccagaacatcctgctgagcaaccccgccggcagaagagccaaccccaacagcatcagagtgaagatcgccgacttcggcttcgccagatacctgcagagcaacatgatggccgccaccctgtgcggcagccccatgtacatggcccccgaggtgatcatgagccagcactacgacggcaaggccgacctgtggagcatcggcaccatcgtgtaccagtgcctgaccggcaaggcccccttccaggccagcagcccccaggacctgagactgttctacgagaagaacaagaccctggtgcccaccatccccagagagaccagcgcccccctgagacagctgctgctggccctgctgcagagaaaccacaaggacagaatggacttcgacgagttcttccaccaccccttcctggacgccagccccagcgtgagaaagagcccccccgtgcccgtgcccagctaccccagcagcggcagcggcagcagcagcagcagcagcagcaccagccacctggccagcccccccagcctgggcgagatgcagcagctgcagaagaccctggccagccccgccgacaccgccggcttcctgcacagcagcagagacagcggcggcagcaaggacagcagctgcgacaccgacgacttcgtgatggtgcccgcccagttccccggcgacctggtggccgaggcccccagcgccaagcccccccccgacagcctgatgtgcagcggcagcagcctggtggccagcgccggcctggagagccacggcagaacccccagccccagccccccctgcagcagcagccccagccccagcggcagagccggccccttcagcagcagcagatgcggcgccagcgtgcccatccccgtgcccacccaggtgcagaactaccagagaatcgagagaaacctgcagagccccacccagttccagacccccagaagcagcgccatcagaagaagcggcagcaccagccccctgggcttcgccagagccagccccagcccccccgcccacgccgagcacggcggcgtgctggccagaaagatgagcctgggcggcggcagaccctacacccccagcccccaggtgggcaccatccccgagagacccggctggagcggcacccccagcccccagggcgccgagatgagaggcggcagaagccccagacccggcagcagcgcccccgagcacagccccagaaccagcggcctgggctgcagactgcacagcgcccccaacctgagcgacctgcacgtggtgagacccaagctgcccaagccccccaccgaccccctgggcgccgtgttcagccccccccaggccagccccccccagcccagccacggcctgcagagctgcagaaacctgagaggcagccccaagctgcccgacttcctgcagagaaaccccctgccccccatcctgggcagccccaccaaggccgtgcccagcttcgacttccccaagacccccagcagccagaacctgctggccctgctggccagacagggcgtggtgatgaccccccccagaaacagaaccctgcccgacctgagcgaggtgggccccttccacggccagcccctgggccccggcctgagacccggcgaggaccccaagggccccttcggcagaagcttcagcaccagcagactgaccgacctgctgctgaaggccgccttcggcacccaggcccccgaccccggcagcaccgagagcctgcaggagaagcccatggagatcgcccccagcgccggcttcggcggcagcctgcaccccggcgccagagccggcggcaccagcagccccagccccgtggtgttcaccgtgggcagcccccccagcggcagcacccccccccagggccccagaaccagaatgttcagcgccggccccaccggcagcgccagcagcagcgccagacacctggtgcccggcccctgcagcgaggcccccgcccccgagctgcccgcccccggccacggctgcagcttcgccgaccccatcaccgccaacctggagggcgccgtgaccttcgaggcccccgacctgcccgaggagaccctgatggagcaggagcacaccgagatcctgagaggcctgagattcaccctgctgttcgtgcagcacgtgctggagatcgccgccctgaagggcagcgccagcgaggccgccggcggccccgagtaccagctgcaggagagcgtggtggccgaccagatcagcctgctgagcagagagtggggcttcgccgagcagctggtgctgtacctgaaggtggccgagctgctgagcagcggcctgcagagcgccatcgaccagatcagagccggcaagctgtgcctgagcagcaccgtgaagcaggtggtgagaagactgaacgagctgtacaaggccagcgtggtgagctgccagggcctgagcctgagactgcagagattcttcctggacaagcagagactgctggacagaatccacagcatcaccgccgagagactgatcttcagccacgccgtgcagatggtgcagagcgccgccctggacgagatgttccagcacagagagggctgcgtgcccagataccacaaggccctgctgctgctggagggcctgcagcacatgctgagcgaccaggccgacatcgagaacgtgaccaagtgcaagctgtgcatcgagagaagactgagcgccctgctgaccggcatctgcgcctag

SEQ ID NO: 104691 - DNA, 1452 bp, synthetic construct
  misc_feature 1..1452: note = Description of Artificial Sequence: Synthetic coding sequence
  source 1..1452: mol_type = other DNA
atgcagagaaacggcagcgccagcagaggcctggagaagaccagactgagactgtgcagagaggccagaatccccgagagcgccttcctgaccggcctgaccagagagagctgggaggccagatgctggtgcgccaaggacaccagagaggtggtggccatcaagtgcgtggccaagaagagcctgaacaaggccagcgtggagaacctgctgaccgagatcgagatcctgaagggcatcagacacccccacatcgtgcagctgaaggacttccagtgggacagcgacaacatctacctgatcatggagttctgcgccggcggcgacctgagcagattcatccacaccagaagaatcctgcccgagaaggtggccagagtgttcatgcagcagctggccagcgccctgcagttcctgcacgagagaaacatcagccacctggacctgaagccccagaacatcctgctgagcagcctggagaagccccacctgaagctggccgacttcggcttcgcccagcacatgagcccctgggacgagaagcacgtgctgagaggcagccccctgtacatggcccccgagatggtgtgccagagacagtacgacgccagagtggacctgtggagcatgggcgtgatcctgtacgaggccctgttcggccagccccccttcgccagcagaagcttcagcgagctggaggagaagatcagaagcaacagagtgatcgagctgcccctgagacccctgctgagcagagactgcagagacctgctgcagagactgctggagagagaccccagcagaagaatcagcttccaggacttcttcgcccacccctgggtggacctggagcacatgcccagcggcgagagcctgggcagagccaccgccctggtggtgcaggccgtgaagaaggaccaggagggcgacagcgccgccgccctgagcctgtactgcaaggccctggacttcttcgtgcccgccctgcactacgaggtggacgcccagagaaaggaggccatcaaggccaaggtgggccagtacgtgagcagagccgaggagctgaaggccatcgtgagcagcagcaaccaggccctgctgagacagggcaccagcgccagagacctgctgagagagatggccagagacaagcccagactgctggccgccctggaggtggccagcgccgccatggccaaggaggaggccgccggcggcgagcaggacgccctggacctgtaccagcacagcctgggcgagctgctgctgctgctggccgccgagccccccggcagaagaagagagctgctgcacaccgaggtgcagaacctgatggccagagccgagtacctgaaggagcaggtgaagatgagagagagcagatgggaggccgacaccctggacaaggagggcctgagcgagagcgtgagaagcagctgcaccctgcagtag

SEQ ID NO: 104692 - DNA, 1419 bp, synthetic construct
  misc_feature 1..1419: note = Description of Artificial Sequence: Synthetic coding sequence
  source 1..1419: mol_type = other DNA
atggccggccccggctggggcccccccagactggacggcttcatcctgaccgagagactgggcagcggcacctacgccaccgtgtacaaggcctacgccaagaaggacaccagagaggtggtggccatcaagtgcgtggccaagaagagcctgaacaaggccagcgtggagaacctgctgaccgagatcgagatcctgaagggcatcagacacccccacatcgtgcagctgaaggacttccagtgggacagcgacaacatctacctgatcatggagttctgcgccggcggcgacctgagcagattcatccacaccagaagaatcctgcccgagaaggtggccagagtgttcatgcagcagctggccagcgccctgcagttcctgcacgagagaaacatcagccacctggacctgaagccccagaacatcctgctgagcagcctggagaagccccacctgaagctggccgacttcggcttcgcccagcacatgagcccctgggacgagaagcacgtgctgagaggcagccccctgtacatggcccccgagatggtgtgccagagacagtacgacgccagagtggacctgtggagcatgggcgtgatcctgtacgaggccctgttcggccagccccccttcgccagcagaagcttcagcgagctggaggagaagatcagaagcaacagagtgatcgagctgcccctgagacccctgctgagcagagactgcagagacctgctgcagagactgctggagagagaccccagcagaagaatcagcttccaggacttcttcgcccacccctgggtggacctggagcacatgcccagcggcgagagcctgggcagagccaccgccctggtggtgcaggccgtgaagaaggaccaggagggcgacagcgccgccgccctgagcctgtactgcaaggccctggacttcttcgtgcccgccctgcactacgaggtggacgcccagagaaaggaggccatcaaggccaaggtgggccagtacgtgagcagagccgaggagctgaaggccatcgtgagcagcagcaaccaggccctgctgagacagggcaccagcgccagagacctgctgagagagatggccagagacaagcccagactgctggccgccctggaggtggccagcgccgccatggccaaggaggaggccgccggcggcgagcaggacgccctggacctgtaccagcacagcctgggcgagctgctgctgctgctggccgccgagccccccggcagaagaagagagctgctgcacaccgaggtgcagaacctgatggccagagccgagtacctgaaggagcaggtgaagatgagagagagcagatgggaggccgacaccctggacaaggagggcctgagcgagagcgtgagaagcagctgcaccctgcagtag

SEQ ID NO: 104693 - DNA, 9705 bp, synthetic construct
  misc_feature 1..9705: note = Description of Artificial Sequence: Synthetic coding sequence
  source 1..9705: mol_type = other DNA
atggtgaagagaaagagcagcgagggccaggagcaggacggcggcagaggcatccccctgcccatccagaccttcctgtggagacagaccagcgccttcctgagacccaagctgggcaagcagtacgaggccagctgcgtgagcttcgagagagtgctggtggagaacaagctgcacggcctgagccccgccctgagcgaggccatccagagcatcagcagatgggagctggtgcaggccgccctgccccacgtgctgcactgcaccgccaccctgctgagcaacagaaacaagctgggccaccaggacaagctgggcgtggccgagaccaagctgctgcacaccctgcactggatgctgctggaggccccccaggactgcaacaacgagagattcggcggcaccgacagaggcagcagctggggcggcagcagcagcgccttcatccaccaggtggagaaccagggcagccccggccagccctgccagagcagcagcaacgacgaggaggagaacaacagaagaaagatcttccagaacagcatggccaccgtggagctgttcgtgttcctgttcgcccccctggtgcacagaatcaaggagagcgacctgaccttcagactggccagcggcctggtgatctggcagcccatgtgggagcacagacagcccggcgtgagcggcttcaccgccctggtgaagcccatcagaaacatcatcaccgccaagagaagcagccccatcaacagccagagcagaacctgcgagagccccaaccaggacgccagacacctggagggcctgcaggtggtgtgcgagaccttccagagcgacagcatcagccccaaggccaccatcagcggctgccacagaggcaacagcttcgacggcagcctgagcagccagaccagccaggagagaggccccagccacagcagagccagcctggtgatccccccctgccagagaagcagatacgccacctacttcgacgtggccgtgctgagatgcctgctgcagccccactggagcgaggagggcacccagtggagcctgatgtactacctgcagagactgagacacatgctggaggagaagcccgagaagccccccgagcccgacatccccctgctgcccagacccagaagcagcagcatggtggccgccgcccccagcctggtgaacacccacaagacccaggacctgaccatgaagtgcaacgaggaggagaagagcctgagcagcgaggccttcagcaaggtgagcctgaccaacctgagaagaagcgccgtgcccgacctgagcagcgacctgggcatgaacatcttcaagaagttcaagagcagaaaggaggacagagagagaaagggcagcatccccttccaccacaccggcaagagaagacccagaagaatgggcgtgcccttcctgctgcacgaggaccacctggacgtgagccccaccagaagcaccttcagcttcggcagcttcagcggcctgggcgaggacagaagaggcatcgagaagggcggctggcagaccaccatcctgggcaagctgaccagaagaggcagcagcgacgccgccaccgagatggagagcctgagcgccagacacagccacagccaccacaccctggtgagcgacctgcccgaccccagcaacagccacggcgagaacaccgtgaaggaggtgagaagccagatcagcaccatcaccgtggccaccttcaacaccaccctggccagcttcaacgtgggctacgccgacttcttcaacgagcacatgagaaagctgtgcaaccaggtgcccatccccgagatgccccacgagcccctggcctgcgccaacctgcccagaagcctgaccgacagctgcatcaactacagctacctggaggacaccgagcacatcgacggcaccaacaacttcgtgcacaagaacggcatgctggacctgagcgtggtgctgaaggccgtgtacctggtgctgaaccacgacatcagcagcagaatctgcgacgtggccctgaacatcgtggagtgcctgctgcagctgggcgtggtgccctgcgtggagaagaacagaaagaagagcgagaacaaggagaacgagaccctggagaagagacccagcgagggcgccttccagttcaagggcgtgagcggcagcagcacctgcggcttcggcggccccgccgtgagcggcgccggcgacggcggcggcgaggagggcggcggcggcgacggcggcggcggcggcggcgacggcggcggcggcggcggcggcggcggcggcccctacgagaagaacgacaagaaccaggagaaggacgagagcacccccgtgagcaaccacagactggccctgaccatgctgatcaagatcgtgaagagcctgggctgcgcctacggctgcggcgagggccacagaggcctgagcggcgacagactgagacaccaggcccagaactgcctgaccaagctgtacaagctggacaagatgcagttcagacagaccatgagagactacgtgaacaaggacagcctgaacaacgtggtggacttcctgcacgccctgctgggcttctgcatggagcccgtgaccgacaacaaggccggcttcggcaacaacttcaccaccgtggacaacaagagcaccgcccagaacgtggagggcatcatcgtgagcgccatgttcaagagcctgatcaccagatgcgccagcaccacccacgagctgcacagccccgagaacctgggcctgtactgcgacatcagacagctggtgcagttcatcaaggaggcccacggcaacgtgttcagaagagtggccctgagcgccctgctggacagcgccgagaagctggcccccggcaagaaggtggaggagaacgagcaggagagcaagcccgccggcagcaagagaagcgaggccggcagcatcgtggacaagggccaggtgagcagcgcccccgaggagtgcagaagcttcatgagcggcagacccagccagacccccgagcacgacgagcagatgcagggcgccaacctgggcagaaaggacttctggagaaagatgttcaagagccagagcgccgccagcgacaccagcagccagagcgagcaggacaccagcgagtgcaccaccgcccacagcggcaccaccagcgacagaagagccagaagcagaagcagaagaatcagcctgagaaagaagctgaagctgcccatcggcaagagaaactggctgaagagaagcagcctgagcggcctggccgacggcgtggaggacctgctggacatcagcagcgtggacagactgagcttcatcagacagagcagcaaggtgaagttcaccagcgccgtgaagctgagcgagggcggccccggcagcggcatggagaacggcagagacgaggaggagaacttcttcaagagactgggctgccacagcttcgacgaccacctgagccccaaccaggacggcggcaagagcaagaacgtggtgaacctgggcgccatcagacagggcatgaagagattccagttcctgctgaactgctgcgagcccggcaccatccccgacgccagcatcctggccgccgccctggacctggaggcccccgtggtggccagagccgccctgttcctggagtgcgccagattcgtgcacagatgcaacagaggcaactggcccgagtggatgaagggccaccacgtgaacatcaccaagaagggcctgagcagaggcagaagccccatcgtgggcaacaagagaaaccagaagctgcagtggaacgccgccaagctgttctaccagtggggcgacgccatcggcgtgagactgaacgagctgtgccacggcgagagcgagagccccgccaacctgctgggcctgatctacgacgaggagaccaagagaagactgagaaaggaggacgaggaggaggacttcctggacgacagcaccgtgaaccccagcaagtgcggctgccccttcgccctgaagatggccgcctgccagctgctgctggagatcaccaccttcctgagagagaccttcagctgcctgcccagacccagaaccgagcccctggtggacctggagagctgcagactgagactggaccccgagctggacagacacagatacgagagaaagatcagcttcgccggcgtgctggacgagaacgaggacagcaaggacagcctgcacagcagcagccacaccctgaagagcgacgccggcgtggaggagaagaaggagggcagcccctggagcgccagcgagcccagcatcgagcccgagggcatgagcaacgccggcgccgaggagaactaccacagaaacatgagctggctgcacgtgatgatcctgctgtgcaaccagcagagcttcatctgcacccacgtggactactgccacccccactgctacctgcaccacagcagaagctgcgccagactggtgagagccatcaagctgctgtacggcgacagcgtggacagcctgagagagagcagcaacatcagcagcgtggccctgagaggcaagaagcagaaggagtgcagcgacaagagctgcctgagaacccccagcctgaagaagagagtgagcgacgccaacctggagggcaagaaggacagcggcatgctgaagtacatcagactgcaggtgatgagcctgagccccgcccccctgagcctgctgatcaaggccgcccccatcctgaccgaggagatgtacggcgacatccagcccgccgcctgggagctgctgctgagcatggacgagcacatggccggcgccgccgccgccatgttcctgctgtgcgccgtgaaggtgcccgaggccgtgagcgacatgctgatgagcgagttccaccaccccgagaccgtgcagagactgaacgccgtgctgaagttccacaccctgtggagattcagataccaggtgtggcccagaatggaggagggcgcccagcagatcttcaagatccccccccccagcatcaacttcaccctgcccagccccgtgctgggcatgcccagcgtgcccatgttcgaccccccctgggtgccccagtgcagcggcagcgtgcaggaccccatcaacgaggaccagagcaagagcttcagcgccagagccgtgagcagaagccaccagagagccgagcacatcctgaagaacctgcagcaggaggaggagaagaagagactgggcagagaggccagcctgatcaccgccatccccatcacccaggaggcctgctacgagcccacctgcacccccaacagcgagcccgaggaggaggtggaggaggtgaccaacctggccagcagaagactgagcgtgagccccagctgcaccagcagcaccagccacagaaactacagcttcagaagaggcagcgtgtggagcgtgagaagcgccgtgagcgccgaggacgaggagcacaccaccgagcacacccccaaccaccacgtgccccagcccccccaggccgtgttccccgcctgcatctgcgccgccgtgctgcccatcgtgcacctgatggaggacggcgaggtgagagaggacggcgtggccgtgagcgccgtggcccagcaggtgctgtggaactgcctgatcgaggaccccagcaccgtgctgagacacttcctggagaagctgaccatcagcaacagacaggacgagctgatgtacatgctgagaaagctgctgctgaacatcggcgacttccccgcccagaccagccacatcctgttcaactacctggtgggcctgatcatgtacttcgtgagaaccccctgcgagtggggcatggacgccatcagcgccaccctgaccttcctgtgggaggtggtgggctacgtggagggcctgttcttcaaggacctgaagcagaccatgaagaaggagcagtgcgaggtgaagctgctggtgaccgccagcatgcccggcaccaagaccctggtggtgcacggccagaacgagtgcgacatccccacccagctgcccgtgcacgaggacacccagttcgaggccctgctgaaggagtgcctggagttcttcaacatccccgagagccagagcacccactacttcctgatggacaagagatggaacctgatccactacaacaagacctacgtgagagacatctaccccttcagaagaagcgtgagcccccagctgaacctggtgcacatgcaccccgagaagggccaggagctgatccagaagcaggtgttcaccagaaagctggaggaggtgggcagagtgctgttcctgatcagcctgacccagaagatccccaccgcccacaagcagagccacgtgagcatgctgcaggaggacctgctgagactgcccagcttccccagaagcgccatcgacgccgagttcagcctgttcagcgacccccaggccggcaaggagctgttcggcctggacaccctgcagaagagcctgtggatccagctgctggaggagatgttcctgggcatgcccagcgagttcccctggggcgacgagatcatgctgttcctgaacgtgttcaacggcgccctgatcctgcaccccgaggacagcgccctgctgagacagtacgccgccaccgtgatcaacaccgccgtgcacttcaaccacctgttcagcctgagcggctaccagtggatcctgcccaccatgctgcaggtgtacagcgactacgagagcaacccccagctgagacaggccatcgagttcgcctgccaccagttctacatcctgcacagaaagcccttcgtgctgcagctgttcgccagcgtggcccccctgctggagttccccgacgccgccaacaacggccccagcaagggcgtgagcgcccagtgcctgttcgacctgctgcagagcctggagggcgagaccaccgacatcctggacatcctggagctggtgaaggccgagaagcccctgaagagcctggacttctgctacggcaacgaggacctgaccttcagcatcagcgaggccatcaagctgtgcgtgaccgtggtggcctacgcccccgagagcttcagaagcctgcagatgctgatggtgctggaggccctggtgccctgctacctgcagaagctgaagagacagaccagccaggtggagaccgtgcccgccgccagagaggagatcgccgccaccgccgccctggccaccagcctgcaggccctgctgtacagcgtggaggtgctgaccagacccatgaccgccccccagatgagcagatgcgaccagggccacaagggcaccaccaccgccaaccacaccatgagcagcggcgtgaacaccagataccaggagcagggcgccaagctgcacttcatcagagagaacctgcacctgctggaggagggccagggcatccccagagaggagctggacgagagaatcgccagagaggagttcagaagacccagagagagcctgctgaacatctgcaccgagttctacaagcactgcggccccagactgaagatcctgcagaacctggccggcgagcccagagtgatcgccctggagctgctggacgtgaagagccacatgagactggccgagatcgcccacagcctgctgaagctggccccctacgacacccagaccatggagagcagaggcctgagaagatacatcatggagatgctgcccatcaccgactggaccgccgaggccgtgagacccgccctgatcctgatcctgaagagactggacagaatgttcaacaagatccacaagatgcccaccctgagaagacaggtggagtgggagcccgccagcaacctgatcgagggcgtgtgcctgaccctgcagagacagcccatcatcagcttcctgccccacctgagaagcctgatcaacgtgtgcgtgaacctggtgatgggcgtggtgggccccagcagcgtggccgacggcctgcccctgctgcacctgagcccctacctgagcccccccctgcccttcagcaccgccgtggtgagactggtggccctgcagatccaggccctgaaggaggacttccccctgagccacgtgatcagccccttcaccaaccaggagagaagagagggcatgctgctgaacctgctgatccccttcgtgctgaccgtgggcagcggcagcaaggacagcccctggctggagcagcccgaggtgcagctgctgctgcagaccgtgatcaacgtgctgctgccccccagaatcatcagcaccagcagaagcaagaacttcatgctggagagcagccccgcccactgcagcacccccggcgacgccggcaaggacctgagaagagagggcctggccgagagcaccagccaggccgcctacctggccctgaaggtgatcctggtgtgcttcgagagacagctgggcagccagtggtactggctgagcctgcaggtgaaggagatggccctgagaaaggtgggcggcctggccctgtgggacttcctggacttcatcgtgagaaccagaatccccatcttcgtgctgctgagacccttcatccagtgcaagctgctggcccagcccgccgagaaccacgaggagctgagcgccagacagcacatcgccgaccagctggagagaagattcatccccagacccctgtgcaagagcagcctgatcgccgagttcaacagcgagctgaagatcctgaaggaggccgtgcacagcggcagcgcctaccagggcaagaccagcatcagcaccgtgggcaccagcaccagcgcctacagactgagcctggccaccatgagcagaagcaacaccggcaccggcaccgtgtgggagcaggacagcgagcccagccagcaggccagccaggacaccctgagcagaaccgacgaggaggacgaggagaacgacagcatcagcatgcccagcgtggtgagcgagcaggaggcctacctgctgagcgccatcggcagaagaagattcagcagccacgtgagcagcatgagcgtgccccaggccgaggtgggcatgctgcccagccagagagtggccagcatccagagcgagcccggccagcagaacctgctggtgcagcagcccctgggcagaaagagaggcctgagacagctgagaagacccctgctgagcagacagaagacccagaccgagcccagaaacagacagggcgccagactgagcaccaccagaagaagcatccagcccaagaccaagcccagcgccgaccagaagagaagcgtgaccttcatcgaggcccagcccgagcccgccgccgcccccaccgacgccctgcccgccaccggccagctgcagggctgcagccccgcccccagcagaaagcccgaggccatggacgagcccgtgctgaccagcagccccgccatcgtggtggccgacctgcacagcgtgagccccaagcagagcgagaacttccccaccgaggagggcgagaaggaggaggacaccgaggcccagggcgccaccgcccacagccccctgagcgcccagctgagcgaccccgacgacttcaccggcctggagaccagcagcctgctgcagcacggcgacaccgtgctgcacatcagcgaggagaacggcatggagaaccccctgctgagcagccagttcaccttcacccccaccgagctgggcaagaccgacgccgtgctggacgagagccacgtgtag

SEQ ID NO: 104694 - DNA, 9777 bp, synthetic construct
  misc_feature 1..9777: note = Description of Artificial Sequence: Synthetic coding sequence
  source 1..9777: mol_type = other DNA
atggtgaagagaaagagcagcgagggccaggagcaggacggcggcagaggcatccccctgcccatccagaccttcctgtggagacagaccagcgccttcctgagacccaagctgggcaagcagtacgaggccagctgcgtgagcttcgagagagtgctggtggagaacaagctgcacggcctgagccccgccctgagcgaggccatccagagcatcagcagatgggagctggtgcaggccgccctgccccacgtgctgcactgcaccgccaccctgctgagcaacagaaacaagctgggccaccaggacaagctgggcgtggccgagaccaagctgctgcacaccctgcactggatgctgctggaggccccccaggactgcaacaacgagagattcggcggcaccgacagaggcagcagctggggcggcagcagcagcgccttcatccaccaggtggagaaccagggcagccccggccagccctgccagagcagcagcaacgacgaggaggagaacaacagaagaaagatcttccagaacagcatggccaccgtggagctgttcgtgttcctgttcgcccccctggtgcacagaatcaaggagagcgacctgaccttcagactggccagcggcctggtgatctggcagcccatgtgggagcacagacagcccggcgtgagcggcttcaccgccctggtgaagcccatcagaaacatcatcaccgccaagagaagcagccccatcaacagccagagcagaacctgcgagagccccaaccaggacgccagacacctggagggcctgcaggtggtgtgcgagaccttccagagcgacagcatcagccccaaggccaccatcagcggctgccacagaggcaacagcttcgacggcagcctgagcagccagaccagccaggagagaggccccagccacagcagagccagcctggtgatccccccctgccagagaagcagatacgccacctacttcgacgtggccgtgctgagatgcctgctgcagccccactggagcgaggagggcacccagtggagcctgatgtactacctgcagagactgagacacatgctggaggagaagcccgagaagccccccgagcccgacatccccctgctgcccagacccagaagcagcagcatggtggccgccgcccccagcctggtgaacacccacaagacccaggacctgaccatgaagtgcaacgaggaggagaagagcctgagcagcgaggccttcagcaaggtgagcctgaccaacctgagaagaagcgccgtgcccgacctgagcagcgacctgggcatgaacatcttcaagaagttcaagagcagaaaggaggacagagagagaaagggcagcatccccttccaccacaccggcaagagaagacccagaagaatgggcgtgcccttcctgctgcacgaggaccacctggacgtgagccccaccagaagcaccttcagcttcggcagcttcagcggcctgggcgaggacagaagaggcatcgagaagggcggctggcagaccaccatcctgggcaagctgaccagaagaggcagcagcgacgccgccaccgagatggagagcctgagcgccagacacagccacagccaccacaccctggtgagcgacctgcccgaccccagcaacagccacggcgagaacaccgtgaaggaggtgagaagccagatcagcaccatcaccgtggccaccttcaacaccaccctggccagcttcaacgtgggctacgccgacttcttcaacgagcacatgagaaagctgtgcaaccaggtgcccatccccgagatgccccacgagcccctggcctgcgccaacctgcccagaagcctgaccgacagctgcatcaactacagctacctggaggacaccgagcacatcgacggcaccaacaacttcgtgcacaagaacggcatgctggacctgagcgtggtgctgaaggccgtgtacctggtgctgaaccacgacatcagcagcagaatctgcgacgtggccctgaacatcgtggagtgcctgctgcagctgggcgtggtgccctgcgtggagaagaacagaaagaagagcgagaacaaggagaacgagaccctggagaagagacccagcgagggcgccttccagttcaagggcgtgagcggcagcagcacctgcggcttcggcggccccgccgtgagcggcgccggcgacggcggcggcgaggagggcggcggcggcgacggcggcggcggcggcggcgacggcggcggcggcggcggcggcggcggcggcccctacgagaagaacgacaagaaccaggagaaggacgagagcacccccgtgagcaaccacagactggccctgaccatgctgatcaagatcgtgaagagcctgggctgcgcctacggctgcggcgagggccacagaggcctgagcggcgacagactgagacaccaggtgttcagagagaacgcccagaactgcctgaccaagctgtacaagctggacaagatgcagttcagacagaccatgagagactacgtgaacaaggacagcctgaacaacgtggtggacttcctgcacgccctgctgggcttctgcatggagcccgtgaccgacaacaaggccggcttcggcaacaacttcaccaccgtggacaacaagagcaccgcccagaacgtggagggcatcatcgtgagcgccatgttcaagagcctgatcaccagatgcgccagcaccacccacgagctgcacagccccgagaacctgggcctgtactgcgacatcagacagctggtgcagttcatcaaggaggcccacggcaacgtgttcagaagagtggccctgagcgccctgctggacagcgccgagaagctggcccccggcaagaaggtggaggagaacgagcaggagagcaagcccgccggcagcaagagaagcgaggccggcagcatcgtggacaagggccaggtgagcagcgcccccgaggagtgcagaagcttcatgagcggcagacccagccagacccccgagcacgacgagcagatgcagggcgccaacctgggcagaaaggacttctggagaaagatgttcaagagccagagcgccgccagcgacaccagcagccagagcgagcaggacaccagcgagtgcaccaccgcccacagcggcaccaccagcgacagaagagccagaagcagaagcagaagaatcagcctgagaaagaagctgaagctgcccatcggcaagagaaactggctgaagagaagcagcctgagcggcctggccgacggcgtggaggacctgctggacatcagcagcgtggacagactgagcttcatcagacagagcagcaaggtgaagttcaccagcgccgtgaagctgagcgagggcggccccggcagcggcatggagaacggcagagacgaggaggagaacttcttcaagagactgggctgccacagcttcgacgaccacctgagccccaaccaggacggcggcaagagcaagaacgtggtgaacctgggcgccatcagacagggcatgaagagattccagttcctgctgaactgctgcgagcccggcaccatccccgacgccagcatcctggccgccgccctggacctggaggcccccgtggtggccagagccgccctgttcctggagtgcgccagattcgtgcacagatgcaacagaggcaactggcccgagtggatgaagggccaccacgtgaacatcaccaagaagggcctgagcagaggcagaagccccatcgtgggcaacaagagaaaccagaagctgcagtggaacgccgccaagctgttctaccagtggggcgacgccatcggcgtgagactgaacgagctgtgccacggcgagagcgagagccccgccaacctgctgggcctgatctacgacgaggagaccaagagaagactgagaaaggaggacgaggaggaggacttcctggacgacagcaccgtgaaccccagcaagtgcggctgccccttcgccctgaagatggccgcctgccagctgctgctggagatcaccaccttcctgagagagaccttcagctgcctgcccagacccagaaccgagcccctggtggacctggagagctgcagactgagactggaccccgagctggacagacacagatacgagagaaagatcagcttcgccggcgtgctggacgagaacgaggacagcaaggacagcctgcacagcagcagccacaccctgaagagcgacgccggcgtggaggagaagaaggagggcagcccctggagcgccagcgagcccagcatcgagcccgagggcatgagcaacgccggcgccgaggagaactaccacagaaacatgagctggctgcacgtgatgatcctgctgtgcaaccagcagagcttcatctgcacccacgtggactactgccacccccactgctacctgcaccacagcagaagctgcgccagactggtgagagccatcaagctgctgtacggcgacagcgtggacagcctgagagagagcagcaacatcagcagcgtggccctgagaggcaagaagcagaaggagtgcagcgacaagagctgcctgagaacccccagcctgaagaagagagtgagcgacgccaacctggagggcaagaaggacagcggcatgctgaagtacatcagactgcaggtgatgagcctgagccccgcccccctgagcctgctgatcaaggccgcccccatcctgaccgaggagatgtacggcgacatccagcccgccgcctgggagctgctgctgagcatggacgagcacatggccggcgccgccgccgccatgttcctgctgtgcgccgtgaaggtgcccgaggccgtgagcgacatgctgatgagcgagttccaccaccccgagaccgtgcagagactgaacgccgtgctgaagttccacaccctgtggagattcagataccaggtgtggcccagaatggaggagggcgcccagcagatcttcaagatccccccccccagcatcaacttcaccctgcccagccccgtgctgggcatgcccagcgtgcccatgttcgaccccccctgggtgccccagtgcagcggcagcgtgcaggaccccatcaacgaggaccagagcaagagcttcagcgccagagccgtgagcagaagccaccagagagccgagcacatcctgaagaacctgcagcaggaggaggagaagaagagactgggcagagaggccagcctgatcaccgccatccccatcacccaggaggcctgctacgagcccacctgcacccccaacagcgagcccgaggaggaggtggaggaggtgaccaacctggccagcagaagactgagcgtgagccccagctgcaccagcagcaccagccacagaaactacagcttcagaagaggcagcgtgtggagcgtgagaagcgccgtgagcgccgaggacgaggagcacaccaccgagcacacccccaaccaccacgtgccccagcccccccaggccgtgttccccgcctgcatctgcgccgccgtgctgcccatcgtgcacctgatggaggacggcgaggtgagagaggacggcgtggccgtgagcgccgtggcccagcaggtgctgtggaactgcctgatcgaggaccccagcaccgtgctgagacacttcctggagaagctgaccatcagcaacagacaggacgagctgatgtacatgctgagaaagctgctgctgaacatcggcgacttccccgcccagaccagccacatcctgttcaactacctggtgggcctgatcatgtacttcgtgagaaccccctgcgagtggggcatggacgccatcagcgccaccctgaccttcctgtgggaggtggtgggctacgtggagggcctgttcttcaaggacctgaagcagaccatgaagaaggagcagtgcgaggtgaagctgctggtgaccgccagcatgcccggcaccaagaccctggtggtgcacggccagaacgagtgcgacatccccacccagctgcccgtgcacgaggacacccagttcgaggccctgctgaaggagtgcctggagttcttcaacatccccgagagccagagcacccactacttcctgatggacaagagatggaacctgatccactacaacaagacctacgtgagagacatctaccccttcagaagaagcgtgagcccccagctgaacctggtgcacatgcaccccgagaagggccaggagctgatccagaagcaggtgttcaccagaaagctggaggaggtgggcagagtgctgttcctgatcagcctgacccagaagatccccaccgcccacaagcagagccacgtgagcatgctgcaggaggacctgctgagactgcccagcttccccagaagcgccatcgacgccgagttcagcctgttcagcgacccccaggccggcaaggagctgttcggcctggacaccctgcagaagagcctgtggatccagctgctggaggagatgttcctgggcatgcccagcgagttcccctggggcgacgagatcatgctgttcctgaacgtgttcaacggcgccctgatcctgcaccccgaggacagcgccctgctgagacagtacgccgccaccgtgatcaacaccgccgtgcacttcaaccacctgttcagcctgagcggctaccagtggatcctgcccaccatgctgcaggtgtacagcgactacgagagcaacccccagctgagacaggccatcgagttcgcctgccaccagttctacatcctgcacagaaagcccttcgtgctgcagctgttcgccagcgtggcccccctgctggagttccccgacgccgccaacaacggccccagcaagggcgtgagcgcccagtgcctgttcgacctgctgcagagcctggagggcgagaccaccgacatcctggacatcctggagctggtgaaggccgagaagcccctgaagagcctggacttctgctacggcaacgaggacctgaccttcagcatcagcgaggccatcaagctgtgcgtgaccgtggtggcctacgcccccgagagcttcagaagcctgcagatgctgatggtgctggaggccctggtgccctgctacctgcagaagctgaagagacagaccagccaggtggagaccgtgcccgccgccagagaggagatcgccgccaccgccgccctggccaccagcctgcaggccctgctgtacagcgtggaggtgctgaccagacccatgaccgccccccagatgagcagatgcgaccagggccacaagggcaccaccaccgccaaccacaccatgagcagcggcgtgaacaccagataccaggagcagggcgccaagctgcacttcatcagagagaacctgcacctgctggaggagggccagggcatccccagagaggagctggacgagagaatcgccagagaggagttcagaagacccagagagagcctgctgaacatctgcaccgagttctacaagcactgcggccccagactgaagatcctgcagaacctggccggcgagcccagagtgatcgccctggagctgctggacgtgaagagccacatgagactggccgagatcgcccacagcctgctgaagctggccccctacgacacccagaccatggagagcagaggcctgagaagatacatcatggagatgctgcccatcaccgactggaccgccgaggccgtgagacccgccctgatcctgatcctgaagagactggacagaatgttcaacaagatccacaagatgcccaccctgagaagacaggtggagtgggagcccgccagcaacctgatcgagggcgtgtgcctgaccctgcagagacagcccatcatcagcttcctgccccacctgagaagcctgatcaacgtgtgcgtgaacctggtgatgggcgtggtgggccccagcagcgtggccgacggcctgcccctgctgcacctgagcccctacctgagcccccccctgcccttcagcaccgccgtggtgagactggtggccctgcagatccaggccctgaaggaggacttccccctgagccacgtgatcagccccttcaccaaccaggagagaagagagggcatgctgctgaacctgctgatccccttcgtgctgaccgtgggcagcggcagcaaggacagcccctggctggagcagcccgaggtgcagctgctgctgcagaccgtgatcaacgtgctgctgccccccagaatcatcagcaccagcagaagcaagaacttcatgctggagagcagccccgcccactgcagcacccccggcgacgccggcaaggacctgagaagagagggcctggccgagagcaccagccaggccgcctacctggccctgaaggtgatcctggtgtgcttcgagagacagctgggcagccagtggtactggctgagcctgcaggtgaaggagatggccctgagaaaggtgggcggcctggccctgtgggacttcctggacttcatcgtgagaaccagaatccccatcttcgtgctgctgagacccttcatccagtgcaagctgctggcccagcccgccgagaaccacgaggagctgagcgccagacagcacatcgccgaccagctggagagaagattcatccccagacccctgtgcaagagcagcctgatcgccgagttcaacagcgagctgaagatcctgaaggaggccgtgcacagcggcagcgcctaccagggcaagaccagcatcagcaccgtgggcaccagcaccagcgcctacagactgagcctggccaccatgagcagaagcaacaccggcaccggcaccgtgtgggagcaggacagcgagcccagccagcaggccagccaggacaccctgagcagaaccgacgaggaggacgaggagaacgacagcatcagcatgcccagcgtggtgagcgagcaggaggcctacctgctgagcgccatcggcagaagaagattcagcagccacgtgagcagcatgagcgtgccccaggccgaggtgggcatgctgcccagccagagcgagcccaacgtgctggacgacagccagggcctggccgccgagggcagcctgagcagagtggccagcatccagagcgagcccggccagcagaacctgctggtgcagcagcccctgggcagaaagagaggcctgagacagctgagaagacccctgctgagcagacagaagacccagaccgagcccagaaacagacagggcgccagactgagcaccaccagaagaagcatccagcccaagaccaagcccagcgccgaccagaagagaagcgtgaccttcatcgaggcccagcccgagcccgccgccgcccccaccgacgccctgcccgccaccggccagctgcagggctgcagccccgcccccagcagaaagcccgaggccatggacgagcccgtgctgaccagcagccccgccatcgtggtggccgacctgcacagcgtgagccccaagcagagcgagaacttccccaccgaggagggcgagaaggaggaggacaccgaggcccagggcgccaccgcccacagccccctgagcgcccagctgagcgaccccgacgacttcaccggcctggagaccagcagcctgctgcagcacggcgacaccgtgctgcacatcagcgaggagaacggcatggagaaccccctgctgagcagccagttcaccttcacccccaccgagctgggcaagaccgacgccgtgctggacgagagccacgtgtag

SEQ ID NO: 104695 - DNA, 1401 bp, synthetic construct
  misc_feature 1..1401: note = Description of Artificial Sequence: Synthetic coding sequence
  source 1..1401: mol_type = other DNA
atggagagcagaggcctgagaagatacatcatggagatgctgcccatcaccgactggaccgccgaggccgtgagacccgccctgatcctgatcctgaagagactggacagaatgttcaacaagatccacaagatgcccaccctgagaagacaggtggagtgggagcccgccagcaacctgatcgagggcgtgtgcctgaccctgcagagacagcccatcatcagcttcctgccccacctgagaagcctgatcaacgtgtgcgtgaacctggtgatgggcgtggtgggccccagcagcgtggccgacggcctgcccctgctgcacctgagcccctacctgagcccccccctgcccttcagcaccgccgtggtgagactggtggccctgcagatccaggccctgaaggaggacttccccctgagccacgtgatcagccccttcaccaaccaggagagaagagagggcatgctgctgaacctgctgatccccttcgtgctgaccgtgggcagcggcagcaaggacagcccctggctggagcagcccgaggtgcagctgctgctgcagaccgtgatcaacgtgctgctgccccccagaatcatcagcaccagcagaagcaagaacttcatgctggagagcagccccgcccactgcagcacccccggcgacgccggcaaggacctgagaagagagggcctggccgagagcaccagccaggccgcctacctggccctgaaggtgatcctggtgtgcttcgagagacagctgggcagccagtggtactggctgagcctgcaggtgaaggagatggccctgagaaaggtgggcggcctggccctgtgggacttcctggacttcatcgtgagaaccagaatccccatcttcgtgctgctgagacccttcatccagtgcaagctgctggcccagcccgccgagaaccacgaggagctgagcgccagacagcacatcgccgaccagctggagagaagattcatccccagacccctgtgcaagagcagcctgatcgccgagttcaacagcgagctgaagatcctgaaggaggccgtgcacagcggcagcgcctaccagggcaagaccagcatcagcaccgtgggcaccagcaccagcgcctacagactgagcctggccaccatgagcagaagcaacaccggcaccggcaccgtgtgggagcaggacagcgagcccagccagcaggccagccaggacaccctgagcagaaccgacgaggaggacgaggagaacgacagcatcagcatgcccagcgtggtgagcgagcaggaggcctacctgctgagcgccatcggcagaagaagattcagcagccacgtgagcagcatgagcgtgccccaggccgaggtgggcatgctgcccagccagagatag

SEQ ID NO: 104696 - DNA, 786 bp, synthetic construct; identical to SEQ ID NO: 84966
  misc_feature 1..786: note = Description of Artificial Sequence: Synthetic coding sequence
  source 1..786: mol_type = other DNA

SEQ ID NO: 104697 - DNA, 1248 bp, synthetic construct
  misc_feature 1..1248: note = Description of Artificial Sequence: Synthetic coding sequence
  source 1..1248: mol_type = other DNA
atggacagaagcctgagaaacgtgctggtggtgagcttcggcttcctgctgctgttcaccgcctacggcggcctgcagagcctgcagagcagcctgtacagcgaggagggcctgggcgtgaccgccctgagcaccctgtacggcggcatgctgctgagcagcatgttcctgccccccctgctgatcgagagactgggctgcaagggcaccatcatcctgagcatgtgcggctacgtggccttcagcgtgggcaacttcttcgccagctggtacaccctgatccccaccagcatcctgctgggcctgggcgccgcccccctgtggagcgcccagtgcacctacctgaccatcaccggcaacacccacgccgagaaggccggcaagagaggcaaggacatggtgaaccagtacttcggcatcttcttcctgatcttccagagcagcggcgtgtggggcaacctgatcagcagcctggtgttcggccagacccccagccagggcagcggcgtgctggccgtgctgatgatcgccgccttcctgcagcccatcagagacgtgcagagagagagcgagggcgagaagaagagcgtgcccttctggagcaccctgctgagcaccttcaagctgtacagagacaagagactgtgcctgctgatcctgctgcccctgtacagcggcctgcagcagggcttcctgagcagcgagtacaccagaagctacgtgacctgcaccctgggcatccagttcgtgggctacgtgatgatctgcttcagcgccaccgacgccctgtgcagcgtgctgtacggcaaggtgagccagtacaccggcagagccgtgctgtacgtgctgggcgccgtgacccacgtgagctgcatgatcgccctgctgctgtggagacccagagccgaccacctggccgtgttcttcgtgttcagcggcctgtggggcgtggccgacgccgtgtggcagacccagaacaacgccctgtacggcgtgctgttcgagaagagcaaggaggccgccttcgccaactacagactgtgggaggccctgggcttcgtgatcgccttcggctacagcatgttcctgtgcgtgcacgtgaagctgtacatcctgctgggcgtgctgagcctgaccatggtggcctacggcctggtggagtgcgtggagagcaagaaccccatcagaccccacgcccccggccaggtgaaccaggccgaggacgaggagatccagaccaagatgtag

SEQ ID NO: 104698 - DNA, 435 bp, synthetic construct
  misc_feature 1..435: note = Description of Artificial Sequence: Synthetic coding sequence
  source 1..435: mol_type = other DNA
atggacagaagcctgagaaacgtgctggtggtgagcttcggcttcctgctgctgttcaccgcctacggcggcctgcagagcctgcagagcagcctgtacagcgaggagggcctgggcgtgaccgccctgagcaccctgtacggcggcatgctgctgagcagcatgttcctgccccccctgctgatcgagagactgggctgcaagggcaccatcatcctgagcatgtgcggctacgtggccttcagcgtgggcaacttcttcgccagctggtacaccctgatccccaccagcatcctgctgggcctgggcgccgcccccctgtggagcgcccagtgcacctacctgaccatcaccggcaacacccacgccgagaaggccggcaagagaggcaaggacatggtgaaccagtacttcggcatcttcttcctgatctag

SEQ ID NO: 104699 - DNA, 1545 bp, synthetic construct
  misc_feature 1..1545: note = Description of Artificial Sequence: Synthetic coding sequence
  source 1..1545: mol_type = other DNA
atgagcagatggctgtggccctggagcaactgcgtgaaggagagagtgtgcagatacctgctgcaccactacctgggccacttcttccaggagcacctgagcctggaccagctgagcctggacctgtacaagggcagcgtggccctgagagacatccacctggagatctggagcgtgaacgaggtgctggagagcatggagagccccctggagctggtggagggcttcgtgggcagcatcgaggtggccgtgccctgggccgccctgctgaccgaccactgcaccgtgagagtgagcggcctgcagctgaccctgcagcccagaagaggccccgcccccggcgccgccgacagccagagctgggccagctgcatgaccaccagcctgcagctggcccaggagtgcctgagagacggcctgcccgagcccagcgagcccccccagcccctggagggcctggagatgttcgcccagaccatcgagaccgtgctgagaagaatcaaggtgaccttcctggacaccgtggtgagagtggagcacagccccggcgacggcgagagaggcgtggccgtggaggtgagagtgcagagactggagtactgcgacgaggccgtgagagaccccagccaggccccccccgtggacgtgcaccagccccccgccttcctgcacaagctgctgcagctggccggcgtgagactgcactacgaggagctgcccgcccaggaggagccccccgagccccccctgcagatcggcagctgcagcggctacatggagctgatggtgaagctgaagcagaacgaggccttccccggccccaagctggaggtggccggccagctgggcagcctgcacctgctgctgacccccagacagctgcagcagctgcaggagctgctgagcgccgtgagcctgaccgaccacgagggcctggccgacaagctgaacaagagcagacccctgggcgccgaggacctgtggctgatcgagcaggacctgaaccagcagctgcaggccggcgccgtggccgagcccctgagccccgaccccctgaccaaccccctgctgaacctggacaacaccgacctgttcttcagcatggccggcctgaccagcagcgtggccagcgccctgagcgagctgagcctgagcgacgtggacctggccagcagcgtgagaagcgacatggccagcagaagactgagcgcccaggccagacccggcctggccctgcagggcatggccaccgtgaaggacgccttccccgcctgccccctgcccatctgctgcgagagaggcgccagcctgccctggggcctgagccccggcagcgccctgttcctgagaggcgagagaaccctgcccctgcccagacccggccccaccctgctgcccagccccagaaccgaggccttcggccccagcgaccccatccccctgagccaggtgagcttctgcgtgtggggcgaggagggcatgatcagcgtgtggttcgacgtgctgttcctgagcagcgtgagcgcctgggtgagcgtgtgctag

SEQ ID NO: 104700 - DNA, 924 bp, synthetic construct
  misc_feature 1..924: note = Description of Artificial Sequence: Synthetic coding sequence
  source 1..924: mol_type = other DNA
atgggcggcctgaccgccagcgacgtgcaccccaccctgggcgtgcagctgttcagcgccggcatcgccgcctgcctggccgacgtgatcaccttccccctggacaccgccaaggtgagactgcaggtgcagggcgagtgccccaccagcagcgtgatcagatacaagggcgtgctgggcaccatcaccgccgtggtgaagaccgagggcagaatgaagctgtacagcggcctgcccgccggcctgcagagacagatcagcagcgccagcctgagaatcggcctgtacgacaccgtgcaggagttcctgaccgccggcaaggagaccgcccccagcctgggcagcaagatcctggccggcctgaccaccggcggcgtggccgtgttcatcggccagcccaccgaggtggtgaaggtgagactgcaggcccagagccacctgcacggcatcaagcccagatacaccggcacctacaacgcctacagaatcatcgccaccaccgagggcctgaccggcctgtggaagggcaccacccccaacctgatgagaagcgtgatcatcaactgcaccgagctggtgacctacgacctgatgaaggaggccttcgtgaagaacaacatcctggccgacgacgtgccctgccacctggtgagcgccctgatcgccggcttctgcgccaccgccatgagcagccccgtggacgtggtgaagaccagattcatcaacagcccccccggccagtacaagagcgtgcccaactgcgccatgaaggtgttcaccaacgagggccccaccgccttcttcaagggcctggtgcccagcttcctgagactgggcagctggaacgtgatcatgttcgtgtgcttcgagcagctgaagagagagctgagcaagagcagacagaccatggactgcgccacctag

SEQ ID NO: 104701 - DNA, 930 bp, synthetic construct
  misc_feature 1..930: note = Description of Artificial Sequence: Synthetic coding sequence
  source 1..930: mol_type = other DNA
atggtgggcttcaaggccaccgacgtgccccccaccgccaccgtgaagttcctgggcgccggcaccgccgcctgcatcgccgacctgatcaccttccccctggacaccgccaaggtgagactgcagatccagggcgagagccagggccccgtgagagccaccgccagcgcccagtacagaggcgtgatgggcaccatcctgaccatggtgagaaccgagggccccagaagcctgtacaacggcctggtggccggcctgcagagacagatgagcttcgccagcgtgagaatcggcctgtacgacagcgtgaagcagttctacaccaagggcagcgagcacgccagcatcggcagcagactgctggccggcagcaccaccggcgccctggccgtggccgtggcccagcccaccgacgtggtgaaggtgagattccaggcccaggccagagccggcggcggcagaagataccagagcaccgtgaacgcctacaagaccatcgccagagaggagggcttcagaggcctgtggaagggcaccagccccaacgtggccagaaacgccatcgtgaactgcgccgagctggtgacctacgacctgatcaaggacgccctgctgaaggccaacctgatgaccgacgacctgccctgccacttcaccagcgccttcggcgccggcttctgcaccaccgtgatcgccagccccgtggacgtggtgaagaccagatacatgaacagcgccctgggccagtacagcagcgccggccactgcgccctgaccatgctgcagaaggagggccccagagccttctacaagggcttcatgcccagcttcctgagactgggcagctggaacgtggtgatgttcgtgacctacgagcagctgaagagagccctgatggccgcctgcaccagcagagaggcccccttctag

SEQ ID NO: 104702 - DNA, 102 bp, synthetic construct
  misc_feature 1..102: note = Description of Artificial Sequence: Synthetic coding sequence
  source 1..102: mol_type = other DNA
atggtgggcttcaaggccaccgacgtgccccccaccgccaccgtgaagttcctgggcgccggcaccgccgcctgcatcgccgacctgatcaccttcccctag

SEQ ID NO: 104703 - DNA, 939 bp, synthetic construct
  misc_feature 1..939: note = Description of Artificial Sequence: Synthetic coding sequence
  source 1..939: mol_type = other DNA
atggtgggcctgaagcccagcgacgtgccccccaccatggccgtgaagttcctgggcgccggcaccgccgcctgcttcgccgacctggtgaccttccccctggacaccgccaaggtgagactgcagatccagggcgagaaccaggccgtgcagaccgccagactggtgcagtacagaggcgtgctgggcaccatcctgaccatggtgagaaccgagggcccctgcagcccctacaacggcctggtggccggcctgcagagacagatgagcttcgccagcatcagaatcggcctgtacgacagcgtgaagcaggtgtacacccccaagggcgccgacaacagcagcctgaccaccagaatcctggccggctgcaccaccggcgccatggccgtgacctgcgcccagcccaccgacgtggtgaaggtgagattccaggccagcatccacctgggccccagcagaagcgacagaaagtacagcggcaccatggacgcctacagaaccatcgccagagaggagggcgtgagaggcctgtggaagggcaccctgcccaacatcatgagaaacgccatcgtgaactgcgccgaggtggtgacctacgacatcctgaaggagaagctgctggactaccacctgctgaccgacaacttcccctgccacttcgtgagcgccttcggcgccggcttctgcgccaccgtggtggccagccccgtggacgtggtgaagaccagatacatgaacagcccccccggccagtacttcagccccctggactgcatgatcaagatggtggcccaggagggccccaccgccttctacaagggcttcacccccagcttcctgagactgggcagctggaacgtggtgatgttcgtgacctacgagcagctgaagagagccctgatgaaggtgcagatgctgagagagagccccttctag

SEQ ID NO: 104704 - DNA, 633 bp, synthetic construct
  misc_feature 1..633: note = Description of Artificial Sequence: Synthetic coding sequence
  source 1..633: mol_type = other DNA
atggtgggcctgaagcccagcgacgtgccccccaccatggccgtgaagttcctgggcgccggcaccgccgcctgcttcgccgacctggtgaccttccccctggacaccgccaaggtgagactgcagatccagggcgagaaccaggccgtgcagaccgccagactggtgcagtacagaggcgtgctgggcaccatcctgaccatggtgagaaccgagggcccctgcagcccctacaacggcctggtggccggcctgcagagacagatgagcttcgccagcatcagaatcggcctgtacgacagcgtgaagcaggtgtacacccccaagggcgccgacaacaacttcccctgccacttcgtgagcgccttcggcgccggcttctgcgccaccgtggtggccagccccgtggacgtggtgaagaccagatacatgaacagcccccccggccagtacttcagccccctggactgcatgatcaagatggtggcccaggagggccccaccgccttctacaagggcttcacccccagcttcctgagactgggcagctggaacgtggtgatgttcgtgacctacgagcagctgaagagagccctgatgaaggtgcagatgctgagagagagccccttctag

SEQ ID NO: 104705 - DNA, 828 bp, synthetic construct
  misc_feature 1..828: note = Description of Artificial Sequence: Synthetic coding sequence
  source 1..828: mol_type = other DNA
atggtgggcctgaagcccagcgacgtgccccccaccatggccgtgaagttcctgggcgccggcaccgccgcctgcttcgccgacctggtgaccttccccctggacaccgccaaggtgagactgcagatccagggcgagaaccaggccgtgcagaccgccagactggtgcagtacagaggcgtgctgggcaccatcctgaccatggtgagaaccgagggcccctgcagcccctacaacggcctggtggccggcctgcagagacagatgagcttcgccagcatcagaatcggcctgtacgacagcgtgaagcaggtgtacacccccaagggcgccgacaacagcagcctgaccaccagaatcctggccggctgcaccaccggcgccatggccgtgacctgcgcccagcccaccgacgtggtgaaggtgagattccaggccagcatccacctgggccccagcagaagcgacagaaagtacagcggcaccatggacgcctacagaaccatcgccagagaggagggcgtgagaggcctgtggaagggcaccctgcccaacatcatgagaaacgccatcgtgaactgcgccgaggtggtgacctacgacatcctgaaggagaagctgctggactaccacctgctgaccgacaacttcccctgccacttcgtgagcgccttcggcgccggcttctgcgccaccgtggtggccagccccgtggacgtggtgaagaccagatacatgaacagcccccccggccagtacttcagccccctggactgcatgatcaagatggtggcccaggagggccccaccgccttctacaagggctag

SEQ ID NO: 104706 - DNA, 291 bp, synthetic construct
  misc_feature 1..291: note = Description of Artificial Sequence: Synthetic coding sequence
  source 1..291: mol_type = other DNA
atggtgggcctgaagcccagcgacgtgccccccaccatggccgtgaagttcctgggcgccggcaccgccgcctgcttcgccgacctggtgaccttccccctggacaccgccaaggtgagactgcagatccagggcgagaaccaggccgtgcagaccgccagactggtgcagtacagaggcgtgctgggcaccatcctgaccatggtgagaaccgagggcccctgcagcccctacaacggcctggtggccggcctgcagagacagatgagcttcgccagcatcagaatctag

SEQ ID NO: 104707 - DNA, 1026 bp, synthetic construct
  misc_feature 1..1026: note = Description of Artificial Sequence: Synthetic coding sequence
  source 1..1026: mol_type = other DNA
atgctgctgagacccagaagacccccccccctggccccccccgccccccccagccccgccagccccgaccccgagcccagaacccccggcgacgcccccggcaccccccccagaagacccgccagccccagcgccctgggcgagctgggcctgcccgtgagccccggcagcgcccagagaaccccctggagcgccagagagaccgagctgctgctgggcaccctgctgcagcccgccgtgtggagagccctgctgctggacagaagacaggccctgcccacctacagaagagtgagcgccgccctggcccagcagcaggtgagaagaacccccgcccagtgcagaagaagatacaagttcctgaaggacaagttcagagaggcccacggccagccccccggccccttcgacgagcagatcagaaagctgatgggcctgctgggcgacaacggcagaaagagacccagaagaagaagccccggcagcggcagaccccagagagccagaagacccgtgcccaacgcccacgcccccgcccccagcgagcccgacgccacccccctgcccaccgccagagacagagacgccgaccccacctggaccctgagattcagccccagcccccccaagagcgccgacgccagccccgcccccggcagcccccccgcccccgcccccaccgccctggccacctgcatccccgaggacagagcccccgtgagaggccccggcagccccccccccccccccgccagagaggaccccgacagcccccccggcagacccgaggactgcgcccccccccccgccgccccccccagcctgaacaccgccctgctgcagaccctgggccacctgggcgacatcgccaacatcctgggccccctgagagaccagctgctgaccctgaaccagcacgtggagcagctgagaggcgccttcgaccagaccgtgagcctggccgtgggcttcatcctgggcagcgccgccgccgagagaggcgtgctgagagacccctgccagtag

SEQ ID NO: 104708 - DNA, 3357 bp, synthetic construct
  misc_feature 1..3357: note = Description of Artificial Sequence: Synthetic coding sequence
  source 1..3357: mol_type = other DNA
atgagcgtggaggcctacggccccagcagccagaccctgaccttcctggacaccgaggaggccgagctgctgggcgccgacacccagggcagcgagttcgagttcaccgacttcaccctgcccagccagacccagaccccccccggcggccccggcggccccggcggcggcggcgccggcggccccggcggcgccggcgccggcgccgccgccggccagctggacgcccaggtgggccccgagggcatcctgcagaacggcgccgtggacgacagcgtggccaagaccagccagctgctggccgagctgaacttcgaggaggacgaggaggacacctactacaccaaggacctgcccatccacgcctgcagctactgcggcatccacgaccccgcctgcgtggtgtactgcaacaccagcaagaagtggttctgcaacggcagaggcaacaccagcggcagccacatcgtgaaccacctggtgagagccaagtgcaaggaggtgaccctgcacaaggacggccccctgggcgagaccgtgctggagtgctacaactgcggctgcagaaacgtgttcctgctgggcttcatccccgccaaggccgacagcgtggtggtgctgctgtgcagacagccctgcgccagccagagcagcctgaaggacatcaactgggacagcagccagtggcagcccctgatccaggacagatgcttcctgagctggctggtgaagatccccagcgagcaggagcagctgagagccagacagatcaccgcccagcagatcaacaagctggaggagctgtggaaggagaaccccagcgccaccctggaggacctggagaagcccggcgtggacgaggagccccagcacgtgctgctgagatacgaggacgcctaccagtaccagaacatcttcggccccctggtgaagctggaggccgactacgacaagaagctgaaggagagccagacccaggacaacatcaccgtgagatgggacctgggcctgaacaagaagagaatcgcctacttcaccctgcccaagaccgacagcgacatgagactgatgcagggcgacgagatctgcctgagatacaagggcgacctggcccccctgtggaagggcatcggccacgtgatcaaggtgcccgacaactacggcgacgagatcgccatcgagctgagaagcagcgtgggcgcccccgtggaggtgacccacaacttccaggtggacttcgtgtggaagagcaccagcttcgacagaatgcagagcgccctgaagaccttcgccgtggacgagaccagcgtgagcggctacatctaccacaagctgctgggccacgaggtggaggacgtgatcatcaagtgccagctgcccaagagattcaccgcccagggcctgcccgacctgaaccacagccaggtgtacgccgtgaagaccgtgctgcagagacccctgagcctgatccagggcccccccggcaccggcaagaccgtgaccagcgccaccatcgtgtaccacctggccagacagggcaacggccccgtgctggtgtgcgcccccagcaacatcgccgtggaccagctgaccgagaagatccaccagaccggcctgaaggtggtgagactgtgcgccaagagcagagaggccatcgacagccccgtgagcttcctggccctgcacaaccagatcagaaacatggacagcatgcccgagctgcagaagctgcagcagctgaaggacgagaccggcgagctgagcagcgccgacgagaagagatacagagccctgaagagaaccgccgagagagagctgctgatgaacgccgacgtgatctgctgcacctgcgtgggcgccggcgaccccagactggccaagatgcagttcagaagcatcctgatcgacgagagcacccaggccaccgagcccgagtgcatggtgcccgtggtgctgggcgccaagcagctgatcctggtgggcgaccactgccagctgggccccgtggtgatgtgcaagaaggccgccaaggccggcctgagccagagcctgttcgagagactggtggtgctgggcatcagacccatcagactgcaggtgcagtacagaatgcaccccgccctgagcgccttccccagcaacatcttctacgagggcagcctgcagaacggcgtgaccgccgccgacagagtgaagaagggcttcgacttccagtggccccagcccgacaagcccatgttcttctacgtgacccagggccaggaggagatcgccagcagcggcaccagctacctgaacagaaccgaggccgccaacgtggagaagatcaccaccaagctgctgaaggccggcgccaagcccgaccagatcggcatcatcaccccctacgagggccagagaagctacctggtgcagtacatgcagttcagcggcagcctgcacaccaagctgtaccaggaggtggagatcgccagcgtggacgccttccagggcagagagaaggacttcatcatcctgagctgcgtgagagccaacgagcaccagggcatcggcttcctgaacgaccccagaagactgaacgtggccctgaccagagccagatacggcgtgatcatcgtgggcaaccccaaggccctgagcaagcagcccctgtggaaccacctgctgaactactacaaggagcagaaggtgctggtggagggccccctgaacaacctgagagagagcctgatgcagttcagcaagcccagaaagctggtgaacaccatcaaccccggcgccagattcatgaccaccgccatgtacgacgccagagaggccatcatccccggcagcgtgtacgacagaagcagccagggcagacccagcagcatgtacttccagacccacgaccagatcggcatgatcagcgccggccccagccacgtggccgccatgaacatccccatccccttcaacctggtgatgccccccatgcccccccccggctacttcggccaggccaacggccccgccgccggcagaggcacccccaagggcaagaccggcagaggcggcagacagaagaacagattcggcctgcccggccccagccagaccaacctgcccaacagccaggccagccaggacgtggccagccagcccttcagccagggcgccctgacccagggctacatcagcatgagccagcccagccagatgagccagcccggcctgagccagcccgagctgagccaggacagctacctgggcgacgagttcaagagccagatcgacgtggccctgagccaggacagcacctaccagggcgagagagcctaccagcacggcggcgtgaccggcctgagccagtactag

SEQ ID NO: 104709 - DNA, 1740 bp, synthetic construct
  misc_feature 1..1740: note = Description of Artificial Sequence: Synthetic coding sequence
  source 1..1740: mol_type = other DNA
atgcccgccgagagaaagaagcccgccagcatggaggagaaggacagcctgcccaacaacaaggagaaggactgcagcgagagaagaaccgtgagcagcaaggagagacccaaggacgacatcaagctgaccgccaagaaggaggtgagcaaggcccccgaggagagcaagaagaaggaggaggaggagaagaagaagcaccaggaggaggagagaaagaagcaggaggagcaggccaagagacagcaggaggaggaggccgccgcccagatgaaggagaaggaggagagcatccagctgcaccaggaggcctgggagagacaccacctgagaaaggagctgagaagcaagaaccagaacgcccccgacagcagacccgaggagaacttcttcagcagactggacagcagcctgaagaagaacaccgccttcgtgaagaagctgaagaccatcaccgagcagcagagagacagcctgagccacgacttcaacggcctgaacctgagcaagtacatcgccgaggccgtggccagcatcgtggaggccaagctgaagatcagcgacgtgaactgcgccgtgcacctgtgcagcctgttccaccagagatacgccgacttcgcccccagcctgctgcaggtgtggaagaagcacttcgaggccagaaaggaggagaagacccccaacatcaccaagctgagaaccgacctgagattcatcgccgagctgaccatcgtgggcatcttcaccgacaaggagggcctgagcctgatctacgagcagctgaagaacatcatcaacgccgacagagagagccacacccacgtgagcgtggtgatcagcttctgcagacactgcggcgacgacatcgccggcctggtgcccagaaaggtgaagagcgccgccgagaagttcaacctgagcttcccccccagcgagatcatcagccccgagaagcagcagcccttccagaacctgctgaaggagtacttcaccagcctgaccaagcacctgaagagagaccacagagagctgcagaacaccgagagacagaacagaagaatcctgcacagcaagggcgagctgagcgaggacagacacaagcagtacgaggagttcgccatgagctaccagaagctgctggccaacagccagagcctggccgacctgctggacgagaacatgcccgacctgccccaggacaagcccacccccgaggagcacggccccggcatcgacatcttcacccccggcaagcccggcgagtacgacctggagggcggcatctgggaggacgaggacgccagaaacttctacgagaacctgatcgacctgaaggccttcgtgcccgccatcctgttcaaggacaacgagaagagctgccagaacaaggagagcaacaaggacgacaccaaggaggccaaggagagcaaggagaacaaggaggtgagcagccccgacgacctggagctggagctggagaacctggagatcaacgacgacaccctggagctggagggcggcgacgaggccgaggacctgaccaagaagctgctggacgagcaggagcaggaggacgaggaggccagcaccggcagccacctgaagctgatcgtggacgccttcctgcagcagctgcccaactgcgtgaacagagacctgatcgacaaggccgagaaggccttctgcaacggcaacctggccagagtgaacctgctgctgagaatggccgtgaagaagtag

SEQ ID NO: 104710 - DNA, 3819 bp, synthetic construct
  misc_feature 1..3819: note = Description of Artificial Sequence: Synthetic coding sequence
  source 1..3819: mol_type = other DNA
atgcccgccgagagaaagaagcccgccagcatggaggagaaggacagcctgcccaacaacaaggagaaggactgcagcgagagaagaaccgtgagcagcaaggagagacccaaggacgacatcaagctgaccgccaagaaggaggtgagcaaggcccccgaggacaagaagaagagactggaggacgacaagagaaagaaggaggacaaggagagaaagaagaaggacgaggagaaggtgaaggccgaggaggagagcaagaagaaggaggaggaggagaagaagaagcaccaggaggaggagagaaagaagcaggaggagcaggccaagagacagcaggaggaggaggccgccgcccagatgaaggagaaggaggagagcatccagctgcaccaggaggcctgggagagacaccacctgagaaaggagctgagaagcaagaaccagaacgcccccgacagcagacccgaggagaacttcttcagcagactggacagcagcctgaagaagaacaccgccttcgtgaagaagctgaagaccatcaccgagcagcagagagacagcctgagccacgacttcaacggcctgaacctgagcaagtacatcgccgaggccgtggccagcatcgtggaggccaagctgaagatcagcgacgtgaactgcgccgtgcacctgtgcagcctgttccaccagagatacgccgacttcgcccccagcctgctgcaggtgtggaagaagcacttcgaggccagaaaggaggagaagacccccaacatcaccaagctgagaaccgacctgagattcatcgccgagctgaccatcgtgggcatcttcaccgacaaggagggcctgagcctgatctacgagcagctgaagaacatcatcaacgccgacagagagagccacacccacgtgagcgtggtgatcagcttctgcagacactgcggcgacgacatcgccggcctggtgcccagaaaggtgaagagcgccgccgagaagttcaacctgagcttcccccccagcgagatcatcagccccgagaagcagcagcccttccagaacctgctgaaggagtacttcaccagcctgaccaagcacctgaagagagaccacagagagctgcagaacaccgagagacagaacagaagaatcctgcacagcaagggcgagctgagcgaggacagacacaagcagtacgaggagttcgccatgagctaccagaagctgctggccaacagccagagcctggccgacctgctggacgagaacatgcccgacctgccccaggacaagcccacccccgaggagcacggccccggcatcgacatcttcacccccggcaagcccggcgagtacgacctggagggcggcatctgggaggacgaggacgccagaaacttctacgagaacctgatcgacctgaaggccttcgtgcccgccatcctgttcaaggacaacgagaagagctgccagaacaaggagagcaacaaggacgacaccaaggaggccaaggagagcaaggagaacaaggaggtgagcagccccgacgacctggagctggagctggagaacctggagatcaacgacgacaccctggagctggagggcggcgacgaggccgaggacctgaccaagaagctgctggacgagcaggagcaggaggacgaggaggccagcaccggcagccacctgaagctgatcgtggacgccttcctgcagcagctgcccaactgcgtgaacagagacctgatcgacaaggccgccatggacttctgcatgaacatgaacaccaaggccaacagaaagaagctggtgagagccctgttcatcgtgcccagacagagactggacctgctgcccttctacgccagactggtggccaccctgcacccctgcatgagcgacgtggccgaggacctgtgcagcatgctgagaggcgacttcagattccacgtgagaaagaaggaccagatcaacatcgagaccaagaacaagaccgtgagattcatcggcgagctgaccaagttcaagatgttcaccaagaacgacaccctgcactgcctgaagatgctgctgagcgacttcagccaccaccacatcgagatggcctgcaccctgctggagacctgcggcagattcctgttcagaagccccgagagccacctgagaaccagcgtgctgctggagcagatgatgagaaagaagcaggccatgcacctggacgccagatacgtgaccatggtggagaacgcctactactactgcaaccccccccccgccgagaagaccgtgaagaagaagagaccccccctgcaggagtacgtgagaaagctgctgtacaaggacctgagcaaggtgaccaccgagaaggtgctgagacagatgagaaagctgccctggcaggaccaggaggtgaaggactacgtgatctgctgcatgatcaacatctggaacgtgaagtacaacagcatccactgcgtggccaacctgctggccggcctggtgctgtaccaggaggacgtgggcatccacgtggtggacggcgtgctggaggacatcagactgggcatggaggtgaaccagcccaagttcaaccagagaagaatcagcagcgccaagttcctgggcgagctgtacaactacagaatggtggagagcgccgtgatcttcagaaccctgtacagcttcaccagcttcggcgtgaaccccgacggcagccccagcagcctggacccccccgagcacctgttcagaatcagactggtgtgcaccatcctggacacctgcggccagtacttcgacagaggcagcagcaagagaaagctggactgcttcctggtgtacttccagagatacgtgtggtggaagaagagcctggaggtgtggaccaaggaccaccccttccccatcgacatcgactacatgatcagcgacaccctggagctgctgagacccaagatcaagctgtgcaacagcctggaggagagcatcagacaggtgcaggacctggagagagagttcctgatcaagctgggcctggtgaacgacaaggacagcaaggacagcatgaccgagggcgagaacctggaggaggacgaggaggaggaggagggcggcgccgagaccgaggagcagagcggcaacgagagcgaggtgaacgagcccgaggaggaggagggcagcgacaacgacgacgacgagggcgaggaggaggaggaggagaacaccgactacctgaccgacagcaacaaggagaacgagaccgacgaggagaacaccgaggtgatgatcaagggcggcggcctgaagcacgtgccctgcgtggaggacgaggacttcatccaggccctggacaagatgatgctggagaacctgcagcagagaagcggcgagagcgtgaaggtgcaccagctggacgtggccatccccctgcacctgaagagccagctgagaaagggcccccccctgggcggcggcgagggcgaggccgagagcgccgacaccatgcccttcgtgatgctgaccagaaagggcaacaagcagcagttcaagatcctgaacgtgcccatgagcagccagctggccgccaaccactggaaccagcagcaggccgagcaggaggagagaatgagaatgaagaagctgaccctggacatcaacgagagacaggagcaggaggactaccaggagatgctgcagagcctggcccagagacccgcccccgccaacaccaacagagagagaagacccagataccagcaccccaagggcgcccccaacgccgacctgatcttcaagaccggcggcagaagaagatag

SEQ ID NO: 104711 - DNA, 3819 bp, synthetic construct; identical to SEQ ID NO: 104710
  misc_feature 1..3819: note = Description of Artificial Sequence: Synthetic coding sequence
  source 1..3819: mol_type = other DNA

SEQ ID NO: 104712 - DNA, 375 bp, synthetic construct
  misc_feature 1..375: note = Description of Artificial Sequence: Synthetic coding sequence
  source 1..375: mol_type = other DNA
atgatcaagggcggcggcctgaagcacgtgccctgcgtggaggacgaggacttcatccaggccctggacaagatgatgctggagaacctgcagcagagaagcggcgagagcgtgaaggtgcaccagctggacgtggccatccccctgcacctgaagagccagctgagaaagggcccccccctgggcggcggcgagggcgaggccgagagcgccgacaccatgcccttcgtgatgctgaccagaaagggcaacaagcagcagttcaagatcctgaacgtgcccatgagcagccagctggccgccaaccactggaaccagcagcaggccgagagaagagaggacgagaacgagaaggcccacaccagataccagtag

SEQ ID NO: 104713 - DNA, 1740 bp, synthetic construct; identical to SEQ ID NO: 104709
  misc_feature 1..1740: note = Description of Artificial Sequence: Synthetic coding sequence
  source 1..1740: mol_type = other DNA

SEQ ID NO: 104714 - DNA, 3819 bp, synthetic construct; identical to SEQ ID NO: 104710
  misc_feature 1..3819: note = Description of Artificial Sequence: Synthetic coding sequence
  source 1..3819: mol_type = other DNA

SEQ ID NO: 104715 - DNA, 1332 bp, synthetic construct
  misc_feature 1..1332: note = Description of Artificial Sequence: Synthetic coding sequence
  source 1..1332: mol_type = other DNA
atgagaagcgagaaggagggcgccggcggcctgagagccgccgtggccgccagaggccccagcggcagagagaagctgagcgccctggaggtgcagttccacagagacagccagcagcaggaggccgagaccccccccaccagcagcagcggctgcggcggcggcgccggcaagcccagagaggagaagagaaccgccctgagcaaggtggtgatcagaagactgccccccggcctgaccaaggagcagctggaggagcagctgagacccctgcccgcccacgactacttcgagttcttcgccgccgacctgagcctgtacccccacctgtacagcagagcctacatcaacttcagaaaccccgacgacatcctgctgttcagagacagattcgacggctacatcttcctggacagcaaggaccccgagtacaagaagttcctggagacctactgcgtggaggaggagaagaccagcgccaaccccgagaccctgctgggcgagatggaggccaagaccagagagctgatcgccagaagaaccacccccctgctggagtacatcaagaacagaaagctggagaagcagagaatcagagaggagaagagagaggagagaagaagaagagagctggagaagaagagactgagagaggaggagaagagaagaagaagagaggaggagagatgcaagaagaaggagaccgacaagcagaagaagatcgccgagaaggaggtgagaatcaagctgctgaagaagcccgagaagggcgaggagcccaccaccgagaagcccaaggagagaggcgaggagatcgacaccggcggcggcaagcaggagagctgcgcccccggcgccgtggtgaaggccagacccatggagggcagcctggaggagccccaggagaccagccacagcggcagcgacaaggagcacagagacgtggagagaagccaggagcaggagagcgaggcccagagataccacgtggacgacggcagaagacacagagcccaccacgagcccgagagactgagcagaagaagcgaggacgagcagagatggggcaagggccccggccaggacagaggcaagaagggcagccaggacagcggcgcccccggcgaggccatggagagactgggcagagcccagagatgcgacgacagccccgcccccagaaaggagagactggccaacaaggacagacccgccctgcagctgtacgaccccggcgccagattcagagccagagagtgcggcggcaacagaagaatctgcaaggccgagggcagcggcaccggccccgagaagagagaggaggccgagtag

SEQ ID NO: 104716 - DNA, 1431 bp, synthetic construct
  misc_feature 1..1431: note = Description of Artificial Sequence: Synthetic coding sequence
  source 1..1431: mol_type = other DNA
atgagaagcgagaaggagggcgccggcggcctgagagccgccgtggccgccagaggccccagcggcagagagaagctgagcgccctggaggtgcagttccacagagacagccagcagcaggaggccgagaccccccccaccagcagcagcggctgcggcggcggcgccggcaagcccagagaggagaagagaaccgccctgagcaaggtggtgatcagaagactgccccccggcctgaccaaggagcagctggaggagcagctgagacccctgcccgcccacgactacttcgagttcttcgccgccgacctgagcctgtacccccacctgtacagcagagcctacatcaacttcagaaaccccgacgacatcctgctgttcagagacagattcgacggctacatcttcctggacagcaagggcctggagtaccccgccgtggtggagttcgcccccttccagaagatcgccaagaagaagctgagaaagaaggacgccaagaccggcagcatcgaggacgaccccgagtacaagaagttcctggagacctactgcgtggaggaggagaagaccagcgccaaccccgagaccctgctgggcgagatggaggccaagaccagagagctgatcgccagaagaaccacccccctgctggagtacatcaagaacagaaagctggagaagcagagaatcagagaggagaagagagaggagagaagaagaagagagctggagaagaagagactgagagaggaggagaagagaagaagaagagaggaggagagatgcaagaagaaggagaccgacaagcagaagaagatcgccgagaaggaggtgagaatcaagctgctgaagaagcccgagaagggcgaggagcccaccaccgagaagcccaaggagagaggcgaggagatcgacaccggcggcggcaagcaggagagctgcgcccccggcgccgtggtgaaggccagacccatggagggcagcctggaggagccccaggagaccagccacagcggcagcgacaaggagcacagagacgtggagagaagccaggagcaggagagcgaggcccagagataccacgtggacgacggcagaagacacagagcccaccacgagcccgagagactgagcagaagaagcgaggacgagcagagatggggcaagggccccggccaggacagaggcaagaagggcagccaggacagcggcgcccccggcgaggccatggagagactgggcagagcccagagatgcgacgacagccccgcccccagaaaggagagactggccaacaaggacagacccgccctgcagctgtacgaccccggcgccagattcagagccagagagtgcggcggcaacagaagaatctgcaaggccgagggcagcggcaccggccccgagaagagagaggaggccgagtag

SEQ ID NO: 104717 - DNA, 627 bp, synthetic construct
  misc_feature 1..627: note = Description of Artificial Sequence: Synthetic coding sequence
  source 1..627: mol_type = other DNA
atggaggccaagaccagagagctgatcgccagaagaaccacccccctgctggagtacatcaagaacagaaagctggagaagcagagaatcagagaggagaagagagaggagagaagaagaagagagctggagaagaagagactgagagaggaggagaagagaagaagaagagaggaggagagatgcaagaagaaggagaccgacaagcagaagaagatcgccgagaaggaggtgagaatcaagctgctgaagaagcccgagaagggcgaggagcccaccaccgagaagcccaaggagagaggcgaggagatcgacaccggcggcggcaagcaggagagctgcgcccccggcgccgtggtgaaggccagacccatggagggcagcctggaggagccccaggagaccagccacagcggcagcgacaaggagcacagagacgtggagagaagccaggagcaggagagcgaggcccccagaaaggagagactggccaacaaggacagacccgccctgcagctgtacgaccccggcgccagattcagagccagagagtgcggcggcaacagaagaatctgcaaggccgagggcagcggcaccggccccgagaagagagaggaggccgagtag

SEQ ID NO: 104718 - DNA, 1452 bp, synthetic construct
  misc_feature 1..1452: note = Description of Artificial Sequence: Synthetic coding sequence
  source 1..1452: mol_type = other DNA
atgaaggaggagaaggagcacagacccaaggagaagagagtgaccctgctgacccccgccggcgccaccggcagcggcggcggcaccagcggcgacagcagcaagggcgaggacaagcaggacagaaacaaggagaagaaggaggccctgagcaaggtggtgatcagaagactgccccccaccctgaccaaggagcagctgcaggagcacctgcagcccatgcccgagcacgactacttcgagttcttcagcaacgacaccagcctgtacccccacatgtacgccagagcctacatcaacttcaagaaccaggaggacatcatcctgttcagagacagattcgacggctacgtgttcctggacaacaagggccaggagtaccccgccatcgtggagttcgcccccttccagaaggccgccaagaagaagaccaagaagagagacaccaaggtgggcaccatcgacgacgaccccgagtacagaaagttcctggagagctacgccaccgacaacgagaagatgaccagcacccccgagaccctgctggaggagatcgaggccaagaacagagagctgatcgccaagaagaccacccccctgctgagcttcctgaagaacaagcagagaatgagagaggagaagagagaggagagaagaagaagagagatcgagagaaagagacagagagaggaggagagaagaaagtggaaggaggaggagaagagaaagagaaaggacatcgagaagctgaagaagatcgacagaatccccgagagagacaagctgaaggacgagcccaagatcaaggtgcacagattcctgctgcaggccgtgaaccagaagaacctgctgaagaagcccgagaagggcgacgagaaggagctggacaagagagagaaggccaagaagctggacaaggagaacctgagcgacgagagagccagcggccagagctgcaccctgcccaagagaagcgacagcgagctgaaggacgagaagcccaagagacccgaggacgagagcggcagagactacagagagagagagagagagtacgagagagaccaggagagaatcctgagagagagagagagactgaagagacaggaggaggagagaagaagacagaaggagagatacgagaaggagaagaccttcaagagaaaggaggaggagatgaagaaggagaaggacaccctgagagacaagggcaagaaggccgagagcaccgagagcatcggcagcagcgagaagaccgagaagaaggaggaggtggtgaagagagacagaatcagaaacaaggacagacccgccatgcagctgtaccagcccggcgccagaagcagaaacagactgtgcccccccgacgacagcaccaagagcggcgacagcgccgccgagagaaagcaggagagcggcatcagccacagaaaggagggcggcgaggagtag

SEQ ID NO: 104719 - DNA, 1413 bp, synthetic construct
  misc_feature 1..1413: note = Description of Artificial Sequence: Synthetic coding sequence
  source 1..1413: mol_type = other DNA
atgaaggaggagaaggagcacagacccaaggagaagagagtgaccctgctgacccccgccggcgccaccggcagcggcggcggcaccagcggcgacagcagcaagggcgaggacaagcaggacagaaacaaggagaagaaggaggccctgagcaaggtggtgatcagaagactgccccccaccctgaccaaggagcagctgcaggagcacctgcagcccatgcccgagcacgactacttcgagttcttcagcaacgacaccagcctgtacccccacatgtacgccagagcctacatcaacttcaagaaccaggaggacatcatcctgttcagagacagattcgacggctacgtgttcctggacaacaagggccaggagtaccccgccatcgtggagttcgcccccttccagaaggccgccaagaagaagaccaagaagagagacaccaaggtgggcaccatcgacgacgaccccgagtacagaaagttcctggagagctacgccaccgacaacgagaagatgaccagcacccccgagaccctgctggaggagatcgaggccaagaacagagagctgatcgccaagaagaccacccccctgctgagcttcctgaagaacaagcagagaatgagagaggagaagagagaggagagaagaagaagagagatcgagagaaagagacagagagaggaggagagaagaaagtggaaggaggaggagaagagaaagagaaaggacatcgagaagctgaagaagatcgacagaatccccgagagagacaagctgaaggacgagcccaagatcaagctgctgaagaagcccgagaagggcgacgagaaggagctggacaagagagagaaggccaagaagctggacaaggagaacctgagcgacgagagagccagcggccagagctgcaccctgcccaagagaagcgacagcgagctgaaggacgagaagcccaagagacccgaggacgagagcggcagagactacagagagagagagagagagtacgagagagaccaggagagaatcctgagagagagagagagactgaagagacaggaggaggagagaagaagacagaaggagagatacgagaaggagaagaccttcaagagaaaggaggaggagatgaagaaggagaaggacaccctgagagacaagggcaagaaggccgagagcaccgagagcatcggcagcagcgagaagaccgagaagaaggaggaggtggtgaagagagacagaatcagaaacaaggacagacccgccatgcagctgtaccagcccggcgccagaagcagaaacagactgtgcccccccgacgacagcaccaagagcggcgacagcgccgccgagagaaagcaggagagcggcatcagccacagaaaggagggcggcgaggagtag

SEQ ID NO: 104720 - DNA, 657 bp, synthetic construct
  misc_feature 1..657: note = Description of Artificial Sequence: Synthetic coding sequence
  source 1..657: mol_type = other DNA
atgaaggaggagaaggagcacagacccaaggagaagagagtgaccctgctgacccccgccggcgccaccggcagcggcggcggcaccagcggcgacagcagcaagggcgaggacaagcaggacagaaacaaggagaagaaggaggccctgagcaaggtggtgatcagaagactgccccccaccctgaccaaggagcagctgcaggagcacctgcagcccatgcccgagcacgactacttcgagttcttcagcaacgacaccagcctgtacccccacatgtacgccagagcctacatcaacttcaagaaccaggaggacatcatcctgttcagagacagattcgacggctacgtgttcctggacaacaagggccaggagtaccccgccatcgtggagttcgcccccttccagaaggccgccaagaagaagaccaagaagagagacaccaaggtgggcaccatcgacgacgaccccgagtacagaaagttcctggagagctacgccaccgacaacgagaagatgaccagcacccccgagaccctgctggaggagatcgaggccaagaacagagagctgatcgccaagaagaccacccccctgctgagcttcctgaagaacaagcagagaatgagagaggagaagagagaggacttctag

SEQ ID NO: 104721 - DNA, 441 bp, synthetic construct
  misc_feature 1..441: note = Description of Artificial Sequence: Synthetic coding sequence
  source 1..441: mol_type = other DNA
atgatgtggcagaagtacgccggcagcagaagaagcatgcccctgggcgccagaatcctgttccacggcgtgttctacgccggcggcttcgccatcgtgtactacctgatccagaagttccacagcagagccctgtactacaagctggccgtggagcagctgcagagccaccccgaggcccaggaggccctgggcccccccctgaacatccactacctgaagctgatcgacagagagaacttcgtggacatcgtggacgccaagctgaagatccccgtgagcggcagcaagagcgagggcctgctgtacgtgcacagcagcagaggcggccccttccagagatggcacctggacgaggtgttcctggagctgaaggacggccagcagatccccgtgttcaagctgagcggcgagaacggcgacgaggtgaagaaggagtag

SEQ ID NO: 104722 - DNA, 2667 bp, synthetic construct
  misc_feature 1..2667: note = Description of Artificial Sequence: Synthetic coding sequence
  source 1..2667: mol_type = other DNA
atggagggcgacgactgcgagttcagatacggcgacggcaccaacgaggcccaggacaacgacttccccaccgtggagagaagcagactgcaggagatgctgagcctgctgggcctggagacctaccaggtgcagaagctgagcctgcaggacagcctgcagatcagcttcgacagcatgaagaactgggccccccaggtgcccaaggacctgccctggaacttcctgagaaagctgcaggccctgaacgccgacgccagaaacaccaccatggtgctggacgtgctgcccgacgccagacccgtggagaaggagagccagatggaggaggagatcatctactgggaccccgccgacgacctggccgccgacatctacagcttcagcgagctgcccacccccgacacccccgtgaaccccctggacctgctgtgcgccctgctgctgagcagcgacagcttcctgcagcaggagatcgccctgaagatggccctgtgccagttcgccctgcccctggtgctgcccgacagcgagaaccactaccacaccttcctgctgtgggccatgagaggcatcgtgagaacctggtggagccagccccccagaggcatgggcagcttcagagaggacagcgtggtgctgagcagagcccccgccttcgccttcgtgagaatggacgtgagcagcaacagcaagagccagctgctgaacgccgtgctgagccccggccacagacagtgggactgcttctggcacagagacctgaacctgggcaccaacgccagagagatcagcgacggcctggtggagatcagctggttcttccccagcggcagagaggacctggacatcttccccgagcccgtggccttcctgaacctgagaggcgacatcggcagccactggctgcagttcaagctgctgaccgagatcagcagcgccgtgttcatcctgaccgacaacatcagcaagaaggagtacaagctgctgtacagcatgaaggagagcaccaccaagtactacttcatcctgagcccctacagaggcaagagaaacaccaacctgagattcctgaacaagctgatccccgtgctgaagatcgaccacagccacgtgctggtgaaggtgagcagcaccgacagcgacagcttcgtgaagagaatcagagccatcgtgggcaacgtgctgagagccccctgcagaagagtgagcgtggaggacatggcccacgccgccagaaagctgggcctgaaggtggacgaggactgcgaggagtgccagaaggccaaggacagaatggagagaatcaccagaaagatcaaggacagcgacgcctacagaagagacgagctgagactgcagggcgacccctggagaaaggccgcccaggtggagaaggagttctgccagctgcagtgggccgtggacccccccgagaagcacagagccgagctgagaagaagactgctggagctgagaatgcagcagaacggccacgaccccagcagcggcgtgcaggagttcatcagcggcatcagcagccccagcctgagcgagaagcagtacttcctgagatggatggagtggggcctggccagagtggcccagcccagactgagacagccccccgagaccctgctgaccctgagacccaagcacggcggcaccaccgacgtgggcgagcccctgtggcccgagcccctgggcgtggagcacttcctgagagagatgggccagttctacgaggccgagagctgcctggtggaggccggcagactgcccgccggccagagaagattcgcccacttccccggcctggccagcgagctgctgctgaccggcctgcccctggagctgatcgacggcagcaccctgagcatgcccgtgagatgggtgaccggcctgctgaaggagctgcacgtgagactggagagaagaagcagactggtggtgctgagcaccgtgggcgtgcccggcaccggcaagagcaccctgctgaacaccatgttcggcctgagattcgccaccggcaagagctgcggccccagaggcgccttcatgcagctgatcaccgtggccgagggcttcagccaggacctgggctgcgaccacatcctggtgatcgacagcggcggcctgatcggcggcgccctgaccagcgccggcgacagattcgagctggaggccagcctggccaccctgctgatgggcctgagcaacgtgaccgtgatcagcctggccgagaccaaggacatccccgccgccatcctgcacgccttcctgagactggagaagaccggccacatgcccaactaccagttcgtgtaccagaacctgcacgacgtgagcgtgcccggccccagacccagagacaagagacagctgctggacccccccggcgacctgagcagagccgccgcccagatggagaagcagggcgacggcttcagagccctggccggcctggccttctgcgaccccgagaagcagcacatctggcacatccccggcctgtggcacggcgccccccccatggccgccgtgagcctggcctacagcgaggccatcttcgagctgaagagatgcctgctggagaacatcagaaacggcctgagcaaccagaacaagaacatccagcagctgatcgagctggtgagaagactgtag

SEQ ID NO: 104723 - DNA, 2769 bp, synthetic construct
  misc_feature 1..2769: note = Description of Artificial Sequence: Synthetic coding sequence
  source 1..2769: mol_type = other DNA
atggccagccccggccacagcgacctgggcgaggtggcccccgagatcaaggccagcgagagaagaaccgccgtggccatcgccgacctggagtggagagagatggagggcgacgactgcgagttcagatacggcgacggcaccaacgaggcccaggacaacgacttccccaccgtggagagaagcagactgcaggagatgctgagcctgctgggcctggagacctaccaggtgcagaagctgagcctgcaggacagcctgcagatcagcttcgacagcatgaagaactgggccccccaggtgcccaaggacctgccctggaacttcctgagaaagctgcaggccctgaacgccgacgccagaaacaccaccatggtgctggacgtgctgcccgacgccagacccgtggagaaggagagccagatggaggaggagatcatctactgggaccccgccgacgacctggccgccgacatctacagcttcagcgagctgcccacccccgacacccccgtgaaccccctggacctgctgtgcgccctgctgctgagcagcgacagcttcctgcagcaggagatcgccctgaagatggccctgtgccagttcgccctgcccctggtgctgcccgacagcgagaaccactaccacaccttcctgctgtgggccatgagaggcatcgtgagaacctggtggagccagccccccagaggcatgggcagcttcagagaggacagcgtggtgctgagcagagcccccgccttcgccttcgtgagaatggacgtgagcagcaacagcaagagccagctgctgaacgccgtgctgagccccggccacagacagtgggactgcttctggcacagagacctgaacctgggcaccaacgccagagagatcagcgacggcctggtggagatcagctggttcttccccagcggcagagaggacctggacatcttccccgagcccgtggccttcctgaacctgagaggcgacatcggcagccactggctgcagttcaagctgctgaccgagatcagcagcgccgtgttcatcctgaccgacaacatcagcaagaaggagtacaagctgctgtacagcatgaaggagagcaccaccaagtactacttcatcctgagcccctacagaggcaagagaaacaccaacctgagattcctgaacaagctgatccccgtgctgaagatcgaccacagccacgtgctggtgaaggtgagcagcaccgacagcgacagcttcgtgaagagaatcagagccatcgtgggcaacgtgctgagagccccctgcagaagagtgagcgtggaggacatggcccacgccgccagaaagctgggcctgaaggtggacgaggactgcgaggagtgccagaaggccaaggacagaatggagagaatcaccagaaagatcaaggacagcgacgcctacagaagagacgagctgagactgcagggcgacccctggagaaaggccgcccaggtggagaaggagttctgccagctgcagtgggccgtggacccccccgagaagcacagagccgagctgagaagaagactgctggagctgagaatgcagcagaacggccacgaccccagcagcggcgtgcaggagttcatcagcggcatcagcagccccagcctgagcgagaagcagtacttcctgagatggatggagtggggcctggccagagtggcccagcccagactgagacagccccccgagaccctgctgaccctgagacccaagcacggcggcaccaccgacgtgggcgagcccctgtggcccgagcccctgggcgtggagcacttcctgagagagatgggccagttctacgaggccgagagctgcctggtggaggccggcagactgcccgccggccagagaagattcgcccacttccccggcctggccagcgagctgctgctgaccggcctgcccctggagctgatcgacggcagcaccctgagcatgcccgtgagatgggtgaccggcctgctgaaggagctgcacgtgagactggagagaagaagcagactggtggtgctgagcaccgtgggcgtgcccggcaccggcaagagcaccctgctgaacaccatgttcggcctgagattcgccaccggcaagagctgcggccccagaggcgccttcatgcagctgatcaccgtggccgagggcttcagccaggacctgggctgcgaccacatcctggtgatcgacagcggcggcctgatcggcggcgccctgaccagcgccggcgacagattcgagctggaggccagcctggccaccctgctgatgggcctgagcaacgtgaccgtgatcagcctggccgagaccaaggacatccccgccgccatcctgcacgccttcctgagactggagaagaccggccacatgcccaactaccagttcgtgtaccagaacctgcacgacgtgagcgtgcccggccccagacccagagacaagagacagctgctggacccccccggcgacctgagcagagccgccgcccagatggagaagcagggcgacggcttcagagccctggccggcctggccttctgcgaccccgagaagcagcacatctggcacatccccggcctgtggcacggcgccccccccatggccgccgtgagcctggcctacagcgaggccatcttcgagctgaagagatgcctgctggagaacatcagaaacggcctgagcaaccagaacaagaacatccagcagctgatcgagctggtgagaagactgtag

SEQ ID NO: 104724 - DNA, 492 bp, synthetic construct
  misc_feature 1..492: note = Description of Artificial Sequence: Synthetic coding sequence
  source 1..492: mol_type = other DNA
atggagggcgacgactgcgagttcagatacggcgacggcaccaacgaggcccaggacaacgacttccccaccgtggagagaagcagactgcaggagatgctgagcctgctgggcctggagacctaccaggtgcagaagctgagcctgcaggacagcctgcagatcagcttcgacagcatgaagaactgggccccccaggtgcccaaggacctgccctggaacttcctgagaaagctgcaggccctgaacgccgacgccagaaacaccaccatggtgctggacgtgctgcccgacgccagacccgtggagaaggagagccagatggaggaggagatcatctactgggaccccgccgacgacctggccgccgacatctacagcttcagcgagctgcccacccccgacacccccgtgaaccccctggacctgctgtgcgccctgctgctgagcagcgacagcttcctgcagcaggagatcgccctgaagatgtag

SEQ ID NO: 104725 - DNA, 2667 bp, synthetic construct; identical to SEQ ID NO: 104722
  misc_feature 1..2667: note = Description of Artificial Sequence: Synthetic coding sequence
  source 1..2667: mol_type = other DNA

SEQ ID NO: 104726 - DNA, 2667 bp, synthetic construct; identical to SEQ ID NO: 104722
  misc_feature 1..2667: note = Description of Artificial Sequence: Synthetic coding sequence
  source 1..2667: mol_type = other DNA

SEQ ID NO: 104727 - DNA, 2796 bp, synthetic construct
  misc_feature 1..2796: note = Description of Artificial Sequence: Synthetic coding sequence
  source 1..2796: mol_type = other DNA
atggccagccccggcatcgaggtggagctgctgggcaagggccacagcgacctgggcgaggtggcccccgagatcaaggccagcgagagaagaaccgccgtggccatcgccgacctggagtggagagagatggagggcgacgactgcgagttcagatacggcgacggcaccaacgaggcccaggacaacgacttccccaccgtggagagaagcagactgcaggagatgctgagcctgctgggcctggagacctaccaggtgcagaagctgagcctgcaggacagcctgcagatcagcttcgacagcatgaagaactgggccccccaggtgcccaaggacctgccctggaacttcctgagaaagctgcaggccctgaacgccgacgccagaaacaccaccatggtgctggacgtgctgcccgacgccagacccgtggagaaggagagccagatggaggaggagatcatctactgggaccccgccgacgacctggccgccgacatctacagcttcagcgagctgcccacccccgacacccccgtgaaccccctggacctgctgtgcgccctgctgctgagcagcgacagcttcctgcagcaggagatcgccctgaagatggccctgtgccagttcgccctgcccctggtgctgcccgacagcgagaaccactaccacaccttcctgctgtgggccatgagaggcatcgtgagaacctggtggagccagccccccagaggcatgggcagcttcagagaggacagcgtggtgctgagcagagcccccgccttcgccttcgtgagaatggacgtgagcagcaacagcaagagccagctgctgaacgccgtgctgagccccggccacagacagtgggactgcttctggcacagagacctgaacctgggcaccaacgccagagagatcagcgacggcctggtggagatcagctggttcttccccagcggcagagaggacctggacatcttccccgagcccgtggccttcctgaacctgagaggcgacatcggcagccactggctgcagttcaagctgctgaccgagatcagcagcgccgtgttcatcctgaccgacaacatcagcaagaaggagtacaagctgctgtacagcatgaaggagagcaccaccaagtactacttcatcctgagcccctacagaggcaagagaaacaccaacctgagattcctgaacaagctgatccccgtgctgaagatcgaccacagccacgtgctggtgaaggtgagcagcaccgacagcgacagcttcgtgaagagaatcagagccatcgtgggcaacgtgctgagagccccctgcagaagagtgagcgtggaggacatggcccacgccgccagaaagctgggcctgaaggtggacgaggactgcgaggagtgccagaaggccaaggacagaatggagagaatcaccagaaagatcaaggacagcgacgcctacagaagagacgagctgagactgcagggcgacccctggagaaaggccgcccaggtggagaaggagttctgccagctgcagtgggccgtggacccccccgagaagcacagagccgagctgagaagaagactgctggagctgagaatgcagcagaacggccacgaccccagcagcggcgtgcaggagttcatcagcggcatcagcagccccagcctgagcgagaagcagtacttcctgagatggatggagtggggcctggccagagtggcccagcccagactgagacagccccccgagaccctgctgaccctgagacccaagcacggcggcaccaccgacgtgggcgagcccctgtggcccgagcccctgggcgtggagcacttcctgagagagatgggccagttctacgaggccgagagctgcctggtggaggccggcagactgcccgccggccagagaagattcgcccacttccccggcctggccagcgagctgctgctgaccggcctgcccctggagctgatcgacggcagcaccctgagcatgcccgtgagatgggtgaccggcctgctgaaggagctgcacgtgagactggagagaagaagcagactggtggtgctgagcaccgtgggcgtgcccggcaccggcaagagcaccctgctgaacaccatgttcggcctgagattcgccaccggcaagagctgcggccccagaggcgccttcatgcagctgatcaccgtggccgagggcttcagccaggacctgggctgcgaccacatcctggtgatcgacagcggcggcctgatcggcggcgccctgaccagcgccggcgacagattcgagctggaggccagcctggccaccctgctgatgggcctgagcaacgtgaccgtgatcagcctggccgagaccaaggacatccccgccgccatcctgcacgccttcctgagactggagaagaccggccacatgcccaactaccagttcgtgtaccagaacctgcacgacgtgagcgtgcccggccccagacccagagacaagagacagctgctggacccccccggcgacctgagcagagccgccgcccagatggagaagcagggcgacggcttcagagccctggccggcctggccttctgcgaccccgagaagcagcacatctggcacatccccggcctgtggcacggcgccccccccatggccgccgtgagcctggcctacagcgaggccatcttcgagctgaagagatgcctgctggagaacatcagaaacggcctgagcaaccagaacaagaacatccagcagctgatcgagctggtgagaagactgtag

SEQ ID NO: 104728 - DNA, 369 bp, synthetic construct
  misc_feature 1..369: note = Description of Artificial Sequence: Synthetic coding sequence
  source 1..369: mol_type = other DNA
atggagggcgacgactgcgagttcagatacggcgacggcaccaacgaggcccaggacaacgacttccccaccgtggagagaagcagactgcaggagatgctgagcctgctgggcctggagacctaccaggtgcagaagctgagcctgcaggacagcctgcagatcagcttcgacagcatgaagaactgggccccccaggtgcccaaggacctgccctggaacttcctgagaaagctgcaggccctgaacgccgacgccagaaacaccaccatggtgctggacgtgctgcccgacgccagacccgtggagaaggagagccagatggaggaggagatcatctactgggaccccgccgacgacctggcctag

SEQ ID NO: 104729 - DNA, 1623 bp, synthetic construct
  misc_feature 1..1623: note = Description of Artificial Sequence: Synthetic coding sequence
  source 1..1623: mol_type = other DNA
atggcctgggtgctgaagatggacgaggtgatcgagagcggcctggtgcacgacttcgacgccagcctgagcggcatcggccaggagctgggcgccggcgcctacagcatgagcgacgtgctggccctgcccatcttcaagcaggaggacagcagcctgcccctggacggcgagaccgagcacccccccttccagtacgtgatgtgcgccgccaccagccccgccgtgaagctgcacgacgagaccctgacctacctgaaccagggccagagctacgagatcagaatgctggacaacagaaagatgggcgacatgcccgagatcaacggcaagctggtgaagagcatcatcagagtggtgttccacgacagaagactgcagtacaccgagcaccagcagctggagggctggaagtggaacagacccggcgacagactgctggacctggacatccccatgagcgtgggcatcatcgacaccagaaccaaccccagccagctgaacgccgtggagttcctgtgggaccccgccaagagaaccagcgccttcatccaggtgcactgcatcagcaccgagttcacccccagaaagcacggcggcgagaagggcgtgcccttcagaatccaggtggacaccttcaagcagaacgagaacggcgagtacaccgaccacctgcacagcgccagctgccagatcaaggtgttcaagcccaagggcgccgacagaaagcagaagaccgacagagagaagatggagaagagaaccgcccacgagaaggagaagtaccagcccagctacgacaccaccatcctgaccgagatgagactggagcccatcatcgaggacgccgtggagcacgagcagaagaagagcagcaagagaaccctgcccgccgactacggcgacagcctggccaagagaggcagctgcagcccctggcccgacgcccccaccgcctacgtgaacaacagccccagccccgcccccaccttcaccagcccccagcagagcacctgcagcgtgcccgacagcaacagcagcagccccaaccaccagggcgacggcgccagccagaccagcggcgagcagatccagcccagcgccaccatccaggagacccagcagtggctgctgaagaacagattcagcagctacaccagactgttcagcaacttcagcggcgccgacctgctgaagctgaccaaggaggacctggtgcagatctgcggcgccgccgacggcatcagactgtacaacagcctgaagagcagaagcgtgagacccagactgaccatctacgtgtgcagagagcagcccagcagcaccgtgctgcagggccagcagcaggccgccagcagcgccagcgagaacggcagcggcgccccctacgtgtaccacgccatctacctggaggagatgatcgccagcgaggtggccagaaagctggccctggtgttcaacatccccctgcaccagatcaaccaggtgtacagacagggccccaccggcatccacatcctggtgagcgaccagatggtgcagaacttccaggacgagagctgcttcctgttcagcaccgtgaaggccgagagcagcgacggcatccacatcatcctgaagtag

SEQ ID NO: 104730 - DNA, 1623 bp, synthetic construct; identical to SEQ ID NO: 104729
  misc_feature 1..1623: note = Description of Artificial Sequence: Synthetic coding sequence
  source 1..1623: mol_type = other DNA

SEQ ID NO: 104731 - DNA, 1515 bp, synthetic construct
  misc_feature 1..1515: note = Description of Artificial Sequence: Synthetic coding sequence
  source 1..1515: mol_type = other DNA
atggcctgggtgctgaagatggacgaggtgatcgagagcggcctggtgcacgacttcgacgccagcctgagcggcatcggccaggagctgggcgccggcgcctacagcatgagcgacgtgctggccctgcccatcttcaagcaggaggacagcagcctgcccctggacggcgagaccgagcacccccccttccagtacgtgatgtgcgccgccaccagccccgccgtgaagctgcacgacgagaccctgacctacctgaaccagggccagagctacgagatcagaatgctggacaacagaaagatgggcgacatgcccgagatcaacggcaagctggtgaagagcatcatcagagtggtgttccacgacagaagactgcagtacaccgagcaccagcagctggagggctggaagtggaacagacccggcgacagactgctggacctggacatccccatgagcgtgggcatcatcgacaccagaaccaaccccagccagctgaacgccgtggagttcctgtgggaccccgccaagagaaccagcgccttcatccaggtgcactgcatcagcaccgagttcacccccagaaagcacggcggcgagaagggcgtgcccttcagaatccaggtggacaccttcaagcagaacgagaacggcgagtacaccgaccacctgcacagcgccagctgccagatcaaggtgttcaagcccaagggcgccgacagaaagcagaagaccgacagagagaagatggagaagagaaccgcccacgagaaggagaagtaccagcccagctacgacaccaccatcctgaccgagtgcagcccctggcccgacgcccccaccgcctacgtgaacaacagccccagccccgcccccaccttcaccagcccccagcagagcacctgcagcgtgcccgacagcaacagcagcagccccaaccaccagggcgacggcgccagccagaccagcggcgagcagatccagcccagcgccaccatccaggagacccagcagtggctgctgaagaacagattcagcagctacaccagactgttcagcaacttcagcggcgccgacctgctgaagctgaccaaggaggacctggtgcagatctgcggcgccgccgacggcatcagactgtacaacagcctgaagagcagaagcgtgagacccagactgaccatctacgtgtgcagagagcagcccagcagcaccgtgctgcagggccagcagcaggccgccagcagcgccagcgagaacggcagcggcgccccctacgtgtaccacgccatctacctggaggagatgatcgccagcgaggtggccagaaagctggccctggtgttcaacatccccctgcaccagatcaaccaggtgtacagacagggccccaccggcatccacatcctggtgagcgaccagatggtgcagaacttccaggacgagagctgcttcctgttcagcaccgtgaaggccgagagcagcgacggcatccacatcatcctgaagtag

SEQ ID NO: 104732 - DNA, 447 bp, synthetic construct
  misc_feature 1..447: note = Description of Artificial Sequence: Synthetic coding sequence
  source 1..447: mol_type = other DNA
atggcctgggtgctgaagatggacgaggtgatcgagagcggcctggtgcacgacttcgacgccagcctgagcggcatcggccaggagctgggcgccggcgcctacagcatgagcgacgtgctggccctgcccatcttcaagcaggaggacagcagcctgcccctggacggcgagaccgagcacccccccttccagtacgtgatgtgcgccgccaccagccccgccgtgaagctgcacgacgagaccctgacctacctgaaccagggccagagctacgagatcagaatgctggacaacagaaagatgggcgacatgcccgagatcaacggcaagctggtgaagagcatcatcagagtggtgttccacgacagaagactgcagtacaccgagcaccagcagctggagggctggaagtggaacagacccggcgacagactgctggactag

SEQ ID NO: 104733 - DNA, 2295 bp, synthetic construct
  misc_feature 1..2295: note = Description of Artificial Sequence: Synthetic coding sequence
  source 1..2295: mol_type = other DNA
atgaacggcgaggccgactgccccaccgacctggagatggccgcccccaagggccaggacagatggagccaggaggacatgctgaccctgctggagtgcatgaagaacaacctgcccagcaacgacagcagcaagttcaagaccaccgagagccacatggactgggagaaggtggccttcaaggacttcagcggcgacatgtgcaagctgaagtgggtggagatcagcaacgaggtgagaaagttcagaaccctgaccgagctgatcctggacgcccaggagcacgtgaagaacccctacaagggcaagaagctgaagaagcaccccgacttccccaagaagcccctgaccccctacttcagattcttcatggagaagagagccaagtacgccaagctgcaccccgagatgagcaacctggacctgaccaagatcctgagcaagaagtacaaggagctgcccgagaagaagaagatgaagtacatccaggacttccagagagagaagcaggagttcgagagaaacctggccagattcagagaggaccaccccgacctgatccagaacgccaagaagagcgacatccccgagaagcccaagaccccccagcagctgtggtacacccacgagaagaaggtgtacctgaaggtgagacccgacgccaccaccaaggaggtgaaggacagcctgggcaagcagtggagccagctgagcgacaagaagagactgaagtggatccacaaggccctggagcagagaaaggagtacgaggagatcatgagagactacatccagaagcaccccgagctgaacatcagcgaggagggcatcaccaagagcaccctgaccaaggccgagagacagctgaaggacaagttcgacggcagacccaccaagcccccccccaacagctacagcctgtactgcgccgagctgatggccaacatgaaggacgtgcccagcaccgagagaatggtgctgtgcagccagcagtggaagctgctgagccagaaggagaaggacgcctaccacaagaagtgcgaccagaagaagaaggactacgaggtggagctgctgagattcctggagagcctgcccgaggaggagcagcagagagtgctgggcgaggagaagatgctgaacatcaacaagaagcaggccaccagccccgccagcaagaagcccgcccaggagggcggcaagggcggcagcgagaagcccaagagacccgtgagcgccatgttcatcttcagcgaggagaagagaagacagctgcaggaggagagacccgagctgagcgagagcgagctgaccagactgctggccagaatgtggaacgacctgagcgagaagaagaaggccaagtacaaggccagagaggccgccctgaaggcccagagcgagagaaagcccggcggcgagagagaggagagaggcaagctgcccgagagccccaagagagccgaggagatctggcagcagagcgtgatcggcgactacctggccagattcaagaacgacagagtgaaggccctgaaggccatggagatgacctggaacaacatggagaagaaggagaagctgatgtggatcaagaaggccgccgaggaccagaagagatacgagagagagctgagcgagatgagagccccccccgccgccaccaacagcagcaagaagatgaagttccagggcgagcccaagaagccccccatgaacggctaccagaagttcagccaggagctgctgagcaacggcgagctgaaccacctgcccctgaaggagagaatggtggagatcggcagcagatggcagagaatcagccagagccagaaggagcactacaagaagctggccgaggagcagcagaagcagtacaaggtgcacctggacctgtgggtgaagagcctgagcccccaggacagagccgcctacaaggagtacatcagcaacaagagaaagagcatgaccaagctgagaggccccaaccccaagagcagcagaaccaccctgcagagcaagagcgagagcgaggaggacgacgaggaggacgaggacgacgaggacgaggacgaggaggaggaggacgacgagaacggcgacagcagcgaggacggcggcgacagcagcgagagcagcagcgaggacgagagcgaggacggcgacgagaacgaggaggacgacgaggacgaggacgacgacgaggacgacgacgaggacgaggacaacgagagcgagggcagcagcagcagcagcagcagcagcggcgacagcagcgacagcgacagcaactag

SEQ ID NO: 104734 - DNA, 2184 bp, synthetic construct
  misc_feature 1..2184: note = Description of Artificial Sequence: Synthetic coding sequence
  source 1..2184: mol_type = other DNA
atgaacggcgaggccgactgccccaccgacctggagatggccgcccccaagggccaggacagatggagccaggaggacatgctgaccctgctggagtgcatgaagaacaacctgcccagcaacgacagcagcaagttcaagaccaccgagagccacatggactgggagaaggtggccttcaaggacttcagcggcgacatgtgcaagctgaagtgggtggagatcagcaacgaggtgagaaagttcagaaccctgaccgagctgatcctggacgcccaggagcacgtgaagaacccctacaagggcaagaagctgaagaagcaccccgacttccccaagaagcccctgaccccctacttcagattcttcatggagaagagagccaagtacgccaagctgcaccccgagatgagcaacctggacctgaccaagatcctgagcaagaagtacaaggagctgcccgagaagaagaagatgaagtacatccaggacttccagagagagaagcaggagttcgagagaaacctggccagattcagagaggaccaccccgacctgatccagaacgccaagaagagcgacatccccgagaagcccaagaccccccagcagctgtggtacacccacgagaagaaggtgtacctgaaggtgagacccgacgagatcatgagagactacatccagaagcaccccgagctgaacatcagcgaggagggcatcaccaagagcaccctgaccaaggccgagagacagctgaaggacaagttcgacggcagacccaccaagcccccccccaacagctacagcctgtactgcgccgagctgatggccaacatgaaggacgtgcccagcaccgagagaatggtgctgtgcagccagcagtggaagctgctgagccagaaggagaaggacgcctaccacaagaagtgcgaccagaagaagaaggactacgaggtggagctgctgagattcctggagagcctgcccgaggaggagcagcagagagtgctgggcgaggagaagatgctgaacatcaacaagaagcaggccaccagccccgccagcaagaagcccgcccaggagggcggcaagggcggcagcgagaagcccaagagacccgtgagcgccatgttcatcttcagcgaggagaagagaagacagctgcaggaggagagacccgagctgagcgagagcgagctgaccagactgctggccagaatgtggaacgacctgagcgagaagaagaaggccaagtacaaggccagagaggccgccctgaaggcccagagcgagagaaagcccggcggcgagagagaggagagaggcaagctgcccgagagccccaagagagccgaggagatctggcagcagagcgtgatcggcgactacctggccagattcaagaacgacagagtgaaggccctgaaggccatggagatgacctggaacaacatggagaagaaggagaagctgatgtggatcaagaaggccgccgaggaccagaagagatacgagagagagctgagcgagatgagagccccccccgccgccaccaacagcagcaagaagatgaagttccagggcgagcccaagaagccccccatgaacggctaccagaagttcagccaggagctgctgagcaacggcgagctgaaccacctgcccctgaaggagagaatggtggagatcggcagcagatggcagagaatcagccagagccagaaggagcactacaagaagctggccgaggagcagcagaagcagtacaaggtgcacctggacctgtgggtgaagagcctgagcccccaggacagagccgcctacaaggagtacatcagcaacaagagaaagagcatgaccaagctgagaggccccaaccccaagagcagcagaaccaccctgcagagcaagagcgagagcgaggaggacgacgaggaggacgaggacgacgaggacgaggacgaggaggaggaggacgacgagaacggcgacagcagcgaggacggcggcgacagcagcgagagcagcagcgaggacgagagcgaggacggcgacgagaacgaggaggacgacgaggacgaggacgacgacgaggacgacgacgaggacgaggacaacgagagcgagggcagcagcagcagcagcagcagcagcggcgacagcagcgacagcgacagcaactag

SEQ ID NO: 104735 - DNA, 2184 bp, synthetic construct; identical to SEQ ID NO: 104734
  misc_feature 1..2184: note = Description of Artificial Sequence: Synthetic coding sequence
  source 1..2184: mol_type = other DNA

SEQ ID NO: 104736 - DNA, 2295 bp, synthetic construct; identical to SEQ ID NO: 104733
  misc_feature 1..2295: note = Description of Artificial Sequence: Synthetic coding sequence
  source 1..2295: mol_type = other DNA

SEQ ID NO: 104737 - DNA, 2184 bp, synthetic construct; identical to SEQ ID NO: 104734
  misc_feature 1..2184: note = Description of Artificial Sequence: Synthetic coding sequence
  source 1..2184: mol_type = other DNA

SEQ ID NO: 104738 - DNA, 2295 bp, synthetic construct; identical to SEQ ID NO: 104733
  misc_feature 1..2295: note = Description of Artificial Sequence: Synthetic coding sequence
  source 1..2295: mol_type = other DNA

SEQ ID NO: 104739 - DNA, 2184 bp, synthetic construct; identical to SEQ ID NO: 104734
  misc_feature 1..2184: note = Description of Artificial Sequence: Synthetic coding sequence
  source 1..2184: mol_type = other DNA

SEQ ID NO: 104740 - DNA, 849 bp, synthetic construct
  misc_feature 1..849: note = Description of Artificial Sequence: Synthetic coding sequence
  source 1..849: mol_type = other DNA
atgaagggccagcagaagaccgccgagaccgaggagggcaccgtgcagatccaggagggcgccgtggccaccggcgaggaccccaccagcgtggccatcgccagcatccagagcgccgccaccttccccgaccccaacgtgaagtacgtgttcagaaccgagaacggcggccaggtgatgtacagagtgatccaggtgagcgagggccagctggacggccagaccgagggcaccggcgccatcagcggctaccccgccacccagagcatgacccaggccgtgatccagggcgccttcaccagcgacgacgccgtggacaccgagggcaccgccgccgagacccactacacctacttccccagcaccgccgtgggcgacggcgccggcggccagttcttcgtgatgatgagcccccaggaggtgctgcagggcggcagccagagaagcatcgcccccagaacccacccctacagccccaagagcgaggcccccagaaccaccagagacgagaagagaagagcccagcacaacgaggtggagagaagaagaagagacaagatcaacaactggatcgtgcagctgagcaagatcatccccgactgcagcatggagagcaccaagagcggccagagcaagggcggcatcctgagcaaggcctgcgactacatccaggagctgagacagagcaaccacagactgagcgaggagctgcagggcctggaccagctgcagctggacaacgacgtgctgagacagcaggtggaggacctgaagaacaagaacctgctgctgagagcccagctgagacaccacggcctggaggtggtgatcaagaacgacagcaactag

SEQ ID NO: 104741 - DNA, 933 bp, synthetic construct
  misc_feature 1..933: note = Description of Artificial Sequence: Synthetic coding sequence
  source 1..933: mol_type = other DNA
atgaagggccagcagaagaccgccgagaccgaggagggcaccgtgcagatccaggagggcgccgtggccaccggcgaggaccccaccagcgtggccatcgccagcatccagagcgccgccaccttccccgaccccaacgtgaagtacgtgttcagaaccgagaacggcggccaggtgatgtacagagtgatccaggtgagcgagggccagctggacggccagaccgagggcaccggcgccatcagcggctaccccgccacccagagcatgacccaggccgtgatccagggcgccttcaccagcgacgacgccgtggacaccgagggcaccgccgccgagacccactacacctacttccccagcaccgccgtgggcgacggcgccggcggcaccaccagcggcagcaccgccgccgtggtgaccacccagggcagcgaggccctgctgggccaggccaccccccccggcaccggccagttcttcgtgatgatgagcccccaggaggtgctgcagggcggcagccagagaagcatcgcccccagaacccacccctacagccccaagagcgaggcccccagaaccaccagagacgagaagagaagagcccagcacaacgaggtggagagaagaagaagagacaagatcaacaactggatcgtgcagctgagcaagatcatccccgactgcagcatggagagcaccaagagcggccagagcaagggcggcatcctgagcaaggcctgcgactacatccaggagctgagacagagcaaccacagactgagcgaggagctgcagggcctggaccagctgcagctggacaacgacgtgctgagacagcaggtggaggacctgaagaacaagaacctgctgctgagagcccagctgagacaccacggcctggaggtggtgatcaagaacgacagcaactag

SEQ ID NO: 104742 - DNA, 933 bp, synthetic construct; identical to SEQ ID NO: 104741
  misc_feature 1..933: note = Description of Artificial Sequence: Synthetic coding sequence
  source 1..933: mol_type = other DNA

SEQ ID NO: 104743 - DNA, 756 bp, synthetic construct
  misc_feature 1..756: note = Description of Artificial Sequence: Synthetic coding sequence
  source 1..756: mol_type = other DNA
atgtacagagtgatccaggtgagcgagggccagctggacggccagaccgagggcaccggcgccatcagcggctaccccgccacccagagcatgacccaggccgtgatccagggcgccttcaccagcgacgacgccgtggacaccgagggcaccgccgccgagacccactacacctacttccccagcaccgccgtgggcgacggcgccggcggcaccaccagcggcagcaccgccgccgtggtgaccacccagggcagcgaggccctgctgggccaggccaccccccccggcaccggccagttcttcgtgatgatgagcccccaggaggtgctgcagggcggcagccagagaagcatcgcccccagaacccacccctacagccccaagagcgaggcccccagaaccaccagagacgagaagagaagagcccagcacaacgaggtggagagaagaagaagagacaagatcaacaactggatcgtgcagctgagcaagatcatccccgactgcagcatggagagcaccaagagcggccagagcaagggcggcatcctgagcaaggcctgcgactacatccaggagctgagacagagcaaccacagactgagcgaggagctgcagggcctggaccagctgcagctggacaacgacgtgctgagacagcaggtggaggacctgaagaacaagaacctgctgctgagagcccagctgagacaccacggcctggaggtggtgatcaagaacgacagcaactag

SEQ ID NO: 104744 - DNA, 1155 bp, synthetic construct
  misc_feature 1..1155: note = Description of Artificial Sequence: Synthetic coding sequence
  source 1..1155: mol_type = other DNA
atggccggcgccgagtggaagagcctggaggagtgcctggagaagcacctgcccctgcccgacctgcaggaggtgaagagagtgctgtacggcaaggagctgagaaagctggacctgcccagagaggccttcgaggccgccagcagagaggacttcgagctgcagggctacgccttcgaggccgccgaggagcagctgagaagacccagaatcgtgcacgtgggcctggtgcagaacagaatccccctgcccgccaacgcccccgtggccgagcaggtgagcgccctgcacagaagaatcaaggccatcgtggaggtggccgccatgtgcggcgtgaacatcatctgcttccaggaggcctggaccatgcccttcgccttctgcaccagagagaagctgccctggaccgagttcgccgagagcgccgaggacggccccaccaccagattctgccagaagctggccaagaaccacgacatggtggtggtgagccccatcctggagagagacagcgagcacggcgacgtgctgtggaacaccgccgtggtgatcagcaacagcggcgccgtgctgggcaagaccagaaagaaccacatccccagagtgggcgacttcaacgagagcacctactacatggagggcaacctgggccaccccgtgttccagacccagttcggcagaatcgccgtgaacatctgctacggcagacaccaccccctgaactggctgatgtacagcatcaacggcgccgagatcatcttcaaccccagcgccaccatcggcgccctgagcgagagcctgtggcccatcgaggccagaaacgccgccatcgccaaccactgcttcacctgcgccatcaacagagtgggcaccgagcacttccccaacgagttcaccagcggcgacggcaagaaggcccaccaggacttcggctacttctacggcagcagctacgtggccgcccccgacagcagcagaacccccggcctgagcagaagcagagacggcctgctggtggccaagctggacctgaacctgtgccagcaggtgaacgacgtgtggaacttcaagatgaccggcagatacgagatgtacgccagagagctggccgaggccgtgaagagcaactacagccccaccatcgtgaaggagtag

SEQ ID NO: 104745 - DNA, 951 bp, synthetic construct
  misc_feature 1..951: note = Description of Artificial Sequence: Synthetic coding sequence
  source 1..951: mol_type = other DNA
atgctgggcgaggcccccgccgcccccagactggccggcagcgaggccagaagcctgtggcagggcacccaggtgagcgccctgcacagaagaatcaaggccatcgtggaggtggccgccatgtgcggcgtgaacatcatctgcttccaggaggcctggaccatgcccttcgccttctgcaccagagagaagctgccctggaccgagttcgccgagagcgccgaggacggccccaccaccagattctgccagaagctggccaagaaccacgacatggtggtggtgagccccatcctggagagagacagcgagcacggcgacgtgctgtggaacaccgccgtggtgatcagcaacagcggcgccgtgctgggcaagaccagaaagaaccacatccccagagtgggcgacttcaacgagagcacctactacatggagggcaacctgggccaccccgtgttccagacccagttcggcagaatcgccgtgaacatctgctacggcagacaccaccccctgaactggctgatgtacagcatcaacggcgccgagatcatcttcaaccccagcgccaccatcggcgccctgagcgagagcctgtggcccatcgaggccagaaacgccgccatcgccaaccactgcttcacctgcgccatcaacagagtgggcaccgagcacttccccaacgagttcaccagcggcgacggcaagaaggcccaccaggacttcggctacttctacggcagcagctacgtggccgcccccgacagcagcagaacccccggcctgagcagaagcagagacggcctgctggtggccaagctggacctgaacctgtgccagcaggtgaacgacgtgtggaacttcaagatgaccggcagatacgagatgtacgccagagagctggccgaggccgtgaagagcaactacagccccaccatcgtgaaggagtag

SEQ ID NO: 104746 - DNA, 561 bp, synthetic construct
  misc_feature 1..561: note = Description of Artificial Sequence: Synthetic coding sequence
  source 1..561: mol_type = other DNA
atggccggcgccgagtggaagagcctggaggagtgcctggagaagcacctgcccctgcccgacctgcaggaggtgaagagagtgctgtacggcaaggagctgagaaagctggacctgcccagagaggccttcgaggccgccagcagagaggacttcgagctgcagggctacgccttcgaggccgccgaggagcagctgagaagacccagaatcgtgcacgtgggcctggtgcagaacagaatccccctgcccgccaacgcccccgtggccgagcaggtgagcgccctgcacagaagaatcaaggccatcgtggaggtggccgccatgtgcggcgtgaacatcatctgcttccaggaggcctggatcctgagaccccaccaccaggagcccagacccccctgctgctacgcccccagctgctgcctgatccccagcgtgttcccccacagaagcgagagcatcagaagcagccccagcctgtaccaccacctggtgcaggcccccggcagcagccccctggccttcgtgatccccagcagctggagccccgtgcccagctag

SEQ ID NO: 104747 - DNA, 2955 bp, synthetic construct
  misc_feature 1..2955: note = Description of Artificial Sequence: Synthetic coding sequence
  source 1..2955: mol_type = other DNA
atggacgacagataccccgccctgcagagagcccagctgagactggacttcatccacgccaacagcaccacccacagcttcctgttcggcgccctggccgagctgctggacaacgccagagacgccggcgccgagagactggacgtgttcagcgtggacaacgagaagctgcagggcggcttcatgctgtgcttcctggacgacggctgcggcatgagccccgaggaggccagcgacatcatctacttcggcagaagcaagaagagactgagcaccctgaagttcatcggccagtacggcaacggcctgaagagcggcagcatgagaatcggcaaggacttcatcctgttcaccaagaaggaggagaccatgacctgcgtgttcttcagccagaccttctgcgaggaggagagcctgagcgaggtggtggtgcccatgcccagctggctgatcagaaccagagagagcgtgaccgacgacccccagaagttcgccatggagctgagcatcatctacaagtacagccccttcaagaccgaggccgagctgatgcagcagttcgacgtgatctacggcaagtgcggcaccctgctggtgatctacaacctgaagctgctgctgaacggcgagcccgagctggacgtgaagaccgacaaggaggacatcctgatggccggcgccctggaggacttccccgccagatggagcttcagagcctacaccagcgtgctgtacttcaacccctggatgagaatcttcatccaggccaagagagtgaagaccaagcacctgtgctactgcctgtacagacccagaaagtacctgtacgtgaccagcagcttcaagggcgccttcaaggacgaggtgaagaaggccgaggaggccgtgaagatcgccgagagcatcctgaaggaggcccagatcaaggtgaaccagtgcgacagaaccagcctgagcagcgccaaggacgtgctgcagagagccctggaggacgtggaggccaagcagaagaacctgaaggagaagcagagagagctgaagaccgccagaaccctgagcctgttctacggcgtgaacgtggagaacagaagccaggccggcatgttcatctacagcaacaacagactgatcaagatgcacgagaaggtgggcagccagctgaagctgaagagcctgctgggcgccggcgtggtgggcatcgtgaacatccccctggaggtgatggagcccagccacaacaagcaggagttcctgaacgtgcaggagtacaaccacctgctgaaggtgatgggccagtacctggtgcagtactgcaaggacaccggcatcaacaacagaaacctgaccctgttctgcaacgagttcggctaccagaacgacatcgacgtggagaagcccctgaacagcttccagtaccagagaagacaggccatgggcatccccttcatcatccagtgcgacctgtgcctgaagtggagagtgctgcccagcagcaccaactaccaggagaaggagttcttcgacatctggatctgcgccaacaaccccaacagactggagaacagctgccaccaggtggagtgcctgcccagcatccccctgggcaccatgagcaccatcagccccagcaagaacgagaaggagaagcagctgagagagagcgtgatcaagtaccagaacagactggccgagcagcagccccagccccagttcatccccgtggacgagatcaccgtgaccagcacctgcctgaccagcgcccacaaggagaacaccaagacccagaagatcagactgctgggcgacgacctgaagcacgagagcctgagcagcttcgagctgagcgccagcagaagaggccagaagagaaacatcgaggagaccgacagcgacgtggagtacatcagcgagaccaagatcatgaagaagagcatggaggagaagatgaacagccagcagcagagaatccccgtggccctgcccgagaacgtgaagctggccgagagaagccagagaagccagatcgccaacatcaccaccgtgtggagagcccagcccaccgagggctgcctgaagaacgcccaggccgccagctgggagatgaagagaaagcagagcctgaacttcgtggaggagtgcaaggtgctgaccgaggacgagaacaccagcgacagcgacatcatcctggtgagcgacaagagcaacaccgacgtgagcctgaagcaggagaagaaggagatccccctgctgaaccaggagaagcaggagctgtgcaacgacgtgctggccatgaagagaagcagcagcctgcccagctggaagagcctgctgaacgtgcccatggaggacgtgaacctgagcagcggccacatcgccagagtgagcgtgagcggcagctgcaaggtggccagcagccccgccagcagccagagcacccccgtgaaggagaccgtgagaaagctgaagagcaagctgagagagatcctgctgtacttcttccccgagcaccagctgcccagcgagctggaggagcccgccctgagctgcgagctggagcagtgccccgagcagatgaacaagaagctgaagatgtgcttcaaccagatccagaacacctacatggtgcagtacgagaagaagatcaagagaaagctgcagagcatcatctacgacagcaacaccagaggcatccacaacgagatcagcctgggccagtgcgagaacaagagaaagatcagcgaggacaagctgaagaacctgagaatcaagctggccctgctgctgcagaagctgcagctgggcggccccgagggcgacctggagcagaccgacacctacctggaggccctgctgaaggaggacaacctgctgttccagaacaacctgaacaaggtgaccatcgacgccagacacagactgcccctggagaagaacgagaagaccagcgagaactag

SEQ ID NO: 104748 - DNA, 618 bp, synthetic construct
  misc_feature 1..618: note = Description of Artificial Sequence: Synthetic coding sequence
  source 1..618: mol_type = other DNA
atgctggagatcctggagcagcagaagaaggtggacgccgagaccgtgggcagagtgaagagattcatccaggagaacgtgttcgtggccgccaaccacaacggcagccccctgagcatcaaggaggcccccaaggagctgagcttcggcgccagagccgagctgcccagaatccaccccgtggccagcaagctgctgagactgatgcagaagaaggagaccaacctgtgcctgagcgccgacgtgagcctggccagagagctgctgcagctggccgacgccctgggccccagcatctgcatgctgaagacccacgtggacatcctgaacgacttcaccctggacgtgatgaaggagctgatcaccctggccaagtgccacgagttcctgatcttcgaggacagaaagttcgccgacatcggcaacaccgtgaagaagcagtacgagggcgacaacctgggccagcagtacaacagcccccaggaggtgatcggcaagagaggcagcgacatcatcatcgtgggcagaggcatcatcagcgccgccgacagactggaggccgccgagatgtacagaaaggccgcctgggaggcctacctgagcagactgggcgtgtag

SEQ ID NO: 104749 - DNA, 1167 bp, synthetic construct
  misc_feature 1..1167: note = Description of Artificial Sequence: Synthetic coding sequence
  source 1..1167: mol_type = other DNA
atgctgatcagaagaaaggagaccaaggactacggcaccaagagactggtggagggcaccatcaaccccggcgagacctgcctgatcatcgaggacgtggtgaccagcggcagcagcgtgctggagaccgtggaggtgctgcagaaggagggcctgaaggtgaccgacgccatcgtgctgctggacagagagcagggcggcaaggacaagctgcaggcccacggcatcagactgcacagcgtgtgcaccctgagcaagatgctggagatcctggagcagcagaagaaggtggacgccgagaccgtgggcagagtgaagagattcatccaggagaacgtgttcgtggccgccaaccacaacggcagccccctgagcatcaaggaggcccccaaggagctgagcttcggcgccagagccgagctgcccagaatccaccccgtggccagcaagctgctgagactgatgcagaagaaggagaccaacctgtgcctgagcgccgacgtgagcctggccagagagctgctgcagctggccgacgccctgggccccagcatctgcatgctgaagacccacgtggacatcctgaacgacttcaccctggacgtgatgaaggagctgatcaccctggccaagtgccacgagttcctgatcttcgaggacagaaagttcgccgacatcggcaacaccgtgaagaagcagtacgagggcggcatcttcaagatcgccagctgggccgacctggtgaacgcccacgtggtgcccggcagcggcgtggtgaagggcctgcaggaggtgggcctgcccctgcacagaggctgcctgctgatcgccgagatgagcagcaccggcagcctggccaccggcgactacaccagagccgccgtgagaatggccgaggagcacagcgagttcgtggtgggcttcatcagcggcagcagagtgagcatgaagcccgagttcctgcacctgacccccggcgtgcagctggaggccggcggcgacaacctgggccagcagtacaacagcccccaggaggtgatcggcaagagaggcagcgacatcatcatcgtgggcagaggcatcatcagcgccgccgacagactggaggccgccgagatgtacagaaaggccgcctgggaggcctacctgagcagactgggcgtgtag

SEQ ID NO: 104750 - DNA, 909 bp, synthetic construct
  misc_feature 1..909: note = Description of Artificial Sequence: Synthetic coding sequence
  source 1..909: mol_type = other DNA
atgctggagatcctggagcagcagaagaaggtggacgccgagaccgtgggcagagtgaagagattcatccaggagaacgtgttcgtggccgccaaccacaacggcagccccctgagcatcaaggaggcccccaaggagctgagcttcggcgccagagccgagctgcccagaatccaccccgtggccagcaagctgctgagactgatgcagaagaaggagaccaacctgtgcctgagcgccgacgtgagcctggccagagagctgctgcagctggccgacgccctgggccccagcatctgcatgctgaagacccacgtggacatcctgaacgacttcaccctggacgtgatgaaggagctgatcaccctggccaagtgccacgagttcctgatcttcgaggacagaaagttcgccgacatcggcaacaccgtgaagaagcagtacgagggcggcatcttcaagatcgccagctgggccgacctggtgaacgcccacgtggtgcccggcagcggcgtggtgaagggcctgcaggaggtgggcctgcccctgcacagaggctgcctgctgatcgccgagatgagcagcaccggcagcctggccaccggcgactacaccagagccgccgtgagaatggccgaggagcacagcgagttcgtggtgggcttcatcagcggcagcagagtgagcatgaagcccgagttcctgcacctgacccccggcgtgcagctggaggccggcggcgacaacctgggccagcagtacaacagcccccaggaggtgatcggcaagagaggcagcgacatcatcatcgtgggcagaggcatcatcagcgccgccgacagactggaggccgccgagatgtacagaaaggccgcctgggaggcctacctgagcagactgggcgtgtag

SEQ ID NO: 104751 - DNA, 933 bp, synthetic construct
  misc_feature 1..933: note = Description of Artificial Sequence: Synthetic coding sequence
  source 1..933: mol_type = other DNA
atggccgccaccggcgccaacgccgagaaggccgagagccacaacgactgccccgtgagactgctgaaccccaacatcgccaagatgaaggaggacatcctgtaccacttcaacctgaccaccagcagacacaacttccccgccctgttcggcgacgtgaagttcgtgtgcgtgggcggcagccccagcagaatgaaggccttcatcagatgcgtgggcgccgagctgggcctggactgccccggcagagactaccccaacatctgcgccggcaccgacagatacgccatgtacaaggtgggccccgtgctgagcgtgagccacggcatgggcatccccagcatcagcatcatgctgcacgagctgatcaagctgctgtactacgccagatgcagcaacgtgaccatcatcagaatcggcaccagcggcggcatcggcctggagcccggcaccgtggtgatcaccgagcaggccgtggacacctgcttcaaggccgagttcgagcagatcgtgctgggcaagagagtgatcagaaagaccgacctgaacaagaagctggtgcaggagctgctgctgtgcagcgccgagctgagcgagttcaccaccgtggtgggcaacaccatgtgcaccctggacttctacgagggccagggcagactggacggcgccctgtgcagctacaccgagaaggacaagcaggcctacctggaggccgcctacgccgccggcgtgagaaacatcgagatggagagcagcgtgttcgccgccatgtgcagcgcctgcggcctgcaggccgccgtggtgtgcgtgaccctgctgaacagactggagggcgaccagatcagcagccccagaaacgtgctgagcgagtaccagcagagaccccagagactggtgagctacttcatcaagaagaagctgagcaaggcctag

SEQ ID NO: 104752 - DNA, 933 bp, synthetic construct; identical to SEQ ID NO: 104751
  misc_feature 1..933: note = Description of Artificial Sequence: Synthetic coding sequence
  source 1..933: mol_type = other DNA

SEQ ID NO: 104753 - DNA, 933 bp, synthetic construct; identical to SEQ ID NO: 104751
  misc_feature 1..933: note = Description of Artificial Sequence: Synthetic coding sequence
  source 1..933: mol_type = other DNA

SEQ ID NO: 104754 - DNA, 435 bp, synthetic construct
  misc_feature 1..435: note = Description of Artificial Sequence: Synthetic coding sequence
  source 1..435: mol_type = other DNA
atggccgccaccggcgccaacgccgagaaggccgagagccacaacgactgccccgtgagactgctgaaccccaacatcgccaagatgaaggaggacatcctgtaccacttcaacctgaccaccagcagacacaacttccccgccctgttcggcgacgtgaagttcgtgtgcgtgggcggcagccccagcagaatgaaggccttcatcagatgcgtgggcgccgagctgggcctggactgccccggcagagactaccccaacatctgcgccggcaccgacagatacgccatgtacaaggtgggccccgtgctgagcgtgagccacggcatgggcatccccagcatcagcatcatgctgcacgagctgatcaagctgctgtactacgccagatgcagcaacgtgaccatcatcagaatcggcaccagcggcggctag

SEQ ID NO: 104755 - DNA, 516 bp, synthetic construct
  misc_feature 1..516: note = Description of Artificial Sequence: Synthetic coding sequence
  source 1..516: mol_type = other DNA
atggccgccaccggcgccaacgccgagaaggccgagagccacaacgactgccccgtgagactgctgaaccccaacatcgccaagatgaaggaggacatcctgtaccacttcaacctgaccaccagcagacacaacttccccgccctgttcggcgacgtgaagttcgtgtgcgtgggcggcagccccagcagaatgaaggccttcatcagatgcgtgggcgccgagctgggcctggactgccccggcagagactaccccaacatctgcgccggcaccgacagatacgccatgtacaaggtgggccccgtgctgagcgtgagccacggcatgggcatccccagcatcagcatcatgctgcacgagctgatcaagctgctgtactacgccagatgcagcaacgtgaccatcatcagaatcggcaccagcggcggcatcggcatcctgaagcacctgagaagaaaggacaccggcaagagcaagggcggcagagagagaagaagcaccaagctgagatag

SEQ ID NO: 104756 - DNA, 522 bp, synthetic construct
  misc_feature 1..522: note = Description of Artificial Sequence: Synthetic coding sequence
  source 1..522: mol_type = other DNA
atgcagagaaagctgaaggtgaccagcctggagcccggcaccgtggtgatcaccgagcaggccgtggacacctgcttcaaggccgagttcgagcagatcgtgctgggcaagagagtgatcagaaagaccgacctgaacaagaagctggtgcaggagctgctgctgtgcagcgccgagctgagcgagttcaccaccgtggtgggcaacaccatgtgcaccctggacttctacgagggccagggcagactggacggcgccctgtgcagctacaccgagaaggacaagcaggcctacctggaggccgcctacgccgccggcgtgagaaacatcgagatggagagcagcgtgttcgccgccatgtgcagcgcctgcggcctgcaggccgccgtggtgtgcgtgaccctgctgaacagactggagggcgaccagatcagcagccccagaaacgtgctgagcgagtaccagcagagaccccagagactggtgagctacttcatcaagaagaagctgagcaaggcctag

SEQ ID NO: 104757 - DNA, 90 bp, synthetic construct
  misc_feature 1..90: note = Description of Artificial Sequence: Synthetic coding sequence
  source 1..90: mol_type = other DNA
atggccgccaccggcgccaacgccgagaaggccgagagccacaacgactgccccgtgagactgctgaaccccaacatcgccaagatgtag

SEQ ID NO: 104758 - DNA, 441 bp, synthetic construct
  misc_feature 1..441: note = Description of Artificial Sequence: Synthetic coding sequence
  source 1..441: mol_type = other DNA
atggccgccaccggcgccaacgccgagaaggccgagagccacaacgactgccccgtgagactgctgaaccccaacatcgccaagatgaaggaggacatcctgtaccacttcaacctgaccaccagcagacacaacttccccgccctgttcggcgacgtgaagttcgtgtgcgtgggcggcagccccagcagaatgaaggccttcatcagatgcgtgggcgccgagctgggcctggactgccccggcagagactaccccaacatctgcgccggcaccgacagatacgccatgtacaaggtgggccccgtgctgagcgtgagccacggcatgggcatccccagcatcagcatcatgctgcacgagctgatcaagctgctgtactacgccagatgcagcaacgtgaccatcatcagaatcggcaccagcggcggcatcggctag

SEQ ID NO: 104759 - DNA, 606 bp, synthetic construct
  misc_feature 1..606: note = Description of Artificial Sequence: Synthetic coding sequence
  source 1..606: mol_type = other DNA
atggccagcgccggcggcgaggactgcgagagccccgcccccgaggccgacagaccccaccagagacccttcctgatcggcgtgagcggcggcaccgccagcggcaagagcaccgtgtgcgagaagatcatggagctgctgggccagaacgaggtggagcagagacagagaaaggtggtgatcctgagccaggacagattctacaaggtgctgaccgccgagcagaaggccaaggccctgaagggccagtacaacttcgaccaccccgacgccttcgacaacgacctgatgcacagaaccctgaagaacatcgtggagggcaagaccgtggaggtgcccacctacgacttcgtgacccacagcagactgcccgagaccaccgtggtgtaccccgccgacgtggtgctgttcgagggcatcctggtgttctacagccaggagatcagagacatgttccacctgagactgttcgtggacaccgacagcgacgtgagactgagcagaagagacaaggaggtgtgcagatgcgaccaccccgccagaagcggccagtacggctgccaccagcccgacagagccgcccaccccggccacagcgagtggtag

SEQ ID NO: 104760 - DNA, 807 bp, synthetic construct
  misc_feature 1..807: note = Description of Artificial Sequence: Synthetic coding sequence
  source 1..807: mol_type = other DNA
atggccagcgccggcggcgaggactgcgagagccccgcccccgaggccgacagaccccaccagagacccttcctgatcggcagcaccgtgtgcgagaagatcatggagctgctgggccagaacgaggtggagcagagacagagaaaggtggtgatcctgagccaggacagattctacaaggtgctgaccgccgagcagaaggccaaggccctgaagggccagtacaacttcgaccaccccgacgccttcgacaacgacctgatgcacagaaccctgaagaacatcgtggagggcaagaccgtggaggtgcccacctacgacttcgtgacccacagcagactgcccgagaccaccgtggtgtaccccgccgacgtggtgctgttcgagggcatcctggtgttctacagccaggagatcagagacatgttccacctgagactgttcgtggacaccgacagcgacgtgagactgagcagaagagtgctgagagacgtgagaagaggcagagacctggagcagatcctgacccagtacaccaccttcgtgaagcccgccttcgaggagttctgcctgcccaccaagaagtacgccgacgtgatcatccccagaggcgtggacaacatggtggccatcaacctgatcgtgcagcacatccaggacatcctgaacggcgacatctgcaagtggcacagaggcggcagcaacggcagaagctacaagagaaccttcagcgagcccggcgaccaccccggcatgctgaccagcggcaagagaagccacctggagagcagcagcagaccccactag

SEQ ID NO: 104761 - DNA, 849 bp, synthetic construct
  misc_feature 1..849: note = Description of Artificial Sequence: Synthetic coding sequence
  source 1..849: mol_type = other DNA
atggccagcgccggcggcgaggactgcgagagccccgcccccgaggccgacagaccccaccagagacccttcctgatcggcgacgagagattccaggccggcatccccctgctgtgcctgcagagcaccgtgtgcgagaagatcatggagctgctgggccagaacgaggtggagcagagacagagaaaggtggtgatcctgagccaggacagattctacaaggtgctgaccgccgagcagaaggccaaggccctgaagggccagtacaacttcgaccaccccgacgccttcgacaacgacctgatgcacagaaccctgaagaacatcgtggagggcaagaccgtggaggtgcccacctacgacttcgtgacccacagcagactgcccgagaccaccgtggtgtaccccgccgacgtggtgctgttcgagggcatcctggtgttctacagccaggagatcagagacatgttccacctgagactgttcgtggacaccgacagcgacgtgagactgagcagaagagtgctgagagacgtgagaagaggcagagacctggagcagatcctgacccagtacaccaccttcgtgaagcccgccttcgaggagttctgcctgcccaccaagaagtacgccgacgtgatcatccccagaggcgtggacaacatggtggccatcaacctgatcgtgcagcacatccaggacatcctgaacggcgacatctgcaagtggcacagaggcggcagcaacggcagaagctacaagagaaccttcagcgagcccggcgaccaccccggcatgctgaccagcggcaagagaagccacctggagagcagcagcagaccccactag

SEQ ID NO: 104762 - DNA, 834 bp, synthetic construct
  misc_feature 1..834: note = Description of Artificial Sequence: Synthetic coding sequence
  source 1..834: mol_type = other DNA
atggccagcgccggcggcgaggactgcgagagccccgcccccgaggccgacagaccccaccagagacccttcctgatcggcgtgagcggcggcaccgccagcggcaagagcaccgtgtgcgagaagatcatggagctgctgggccagaacgaggtggagcagagacagagaaaggtggtgatcctgagccaggacagattctacaaggtgctgaccgccgagcagaaggccaaggccctgaagggccagtacaacttcgaccaccccgacgccttcgacaacgacctgatgcacagaaccctgaagaacatcgtggagggcaagaccgtggaggtgcccacctacgacttcgtgacccacagcagactgcccgagaccaccgtggtgtaccccgccgacgtggtgctgttcgagggcatcctggtgttctacagccaggagatcagagacatgttccacctgagactgttcgtggacaccgacagcgacgtgagactgagcagaagagtgctgagagacgtgagaagaggcagagacctggagcagatcctgacccagtacaccaccttcgtgaagcccgccttcgaggagttctgcctgcccaccaagaagtacgccgacgtgatcatccccagaggcgtggacaacatggtggccatcaacctgatcgtgcagcacatccaggacatcctgaacggcgacatctgcaagtggcacagaggcggcagcaacggcagaagctacaagagaaccttcagcgagcccggcgaccaccccggcatgctgaccagcggcaagagaagccacctggagagcagcagcagaccccactag

SEQ ID NO: 104763 - DNA, 1647 bp, synthetic construct
  misc_feature 1..1647: note = Description of Artificial Sequence: Synthetic coding sequence
  source 1..1647: mol_type = other DNA
atggccgccccccccgccagagccgacgccgaccccagccccaccagcccccccaccgccagagacacccccggcagacaggccgagaagagcgagaccgcctgcgaggacagaagcaacgccgagagcctggacagactgctgccccccgtgggcaccggcagaagccccagaaagagaaccaccagccagtgcaagagcgagccccccctgctgagaaccagcaagagaaccatctacaccgccggcagacccccctggtacaacgagcacggcacccagagcaaggaggccttcgccatcggcctgggcggcggcagcgccagcggcaagaccaccgtggccagaatgatcatcgaggccctggacgtgccctgggtggtgctgctgagcatggacagcttctacaaggtgctgaccgagcagcagcaggagcaggccgcccacaacaacttcaacttcgaccaccccgacgccttcgacttcgacctgatcatcagcaccctgaagaagctgaagcagggcaagagcgtgaaggtgcccatctacgacttcaccacccacagcagaaagaaggactggaagaccctgtacggcgccaacgtgatcatcttcgagggcatcatggccttcgccgacaagaccctgctggagctgctggacatgaagatcttcgtggacaccgacagcgacatcagactggtgagaagactgagaagagacatcagcgagagaggcagagacatcgagggcgtgatcaagcagtacaacaagttcgtgaagcccagcttcgaccagtacatccagcccaccatgagactggccgacatcgtggtgcccagaggcagcggcaacaccgtggccatcgacctgatcgtgcagcacgtgcacagccagctggaggagagagagctgagcgtgagagccgccctggccagcgcccaccagtgccaccccctgcccagaaccctgagcgtgctgaagagcaccccccaggtgagaggcatgcacaccatcatcagagacaaggagaccagcagagacgagttcatcttctacagcaagagactgatgagactgctgatcgagcacgccctgagcttcctgcccttccaggactgcgtggtgcagaccccccagggccaggactacgccggcaagtgctacgccggcaagcagatcaccggcgtgagcatcctgagagccggcgagaccatggagcccgccctgagagccgtgtgcaaggacgtgagaatcggcaccatcctgatccagaccaaccagctgaccggcgagcccgagctgcactacctgagactgcccaaggacatcagcgacgaccacgtgatcctgatggactgcaccgtgagcaccggcgccgccgccatgatggccgtgagagtgctgctggaccacgacgtgcccgaggacaagatcttcctgctgagcctgctgatggccgagatgggcgtgcacagcgtggcctacgccttccccagagtgagaatcatcaccaccgccgtggacaagagagtgaacgacctgttcagaatcatccccggcatcggcaacttcggcgacagatacttcggcaccgacgccgtgcccgacggcagcgacgaggaggaggtggcctacaccggctag

SEQ ID NO: 104764 - DNA, 1260 bp, synthetic construct
  misc_feature 1..1260: note = Description of Artificial Sequence: Synthetic coding sequence
  source 1..1260: mol_type = other DNA
atggccgccccccccgccagagccgacgccgaccccagccccaccagcccccccaccgccagagacacccccggcagacaggccgagaagagcgagaccgcctgcgaggacagaagcaacgccgagagcctggacagactgctgccccccgtgggcaccggcagaagccccagaaagagaaccaccagccagtgcaagagcgagccccccctgctgagaaccagcaagagaaccatctacaccgccggcagacccccctggtacaacgagcacggcacccagagcaaggaggccttcgccatcggcctgggcggcggcagcgccagcggcaagaccaccgtggccagaatgatcatcgaggccctggacgtgccctgggtggtgctgctgagcatggacagcttctacaaggtgctgaccgagcagcagcaggagcaggccgcccacaacaacttcaacttcgaccaccccgacgccttcgacttcgacctgatcatcagcaccctgaagaagctgaagcagggcaagagcgtgaaggtgcccatctacgacttcaccacccacagcagaaagaaggactggaagaccctgtacggcgccaacgtgatcatcttcgagggcatcatggccttcgccgacaagaccctgctggagctgctggacatgaagatcttcgtggacaccgacagcgacatcagactggtgagaagactgagaagagacatcagcgagagaggcagagacatcgagggcgtgatcaagcagtacaacaagttcgtgaagcccagcttcgaccagtacatccagcccaccatgagactggccgacatcgtggtgcccagaggcagcggcaacaccgtggccatcgacctgatcgtgcagcacgtgcacagccagctggaggagggctgcgccggcctgggcacccccgtgccccccgccgcccccgacgccgagagacccgaggagcacgccgccggcaccggccacgcccaccaccaccaggtgagagcccacctgggcaccggcagacccagagccagagcccccgcccagctgctggccccccagggccagggcgaccagagcagaagagtgcacctgctgctgcaggagaccgacgccgccgcccacagagccagagccctgctgcccgccctgagcggcctgagaagaaccgaccccgccggcgccggcctgtgcggccaggtgctgtgcggcgaggccgaccacagatgcgtgcacagcgccagaagatag

SEQ ID NO: 104765 - DNA, 1647 bp, synthetic construct
  misc_feature 1..1647: note = Description of Artificial Sequence: Synthetic coding sequence
  source 1..1647: mol_type = other DNA
atggccgccccccccgccagagccgacgccgaccccagccccaccagcccccccaccgccagagacacccccggcagacaggccgagaagagcgagaccgcctgcgaggacagaagcaacgccgagagcctggacagactgctgccccccgtgggcaccggcagaagccccagaaagagaaccaccagccagtgcaagagcgagccccccctgctgagaaccagcaagagaaccatctacaccgccggcagacccccctggtacaacgagcacggcacccagagcaaggaggccttcgccatcggcctgggcggcggcagcgccagcggcaagaccaccgtggccagaatgatcatcgaggccctggacgtgccctgggtggtgctgctgagcatggacagcttctacaaggtgctgaccgagcagcagcaggagcaggccgcccacaacaacttcaacttcgaccaccccgacgccttcgacttcgacctgatcatcagcaccctgaagaagctgaagcagggcaagagcgtgaaggtgcccatctacgacttcaccacccacagcagaaagaaggactggaagaccctgtacggcgccaacgtgatcatcttcgagggcatcatggccttcgccgacaagaccctgctggagctgctggacatgaagatcttcgtggacaccgacagcgacatcagactggtgagaagactgagaagagacatcagcgagagaggcagagacatcgagggcgtgatcaagcagtacaacaagttcgtgaagcccagcttcgaccagtacatccagcccaccatgagactggccgacatcgtggtgcccagaggcagcggcaacaccgtggccatcgacctgatcgtgcagcacgtgcacagccagctggaggagctgagattcgtgcccagagccgccctggccagcgcccaccagtgccaccccctgcccagaaccctgagcgtgctgaagagcaccccccaggtgagaggcatgcacaccatcatcagagacaaggagaccagcagagacgagttcatcttctacagcaagagactgatgagactgctgatcgagcacgccctgagcttcctgcccttccaggactgcgtggtgcagaccccccagggccaggactacgccggcaagtgctacgccggcaagcagatcaccggcgtgagcatcctgagagccggcgagaccatggagcccgccctgagagccgtgtgcaaggacgtgagaatcggcaccatcctgatccagaccaaccagctgaccggcgagcccgagctgcactacctgagactgcccaaggacatcagcgacgaccacgtgatcctgatggactgcaccgtgagcaccggcgccgccgccatgatggccgtgagagtgctgctggaccacgacgtgcccgaggacaagatcttcctgctgagcctgctgatggccgagatgggcgtgcacagcgtggcctacgccttccccagagtgagaatcatcaccaccgccgtggacaagagagtgaacgacctgttcagaatcatccccggcatcggcaacttcggcgacagatacttcggcaccgacgccgtgcccgacggcagcgacgaggaggaggtggcctacaccggctag

SEQ ID NO: 104766 - DNA, 1602 bp, synthetic construct
  misc_feature 1..1602: note = Description of Artificial Sequence: Synthetic coding sequence
  source 1..1602: mol_type = other DNA
atgagcagcccccccgcctaccccggcatcagaatcagcggctgcagagccctgggcgccgagggcagcagcaacgccgagagcctggacagactgctgccccccgtgggcaccggcagaagccccagaaagagaaccaccagccagtgcaagagcgagccccccctgctgagaaccagcaagagaaccatctacaccgccggcagacccccctggtacaacgagcacggcacccagagcaaggaggccttcgccatcggcctgggcggcggcagcgccagcggcaagaccaccgtggccagaatgatcatcgaggccctggacgtgccctgggtggtgctgctgagcatggacagcttctacaaggtgctgaccgagcagcagcaggagcaggccgcccacaacaacttcaacttcgaccaccccgacgccttcgacttcgacctgatcatcagcaccctgaagaagctgaagcagggcaagagcgtgaaggtgcccatctacgacttcaccacccacagcagaaagaaggactggaagaccctgtacggcgccaacgtgatcatcttcgagggcatcatggccttcgccgacaagaccctgctggagctgctggacatgaagatcttcgtggacaccgacagcgacatcagactggtgagaagactgagaagagacatcagcgagagaggcagagacatcgagggcgtgatcaagcagtacaacaagttcgtgaagcccagcttcgaccagtacatccagcccaccatgagactggccgacatcgtggtgcccagaggcagcggcaacaccgtggccatcgacctgatcgtgcagcacgtgcacagccagctggaggagagagagctgagcgtgagagccgccctggccagcgcccaccagtgccaccccctgcccagaaccctgagcgtgctgaagagcaccccccaggtgagaggcatgcacaccatcatcagagacaaggagaccagcagagacgagttcatcttctacagcaagagactgatgagactgctgatcgagcacgccctgagcttcctgcccttccaggactgcgtggtgcagaccccccagggccaggactacgccggcaagtgctacgccggcaagcagatcaccggcgtgagcatcctgagagccggcgagaccatggagcccgccctgagagccgtgtgcaaggacgtgagaatcggcaccatcctgatccagaccaaccagctgaccggcgagcccgagctgcactacctgagactgcccaaggacatcagcgacgaccacgtgatcctgatggactgcaccgtgagcaccggcgccgccgccatgatggccgtgagagtgctgctggaccacgacgtgcccgaggacaagatcttcctgctgagcctgctgatggccgagatgggcgtgcacagcgtggcctacgccttccccagagtgagaatcatcaccaccgccgtggacaagagagtgaacgacctgttcagaatcatccccggcatcggcaacttcggcgacagatacttcggcaccgacgccgtgcccgacggcagcgacgaggaggaggtggcctacaccggctag

SEQ ID NO: 104767 - DNA, 261 bp, synthetic construct
  misc_feature 1..261: note = Description of Artificial Sequence: Synthetic coding sequence
  source 1..261: mol_type = other DNA
atgagcagcccccccgcctaccccggcatcagaatcagcggctgcagagccctgggcgccgagggcagcagcaacgccgagagcctggacagactgctgccccccgtgggcaccggcagaagccccagaaagagaaccaccagccagtgcaagagcgagccccccctgctgagaaccagcaagagaaccatctacaccgccggcagacccccctggtacaacgagcacggcacccagagcaaggaggccttcgccatctag

SEQ ID NO: 104768 - DNA, 408 bp, synthetic construct
  misc_feature 1..408: note = Description of Artificial Sequence: Synthetic coding sequence
  source 1..408: mol_type = other DNA
atgcacaccatcatcagagacaaggagaccagcagagacgagttcatcttctacagcaagagactgatgagactgctgatcgagcacgccctgagcttcctgcccttccaggactgcgtggtgcagaccccccagggccaggactacgccggcaagtgctacgccggcaagcagatcaccggcgtgagcatcctgagagccggcgagaccatggagcccgccctgagagccgtgtgcaaggacgtgagaatcggcaccatcctgatccagaccaaccagctgaccggcgagcccgagctgcactacctgagactgcccaaggacatcagcgacgaccacgtgatcctgatggactgcaccgtgagcaccggcgccgccgccatgatggccgtgagagtgctgctgtag

SEQ ID NO: 104769 - DNA, 786 bp, synthetic construct
  misc_feature 1..786: note = Description of Artificial Sequence: Synthetic coding sequence
  source 1..786: mol_type = other DNA
atggccggcgacagcgagcagaccctgcagaaccaccagcagcccaacggcggcgagcccttcctgatcggcgtgagcggcggcaccgccagcggcaagagcagcgtgtgcgccaagatcgtgcagctgctgggccagaacgaggtggactacagacagaagcaggtggtgatcctgagccaggacagcttctacagagtgctgaccagcgagcagaaggccaaggccctgaagggccagttcaacttcgaccaccccgacgccttcgacaacgagctgatcctgaagaccctgaaggagatcaccgagggcaagaccgtgcagatccccgtgtacgacttcgtgagccacagcagaaaggaggagaccgtgaccgtgtaccccgccgacgtggtgctgttcgagggcatcctggccttctacagccaggaggtgagagacctgttccagatgaagctgttcgtggacaccgacgccgacaccagactgagcagaagagtgctgagagacatcagcgagagaggcagagacctggagcagatcctgagccagtacatcaccttcgtgaagcccgccttcgaggagttctgcctgcccaccaagaagtacgccgacgtgatcatccccagaggcgccgacaacctggtggccatcaacctgatcgtgcagcacatccaggacatcctgaacggcggccccagcaagagacagaccaacggctgcctgaacggctacacccccagcagaaagagacaggccagcgagagcagcagcagaccccactag

SEQ ID NO: 104770 - DNA, 393 bp, synthetic construct
  misc_feature 1..393: note = Description of Artificial Sequence: Synthetic coding sequence
  source 1..393: mol_type = other DNA
atggccggcgacagcgagcagaccctgcagaaccaccagcagcccaacggcggcgagcccttcctgatcggcgtgagcggcggcaccgccagcggcaagagcagcgtgtgcgccaagatcgtgcagctgctgggccagaacgaggtggactacagacagaagcaggtggtgatcctgagccaggacagcttctacagagtgctgaccagcgagcagaaggccaaggccctgaagggccagttcaacttcgaccaccccgacgccttcgacaacgagctgatcctgaagaccctgaaggagatcaccgagggcaagaccgtgcagatccccgtgtacgacttcgtgagccacagcagaatcaagggccaccagagagagagacagggcagctag

SEQ ID NO: 104771 - DNA, 2031 bp, synthetic construct
  misc_feature 1..2031: note = Description of Artificial Sequence: Synthetic coding sequence
  source 1..2031: mol_type = other DNA
atgagcagcctgcaggccctgtgcagcggcctgcccctgagacccctgcccgagaacagaggcagacaggccggcgtgccccacgcccccgtgagaacccccagcctgagccccgtggagaagcagctggccctgagaaacgccctgagatacttcccccccgacgtgcaggagctgctggcccccgagttcgcccaggagctgcagctgtacggccacatctacatgtacagattctgccccgacatcgagatgagagcctaccccatcgagcagtacccctgccagaccaaggtggccgccgccatcatgcacatgatcatgaacaacctggaccccgccgtggcccagttcccccaggagctggtgacctacggcggcaacggccaggtgttcagcaactgggcccagttctggctgaccatgttctacctgagcaagatgaccgaggagcagaccctggtgatgtacagcggccaccccctgggcctgttccccagcagcagaagcgcccccagactggtgatcaccaacggcatggtgatccccaactacagcagcagaaccgagtacgagaagctgttcgccctgggcgtgaccatgtacggccagatgaccgccggcagctactgctacatcggcccccagggcatcgtgcacggcaccgtgctgaccgtgctgaacgccgccagaagatacctgggcatcgaggacctggccggcaaggtgttcgtgaccagcggcctgggcggcatgagcggcgcccaggccaaggccgccgtgatcgtgggctgcatcggcgtgatcgccgaggtggacaaggccgccctggagaagagacacagacagggctggctgatggaggtgaccgacagcctggacagatgcatccagagactgagagaggccagaaagaagaaggaggtgctgagcctgggctaccacggcaacgtggtggccctgtgggagagactggtgcacgagctggacaccaccggcgagtgcctggtggacctgggcagcgaccagaccagctgccacaaccccttcaacggcggctactaccccgtgcagctgagcttcaccgaggcccagagcctgatggccagcaaccccgccgtgttcaaggacctggtgcaggagagcctgagaagacaggtgagcgccatcaacagactggccgaggagaagttcttcttctgggactacggcaacgccttcctgctggaggcccagagagccggcgccgacgtggagaagaagggcgccggcagaaccgagttcagataccccagctacgtgcagcacatcatgggcgacatcttcagccagggcttcggccccttcagatgggtgtgcaccagcggcgacccccaggacctggccgtgaccgacgagctggccaccagcgtgctggaggaggccatcgccgacggcgtgaaggtgagcgtgaagctgcagtacatggacaacatcagatggatcagagaggccgccagacacagactggtggtgggcagccaggccagaatcctgtacagcgaccagaagggcagagtggccatcgccgtggccatcaaccaggccatcgcctgcagaagaatcaaggcccccgtggtgctgagcagagaccaccacgacgtgagcggcaccgacagccccttcagagagaccagcaacatctacgacggcagcgccttctgcgccgacatggccgtgcagaacttcgtgggcgacgcctgcagaggcgccacctgggtggccctgcacaacggcggcggcgtgggctggggcgaggtgatcaacggcggcttcggcctggtgctggacggcacccccgaggccgagggcagagccagactgatgctgagctgggacgtgagcaacggcgtggccagaagatgctggagcggcaaccagaaggcctacgagatcatctgccagaccatgcaggagaacagcaccctggtggtgaccctgccccacaaggtggaggacgagagagtgctgcagcaggccctgcagctgtag

SEQ ID NO: 104772 - DNA, 2211 bp, synthetic construct
  misc_feature 1..2211: note = Description of Artificial Sequence: Synthetic coding sequence
  source 1..2211: mol_type = other DNA
atgagcagcctgcaggccctgtgcagcggcctgcccctgagacccctgcccgagaacagaggcagacaggccggcgtgccccacgcccccgtgagaacccccagcctgagccccgtggagaagcagctggccctgagaaacgccctgagatacttcccccccgacgtgcaggagctgctggcccccgagttcgcccaggagctgcagctgtacggccacatctacatgtacagattctgccccgacatcgagatgagagcctaccccatcgagcagtacccctgccagaccaaggtggccgccgccatcatgcacatgatcatgaacaacctggaccccgccgtggcccagttcccccaggagctggtgacctacggcggcaacggccaggtgttcagcaactgggcccagttctggctgaccatgttctacctgagcaagatgaccgaggagcagaccctggtgatgtacagcggccaccccctgggcctgttccccagcagcagaagcgcccccagactggtgatcaccaacggcatggtgatccccaactacagcagcagaaccgagtacgagaagctgttcgccctgggcgtgaccatgtacggccagatgaccgccggcagctactgctacatcggcccccagggcatcgtgcacggcaccgtgctgaccgtgctgaacgccgccagaagatacctgggcatcgaggacctggccggcaaggtgttcgtgaccagcggcctgggcggcatgagcggcgcccaggccaaggccgccgtgatcgtgggctgcatcggcgtgatcgccgaggtggacaaggccgccctggagaagagacacagacagggctggctgatggaggtgaccgacagcctggacagatgcatccagagactgagagtgctgcagctgggcctgcagcaggccctgggctgggccggcctgcccgccgccctgggcctgtgcgtgctgagctgcttcgtgaacctggcccccctgggcgagggcagatgcctggcccccagcggcttcagcagacccctgctgggcgcccccgtgctgctgctgtgccccagcagagaggccagaaagaagaaggaggtgctgagcctgggctaccacggcaacgtggtggccctgtgggagagactggtgcacgagctggacaccaccggcgagtgcctggtggacctgggcagcgaccagaccagctgccacaaccccttcaacggcggctactaccccgtgcagctgagcttcaccgaggcccagagcctgatggccagcaaccccgccgtgttcaaggacctggtgcaggagagcctgagaagacaggtgagcgccatcaacagactggccgaggagaagttcttcttctgggactacggcaacgccttcctgctggaggcccagagagccggcgccgacgtggagaagaagggcgccggcagaaccgagttcagataccccagctacgtgcagcacatcatgggcgacatcttcagccagggcttcggccccttcagatgggtgtgcaccagcggcgacccccaggacctggccgtgaccgacgagctggccaccagcgtgctggaggaggccatcgccgacggcgtgaaggtgagcgtgaagctgcagtacatggacaacatcagatggatcagagaggccgccagacacagactggtggtgggcagccaggccagaatcctgtacagcgaccagaagggcagagtggccatcgccgtggccatcaaccaggccatcgcctgcagaagaatcaaggcccccgtggtgctgagcagagaccaccacgacgtgagcggcaccgacagccccttcagagagaccagcaacatctacgacggcagcgccttctgcgccgacatggccgtgcagaacttcgtgggcgacgcctgcagaggcgccacctgggtggccctgcacaacggcggcggcgtgggctggggcgaggtgatcaacggcggcttcggcctggtgctggacggcacccccgaggccgagggcagagccagactgatgctgagctgggacgtgagcaacggcgtggccagaagatgctggagcggcaaccagaaggcctacgagatcatctgccagaccatgcaggagaacagcaccctggtggtgaccctgccccacaaggtggaggacgagagagtgctgcagcaggccctgcagctgtag

SEQ ID NO: 104773 - DNA, 375 bp, synthetic construct
  misc_feature 1..375: note = Description of Artificial Sequence: Synthetic coding sequence
  source 1..375: mol_type = other DNA
atgagacaggccggcagagccgccctgctggccgccctgctgctgctggtgcagctgtgccccggcagcagccagagaagccccgaggccgccggcgtgcaggaccccagcctgagatggagccccggcgccagaaaccagggcggcggcgccagagccctgctgctgctgctggccgagagattccccagaagagccggccccggcagactgggcctgggcaccgccggcgagagacccagaagagacaaccccagcctgagcatcgacctgaccttccacctgctgagaaccctgctggagctggccagaacccagagccagagagagagagccgagcagaacagaatcatcttcgacagcgtgggcaagtag

SEQ ID NO: 104774 - DNA, 339 bp, synthetic construct
  misc_feature 1..339: note = Description of Artificial Sequence: Synthetic coding sequence
  source 1..339: mol_type = other DNA
atgaccagatgcgccctgctgctgctgatggtgctgatgctgggcagagtgctggtggtgcccgtgacccccatccccaccttccagctgagaccccagaacagcccccagaccacccccagacccgccgccagcgagagccccagcgccgcccccacctggccctgggccgcccagagccactgcagccccaccagacaccccggcagcagaatcgtgctgagcctggacgtgcccatcggcctgctgcagatcctgctggagcaggccagagccagagccgccagagagcaggccaccaccaacgccagaatcctggccagagtgggccactgctag

SEQ ID NO: 104775 - DNA, 1923 bp, synthetic construct
  misc_feature 1..1923: note = Description of Artificial Sequence: Synthetic coding sequence
  source 1..1923: mol_type = other DNA
atgggccagcccagcctgacctggatgctgatggtggtggtggccagctggttcatcaccaccgccgccaccgacaccagcgaggccagatggtgcagcgagtgccacagcaacgccacctgcaccgaggacgaggccgtgaccacctgcacctgccaggagggcttcaccggcgacggcctgacctgcgtggacctggacgagtgcgccatccccggcgcccacaactgcagcgccaacagcagctgcgtgaacacccccggcagcttcagctgcgtgtgccccgagggcttcagactgagccccggcctgggctgcaccgacgtggacgagtgcgccgagcccggcctgagccactgccacgccctggccacctgcgtgaacgtggtgggcagctacctgtgcgtgtgccccgccggctacagaggcgacggctggcactgcgagtgcagccccggcagctgcggccccggcctggactgcgtgcccgagggcgacgccctggtgtgcgccgacccctgccaggcccacagaaccctggacgagtactggagaagcaccgagtacggcgagggctacgcctgcgacaccgacctgagaggctggtacagattcgtgggccagggcggcgccagaatggccgagacctgcgtgcccgtgctgagatgcaacaccgccgcccccatgtggctgaacggcacccaccccagcagcgacgagggcatcgtgagcagaaaggcctgcgcccactggagcggccactgctgcctgtgggacgccagcgtgcaggtgaaggcctgcgccggcggctactacgtgtacaacctgaccgccccccccgagtgccacctggcctactgcaccgaccccagcagcgtggagggcacctgcgaggagtgcagcatcgacgaggactgcaagagcaacaacggcagatggcactgccagtgcaagcaggacttcaacatcaccgacatcagcctgctggagcacagactggagtgcggcgccaacgacatgaaggtgagcctgggcaagtgccagctgaagagcctgggcttcgacaaggtgttcatgtacctgagcgacagcagatgcagcggcttcaacgacagagacaacagagactgggtgagcgtggtgacccccgccagagacggcccctgcggcaccgtgctgaccagaaacgagacccacgccacctacagcaacaccctgtacctggccgacgagatcatcatcagagacctgaacatcaagatcaacttcgcctgcagctaccccctggacatgaaggtgagcctgaagaccgccctgcagcccatggtgagcgccctgaacatcagagtgggcggcaccggcatgttcaccgtgagaatggccctgttccagacccccagctacacccagccctaccagggcagcagcgtgaccctgagcaccgaggccttcctgtacgtgggcaccatgctggacggcggcgacctgagcagattcgccctgctgatgaccaactgctacgccacccccagcagcaacgccaccgaccccctgaagtacttcatcatccaggacagatgcccccacaccagagacagcaccatccaggtggtggagaacggcgagagcagccagggcagattcagcgtgcagatgttcagattcgccggcaactacgacctggtgtacctgcactgcgaggtgtacctgtgcgacaccatgaacgagaagtgcaagcccacctgcagcggcaccagattcagaagcggcagcgtgatcgaccagagcagagtgctgaacctgggccccatcaccagaaagggcgtgcaggccaccgtgagcagagccttcagcagcctgggcctgctgaaggtgtggctgcccctgctgctgagcgccaccctgaccctgaccttccagtag

SEQ ID NO: 104776 - DNA, 2022 bp, synthetic construct
  misc_feature 1..2022: note = Description of Artificial Sequence: Synthetic coding sequence
  source 1..2022: mol_type = other DNA
atgggccagcccagcctgacctggatgctgatggtggtggtggccagctggttcatcaccaccgccgccaccgacaccagcgaggccagaaccaagtacaactgccccgccagatggagctggagaaccccccagagaggcggcgacaccgagcagggccccgacgaggacttcaccagccagggcagatggtgcagcgagtgccacagcaacgccacctgcaccgaggacgaggccgtgaccacctgcacctgccaggagggcttcaccggcgacggcctgacctgcgtggacctggacgagtgcgccatccccggcgcccacaactgcagcgccaacagcagctgcgtgaacacccccggcagcttcagctgcgtgtgccccgagggcttcagactgagccccggcctgggctgcaccgacgtggacgagtgcgccgagcccggcctgagccactgccacgccctggccacctgcgtgaacgtggtgggcagctacctgtgcgtgtgccccgccggctacagaggcgacggctggcactgcgagtgcagccccggcagctgcggccccggcctggactgcgtgcccgagggcgacgccctggtgtgcgccgacccctgccaggcccacagaaccctggacgagtactggagaagcaccgagtacggcgagggctacgcctgcgacaccgacctgagaggctggtacagattcgtgggccagggcggcgccagaatggccgagacctgcgtgcccgtgctgagatgcaacaccgccgcccccatgtggctgaacggcacccaccccagcagcgacgagggcatcgtgagcagaaaggcctgcgcccactggagcggccactgctgcctgtgggacgccagcgtgcaggtgaaggcctgcgccggcggctactacgtgtacaacctgaccgccccccccgagtgccacctggcctactgcaccgaccccagcagcgtggagggcacctgcgaggagtgcagcatcgacgaggactgcaagagcaacaacggcagatggcactgccagtgcaagcaggacttcaacatcaccgacatcagcctgctggagcacagactggagtgcggcgccaacgacatgaaggtgagcctgggcaagtgccagctgaagagcctgggcttcgacaaggtgttcatgtacctgagcgacagcagatgcagcggcttcaacgacagagacaacagagactgggtgagcgtggtgacccccgccagagacggcccctgcggcaccgtgctgaccagaaacgagacccacgccacctacagcaacaccctgtacctggccgacgagatcatcatcagagacctgaacatcaagatcaacttcgcctgcagctaccccctggacatgaaggtgagcctgaagaccgccctgcagcccatggtgagcgccctgaacatcagagtgggcggcaccggcatgttcaccgtgagaatggccctgttccagacccccagctacacccagccctaccagggcagcagcgtgaccctgagcaccgaggccttcctgtacgtgggcaccatgctggacggcggcgacctgagcagattcgccctgctgatgaccaactgctacgccacccccagcagcaacgccaccgaccccctgaagtacttcatcatccaggacagatgcccccacaccagagacagcaccatccaggtggtggagaacggcgagagcagccagggcagattcagcgtgcagatgttcagattcgccggcaactacgacctggtgtacctgcactgcgaggtgtacctgtgcgacaccatgaacgagaagtgcaagcccacctgcagcggcaccagattcagaagcggcagcgtgatcgaccagagcagagtgctgaacctgggccccatcaccagaaagggcgtgcaggccaccgtgagcagagccttcagcagcctgggcctgctgaaggtgtggctgcccctgctgctgagcgccaccctgaccctgaccttccagtag

SEQ ID NO: 104777 - DNA, 1923 bp, synthetic construct; identical to SEQ ID NO: 104775
  misc_feature 1..1923: note = Description of Artificial Sequence: Synthetic coding sequence
  source 1..1923: mol_type = other DNA

SEQ ID NO: 104778 - DNA, 1923 bp, synthetic construct; identical to SEQ ID NO: 104775
  misc_feature 1..1923: note = Description of Artificial Sequence: Synthetic coding sequence
  source 1..1923: mol_type = other DNA

SEQ ID NO: 104779 - DNA, 2022 bp, synthetic construct; identical to SEQ ID NO: 104776
  misc_feature 1..2022: note = Description of Artificial Sequence: Synthetic coding sequence
  source 1..2022: mol_type = other DNA

SEQ ID NO: 104780 - DNA, 1857 bp, synthetic construct
  misc_feature 1..1857: note = Description of Artificial Sequence: Synthetic coding sequence
  source 1..1857: mol_type = other DNA
atgggccagcccagcctgacctggatgctgatggtggtggtggccagctggttcatcaccaccgccgccaccgacaccagcgaggccagatggtgcagcgagtgccacagcaacgccacctgcaccgaggacgaggccgtgaccacctgcacctgccaggagggcttcaccggcgacggcctgacctgcgtggacctggacgagtgcgccatccccggcgcccacaactgcagcgccaacagcagctgcgtgaacacccccggcagcttcagctgcgtgtgccccgagggcttcagactgagccccggcctgggctgcaccgacgtggacgagtgcgccgagcccggcctgagccactgccacgccctggccacctgcgtgaacgtggtgggcagctgcggccccggcctggactgcgtgcccgagggcgacgccctggtgtgcgccgacccctgccaggcccacagaaccctggacgagtactggagaagcaccgagtacggcgagggctacgcctgcgacaccgacctgagaggctggtacagattcgtgggccagggcggcgccagaatggccgagacctgcgtgcccgtgctgagatgcaacaccgccgcccccatgtggctgaacggcacccaccccagcagcgacgagggcatcgtgagcagaaaggcctgcgcccactggagcggccactgctgcctgtgggacgccagcgtgcaggtgaaggcctgcgccggcggctactacgtgtacaacctgaccgccccccccgagtgccacctggcctactgcaccgaccccagcagcgtggagggcacctgcgaggagtgcagcatcgacgaggactgcaagagcaacaacggcagatggcactgccagtgcaagcaggacttcaacatcaccgacatcagcctgctggagcacagactggagtgcggcgccaacgacatgaaggtgagcctgggcaagtgccagctgaagagcctgggcttcgacaaggtgttcatgtacctgagcgacagcagatgcagcggcttcaacgacagagacaacagagactgggtgagcgtggtgacccccgccagagacggcccctgcggcaccgtgctgaccagaaacgagacccacgccacctacagcaacaccctgtacctggccgacgagatcatcatcagagacctgaacatcaagatcaacttcgcctgcagctaccccctggacatgaaggtgagcctgaagaccgccctgcagcccatggtgagcgccctgaacatcagagtgggcggcaccggcatgttcaccgtgagaatggccctgttccagacccccagctacacccagccctaccagggcagcagcgtgaccctgagcaccgaggccttcctgtacgtgggcaccatgctggacggcggcgacctgagcagattcgccctgctgatgaccaactgctacgccacccccagcagcaacgccaccgaccccctgaagtacttcatcatccaggacagatgcccccacaccagagacagcaccatccaggtggtggagaacggcgagagcagccagggcagattcagcgtgcagatgttcagattcgccggcaactacgacctggtgtacctgcactgcgaggtgtacctgtgcgacaccatgaacgagaagtgcaagcccacctgcagcggcaccagattcagaagcggcagcgtgatcgaccagagcagagtgctgaacctgggccccatcaccagaaagggcgtgcaggccaccgtgagcagagccttcagcagcctgggcctgctgaaggtgtggctgcccctgctgctgagcgccaccctgaccctgaccttccagtag

SEQ ID NO: 104781 - DNA, 759 bp, synthetic construct
  misc_feature 1..759: note = Description of Artificial Sequence: Synthetic coding sequence
  source 1..759: mol_type = other DNA
atggcccccgccccccaggcccccgagagagaccccgtgggcagctggtacaacgtgaccatcctggtgaagatggacttcaaggagctgcagcaggtggaccccagactgctgaaccacatgagactgctgcacagcctggtgaccagcgccctgcagcccatggccagcaccgtgcaccacctgcacagcgcccccggcaacgccagcaccaccgtgagcagactgctgctgggcctgcccagacccctgcccgtggccgacgtgagcaccctgctgggcgacatcgccaagagagtgtacgaggtgatcagcgtgcaggtgcaggacgtgaacgagtgcttctacgaggagctgaacgcctgcagcggcagagagctgtgcgccaacctggagggcagctactggtgcgtgtgccaccaggaggcccccgccaccagccccagaaagctgaacctggagtgggaggactgcccccccgtgagcgactacgtggtgctgaacgtgaccagcgacagcttccaggtgagctggagactgaacagcacccagaaccacaccttccacgtgagagtgtacagaggcatggagctgctgagaagcgccagaacccagagccaggccctggccgtggccggcctggaggccggcgtgctgtacagagtgaagaccagctaccagggctgcggcgccgacgtgagcaccaccctgaccatcaagaccaagtacgtgctggagaagctggacttccagagctag

SEQ ID NO: 104782 - DNA, 555 bp, synthetic construct
  misc_feature 1..555: note = Description of Artificial Sequence: Synthetic coding sequence
  source 1..555: mol_type = other DNA
atggcccccgccccccaggcccccgagagagaccccgtgggcagctggtacaacgtgaccatcctggtgaagatggacttcaaggagctgcagcaggtggaccccagactgctgaaccacatgagactgctgcacagcctggtgaccagcgccctgcagcccatggccagcaccgtgcaccacctgcacagcgcccccggcaacgccagcaccaccgtgagcagactgctgctgggcctgcccagacccctgcccgtggccgacgtgagcaccctgctgggcgacatcgccaagagagtgtacgaggtgatcagcgtgcaggtgcaggacgtgaacgagtgcttctacgaggagctgaacgcctgcagcggcagagagctgtgcgccaacctggagggcagctactggtgcgtgtgccaccaggaggcccccgccaccagccccagaaagctgaacctggagtgggaggccagaggcctggagatccacctggagctgagagccaccagcaccagccacggcacccccctgagcagcgccgagaactgcctgtag

SEQ ID NO: 104783 - DNA, 3741 bp, synthetic construct
  misc_feature 1..3741: note = Description of Artificial Sequence: Synthetic coding sequence
  source 1..3741: mol_type = other DNA
atggtgtacagaacccagtacctggtggtggaggtgcccgagagcagaaacgtgaccgactgctgcgagggctacgagcagctgggcctgtactgcgtgctgcccctgaaccagagcggccagttcaccagcagacccggcgcctgccccgccgagggccccgagcccagcaccagcccctgcagcctggacatcgactgccccggcctggagaagtgctgcccctggagcggcggcagatactgcatggcccccgccccccaggcccccgagagagaccccgtgggcagctggtacaacgtgaccatcctggtgaagatggacttcaaggagctgcagcaggtggaccccagactgctgaaccacatgagactgctgcacagcctggtgaccagcgccctgcagcccatggccagcaccgtgcaccacctgcacagcgcccccggcaacgccagcaccaccgtgagcagactgctgctgggcctgcccagacccctgcccgtggccgacgtgagcaccctgctgggcgacatcgccaagagagtgtacgaggtgatcagcgtgcaggtgcaggacgtgaacgagtgcttctacgaggagctgaacgcctgcagcggcagagagctgtgcgccaacctggagggcagctactggtgcgtgtgccaccaggaggcccccgccaccagccccagaaagctgaacctggagtgggaggactgcccccccgtgagcgactacgtggtgctgaacgtgaccagcgacagcttccaggtgagctggagactgaacagcacccagaaccacaccttccacgtgagagtgtacagaggcatggagctgctgagaagcgccagaacccagagccaggccctggccgtggccggcctggaggccggcgtgctgtacagagtgaagaccagctaccagggctgcggcgccgacgtgagcaccaccctgaccatcaagaccaacgcccaggtgttcgaggtgaccatcaagatcgtgaaccacaacctgaccgagaagctgctgaacagaagcagcgtggagtaccaggacttcagcagacagctgctgcacgaggtggagagcagcttcccccccgtggtgagcgacctgtacagaagcggcaagctgagaatgcagatcgtgagcctgcaggccggcagcgtggtggtgagactgaagctgaccgtgcaggaccccggcttccccatgggcatcagcaccctggcccccatcctgcagcccctgctggccagcaccgtgttccagatcgacagacagggcaccagagtgcaggactgggacgagtgcgtggacagcgccgagcacgactgcagccccgccgcctggtgcatcaacctggagggcagctacacctgccagtgcagaaccaccagagacgccacccccagcagagccggcagagcctgcgagggcgacctggtgagccccatgggcggcggcctgagcgccgccaccggcgtgaccgtgcccggcctgggcaccggcaccgccgccctgggcctggagaacttcaccctgagccccagccccggctacccccagggcacccccgccgccggccaggcctggacccccgagcccagccccagaagaggcggcagcaacgtggtgggctacgacagaaacaacaccggcaagggcgtggagcaggagctgcagggcaacagcatcatggagccccccagctggcccagccccaccgaggaccccaccggccacttcctgtggcacgccaccagaagcaccagagagaccctgctgaaccccacctggctgagaaacgaggacagcggccccagcggcagcgtggacctgcccctgaccagcaccctgaccgccctgaagacccccgcctgcgtgcccgtgagcatcggcagaatcatggtgagcaacgtgaccagcaccggcttccacctggcctgggaggccgacctggccatggacagcaccttccagctgaccctgaccagcatgtggagccccgccgtggtgctggagacctggaacaccagcgtgaccctgagcggcctggagcccggcgtgctgcacctggtggagatcatggccaaggcctgcggcaaggagggcgccagagcccacctgaaggtgagaaccgccgccagaaagctgatcggcaaggtgagaatcaagaacgtgagatacagcgagagcttcagaaacgccagcagccaggagtacagagacttcctggagctgttcttcagaatggtgagaggcagcctgcccgccaccatgtgccagcacatggacgccggcggcgtgagaatggaggtggtgagcgtgaccaacggcagcatcgtggtggagttccacctgctgatcatcgccgacgtggacgtgcaggaggtgagcgccgccttcctgaccgccttccagaccgtgcccctgctggaggtgatcagaggcgacaccttcatccaggactacgacgagtgcgagagaaaggaggacgactgcgtgcccggcaccagctgcagaaacaccctgggcagcttcacctgcagctgcgagggcggcgcccccgacttccccgtggagtacagcgagagaccctgcgagggcgacagccccggcaacgagacctgggccaccagccccgagagacccctgaccaccgccggcaccaaggccgccttcgtgcagggcaccagccccaccccccagggcctgccccagagactgaacctgaccggcgccgtgagagtgctgtgcgagatcgagaaggtggtggtggccatccagaagagattcctgcagcaggagagcatccccgagagcagcctgtacctgagccaccccagctgcaacgtgagccacagcaacggcacccacgtgctgctggaggccggctggagcgagtgcggcaccctgatgcagagcaacatgaccaacaccgtggtgagaaccaccctgagaaacgacctgagccaggagggcatcatccaccacctgaagatcctgagccccatctactgcgccttccagaacgacctgctgaccagcagcggcttcaccctggagtggggcgtgtacaccatcatcgaggacctgcacggcgccggcaacttcgtgaccgagatgcagctgttcatcggcgacagccccatcccccagaactacagcgtgagcgccagcgacgacgtgagaatcgaggtgggcctgtacagacagaagagcaacctgaaggtggtgctgaccgagtgctgggccacccccagcagcaacgccagagaccccatcaccttcagcttcatcaacaacagctgccccgtgcccaacacctacaccaacgtgatcgagaacggcaacagcaacaaggcccagttcaagctgagaatcttcagcttcatcaacgacagcatcgtgtacctgcactgcaagctgagagtgtgcatggagagccccggcgccacctgcaagatcaactgcaacaacttcagactgctgcagaacagcgagaccagcgccacccaccagatgagctggggccccctgatcagaagcgagggcgagcccccccacgccgaggccggcctgggcgccggctacgtggtgctgatcgtggtggccatcttcgtgctggtggccggcaccgccaccctgctgatcgtgagataccagagaatgaacggcagatacaacttcaagatccagagcaacaacttcagctaccaggtgttctacgagtag

SEQ ID NO: 104784 - DNA, 4125 bp, synthetic construct
  misc_feature 1..4125: note = Description of Artificial Sequence: Synthetic coding sequence
  source 1..4125: mol_type = other DNA
atggtgtacagaacccagtacctggtggtggaggtgcccgagagcagaaacgtgaccgactgctgcgagggctacgagcagctgggcctgtactgcgtgctgcccctgaaccagagcggccagttcaccagcagacccggcgcctgccccgccgagggccccgagcccagcaccagcccctgcagcctggacatcgactgccccggcctggagaagtgctgcccctggagcggcggcagatactgcatggcccccgccccccaggcccccgagagagaccccgtgggcagctggtacaacgtgaccatcctggtgaagatggacttcaaggagctgcagcaggtggaccccagactgctgaaccacatgagactgctgcacagcctggtgaccagcgccctgcagcccatggccagcaccgtgcaccacctgcacagcgcccccggcaacgccagcaccaccgtgagcagactgctgctgggcctgcccagacccctgcccgtggccgacgtgagcaccctgctgggcgacatcgccaagagagtgtacgaggtgatcagcgtgcaggtgcaggacgtgaacgagtgcttctacgaggagctgaacgcctgcagcggcagagagctgtgcgccaacctggagggcagctactggtgcgtgtgccaccaggaggcccccgccaccagccccagaaagctgaacctggagtgggaggactgcccccccgtgagcgactacgtggtgctgaacgtgaccagcgacagcttccaggtgagctggagactgaacagcacccagaaccacaccttccacgtgagagtgtacagaggcatggagctgctgagaagcgccagaacccagagccaggccctggccgtggccggcctggaggccggcgtgctgtacagagtgaagaccagctaccagggctgcggcgccgacgtgagcaccaccctgaccatcaagaccaacgcccaggtgttcgaggtgaccatcaagatcgtgaaccacaacctgaccgagaagctgctgaacagaagcagcgtggagtaccaggacttcagcagacagctgctgcacgaggtggagagcagcttcccccccgtggtgagcgacctgtacagaagcggcaagctgagaatgcagatcgtgagcctgcaggccggcagcgtggtggtgagactgaagctgaccgtgcaggaccccggcttccccatgggcatcagcaccctggcccccatcctgcagcccctgctggccagcaccgtgttccagatcgacagacagggcaccagagtgcaggactgggacgagtgcgtggacagcgccgagcacgactgcagccccgccgcctggtgcatcaacctggagggcagctacacctgccagtgcagaaccaccagagacgccacccccagcagagccggcagagcctgcgagggcgacctggtgagccccatgggcggcggcctgagcgccgccaccggcgtgaccgtgcccggcctgggcaccggcaccgccgccctgggcctggagaacttcaccctgagccccagccccggctacccccagggcacccccgccgccggccaggcctggacccccgagcccagccccagaagaggcggcagcaacgtggtgggctacgacagaaacaacaccggcaagggcgtggagcaggaggtgcccagcaccgcccccggcctgggcatggaccagggcagccccagccaggtgaaccccagccagggcagccccagccagggcagcctgagacaggagagcaccagccaggccagccccagccagagaagcaccagccagggcagccccagccaggtgaaccccagccagagaagcaccagccacgccaacagcagccagggcagccccagccagggcagccccagccaggagagccccagccagggcagcaccagccaggccagccccagccacagaaacaccatcggcgtgatcggcaccaccagcagccccaaggccaccggcagcacccacagcttcccccccggcgccaccgacggccccctggccctgcccggccagctgcagggcaacagcatcatggagccccccagctggcccagccccaccgaggaccccaccggccacttcctgtggcacgccaccagaagcaccagagagaccctgctgaaccccacctggctgagaaacgaggacagcggccccagcggcagcgtggacctgcccctgaccagcaccctgaccgccctgaagacccccgcctgcgtgcccgtgagcatcggcagaatcatggtgagcaacgtgaccagcaccggcttccacctggcctgggaggccgacctggccatggacagcaccttccagctgaccctgaccagcatgtggagccccgccgtggtgctggagacctggaacaccagcgtgaccctgagcggcctggagcccggcgtgctgcacctggtggagatcatggccaaggcctgcggcaaggagggcgccagagcccacctgaaggtgagaaccgccgccagaaagctgatcggcaaggtgagaatcaagaacgtgagatacagcgagagcttcagaaacgccagcagccaggagtacagagacttcctggagctgttcttcagaatggtgagaggcagcctgcccgccaccatgtgccagcacatggacgccggcggcgtgagaatggaggtggtgagcgtgaccaacggcagcatcgtggtggagttccacctgctgatcatcgccgacgtggacgtgcaggaggtgagcgccgccttcctgaccgccttccagaccgtgcccctgctggaggtgatcagaggcgacaccttcatccaggactacgacgagtgcgagagaaaggaggacgactgcgtgcccggcaccagctgcagaaacaccctgggcagcttcacctgcagctgcgagggcggcgcccccgacttccccgtggagtacagcgagagaccctgcgagggcgacagccccggcaacgagacctgggccaccagccccgagagacccctgaccaccgccggcaccaaggccgccttcgtgcagggcaccagccccaccccccagggcctgccccagagactgaacctgaccggcgccgtgagagtgctgtgcgagatcgagaaggtggtggtggccatccagaagagattcctgcagcaggagagcatccccgagagcagcctgtacctgagccaccccagctgcaacgtgagccacagcaacggcacccacgtgctgctggaggccggctggagcgagtgcggcaccctgatgcagagcaacatgaccaacaccgtggtgagaaccaccctgagaaacgacctgagccaggagggcatcatccaccacctgaagatcctgagccccatctactgcgccttccagaacgacctgctgaccagcagcggcttcaccctggagtggggcgtgtacaccatcatcgaggacctgcacggcgccggcaacttcgtgaccgagatgcagctgttcatcggcgacagccccatcccccagaactacagcgtgagcgccagcgacgacgtgagaatcgaggtgggcctgtacagacagaagagcaacctgaaggtggtgctgaccgagtgctgggccacccccagcagcaacgccagagaccccatcaccttcagcttcatcaacaacagctgccccgtgcccaacacctacaccaacgtgatcgagaacggcaacagcaacaaggcccagttcaagctgagaatcttcagcttcatcaacgacagcatcgtgtacctgcactgcaagctgagagtgtgcatggagagccccggcgccacctgcaagatcaactgcaacaacttcagactgctgcagaacagcgagaccagcgccacccaccagatgagctggggccccctgatcagaagcgagggcgagcccccccacgccgaggccggcctgggcgccggctacgtggtgctgatcgtggtggccatcttcgtgctggtggccggcaccgccaccctgctgatcgtgagataccagagaatgaacggcagatacaacttcaagatccagagcaacaacttcagctaccaggtgttctacgagtag

SEQ ID NO: 104785 - DNA, 3957 bp, synthetic construct
  misc_feature 1..3957: note = Description of Artificial Sequence: Synthetic coding sequence
  source 1..3957: mol_type = other DNA
atgctgagaaccagcggcctggccctgctggccctggtgagcgccgtgggccccagccaggccagcggcttcaccgagaagggcctgagcctgctgggctaccagctgtgcagccacagagtgacccacaccgtgcagaaggtggaggccgtgcagaccagctacaccagctacgtgagctgcggcggctggatcccctggagaagatgccccaagatggtgtacagaacccagtacctggtggtggaggtgcccgagagcagaaacgtgaccgactgctgcgagggctacgagcagctgggcctgtactgcgtgctgcccctgaaccagagcggccagttcaccagcagacccggcgcctgccccgccgagggccccgagcccagcaccagcccctgcagcctggacatcgactgccccggcctggagaagtgctgcccctggagcggcggcagatactgcatggcccccgccccccaggcccccgagagagaccccgtgggcagctggtacaacgtgaccatcctggtgaagatggacttcaaggagctgcagcaggtggaccccagactgctgaaccacatgagactgctgcacagcctggtgaccagcgccctgcagcccatggccagcaccgtgcaccacctgcacagcgcccccggcaacgccagcaccaccgtgagcagactgctgctgggcctgcccagacccctgcccgtggccgacgtgagcaccctgctgggcgacatcgccaagagagtgtacgaggtgatcagcgtgcaggtgcaggacgtgaacgagtgcttctacgaggagctgaacgcctgcagcggcagagagctgtgcgccaacctggagggcagctactggtgcgtgtgccaccaggaggcccccgccaccagccccagaaagctgaacctggagtgggaggactgcccccccgtgagcgactacgtggtgctgaacgtgaccagcgacagcttccaggtgagctggagactgaacagcacccagaaccacaccttccacgtgagagtgtacagaggcatggagctgctgagaagcgccagaacccagagccaggccctggccgtggccggcctggaggccggcgtgctgtacagagtgaagaccagctaccagggctgcggcgccgacgtgagcaccaccctgaccatcaagaccaacgcccaggtgttcgaggtgaccatcaagatcgtgaaccacaacctgaccgagaagctgctgaacagaagcagcgtggagtaccaggacttcagcagacagctgctgcacgaggtggagagcagcttcccccccgtggtgagcgacctgtacagaagcggcaagctgagaatgcagatcgtgagcctgcaggccggcagcgtggtggtgagactgaagctgaccgtgcaggaccccggcttccccatgggcatcagcaccctggcccccatcctgcagcccctgctggccagcaccgtgttccagatcgacagacagggcaccagagtgcaggactgggacgagtgcgtggacagcgccgagcacgactgcagccccgccgcctggtgcatcaacctggagggcagctacacctgccagtgcagaaccaccagagacgccacccccagcagagccggcagagcctgcgagggcgacctggtgagccccatgggcggcggcctgagcgccgccaccggcgtgaccgtgcccggcctgggcaccggcaccgccgccctgggcctggagaacttcaccctgagccccagccccggctacccccagggcacccccgccgccggccaggcctggacccccgagcccagccccagaagaggcggcagcaacgtggtgggctacgacagaaacaacaccggcaagggcgtggagcaggagctgcagggcaacagcatcatggagccccccagctggcccagccccaccgaggaccccaccggccacttcctgtggcacgccaccagaagcaccagagagaccctgctgaaccccacctggctgagaaacgaggacagcggccccagcggcagcgtggacctgcccctgaccagcaccctgaccgccctgaagacccccgcctgcgtgcccgtgagcatcggcagaatcatggtgagcaacgtgaccagcaccggcttccacctggcctgggaggccgacctggccatggacagcaccttccagctgaccctgaccagcatgtggagccccgccgtggtgctggagacctggaacaccagcgtgaccctgagcggcctggagcccggcgtgctgcacctggtggagatcatggccaaggcctgcggcaaggagggcgccagagcccacctgaaggtgagaaccgccgccagaaagctgatcggcaaggtgagaatcaagaacgtgagatacagcgagagcttcagaaacgccagcagccaggagtacagagacttcctggagctgttcttcagaatggtgagaggcagcctgcccgccaccatgtgccagcacatggacgccggcggcgtgagaatggaggtggtgagcgtgaccaacggcagcatcgtggtggagttccacctgctgatcatcgccgacgtggacgtgcaggaggtgagcgccgccttcctgaccgccttccagaccgtgcccctgctggaggtgatcagaggcgacaccttcatccaggactacgacgagtgcgagagaaaggaggacgactgcgtgcccggcaccagctgcagaaacaccctgggcagcttcacctgcagctgcgagggcggcgcccccgacttccccgtggagtacagcgagagaccctgcgagggcgacagccccggcaacgagacctgggccaccagccccgagagacccctgaccaccgccggcaccaaggccgccttcgtgcagggcaccagccccaccccccagggcctgccccagagactgaacctgaccggcgccgtgagagtgctgtgcgagatcgagaaggtggtggtggccatccagaagagattcctgcagcaggagagcatccccgagagcagcctgtacctgagccaccccagctgcaacgtgagccacagcaacggcacccacgtgctgctggaggccggctggagcgagtgcggcaccctgatgcagagcaacatgaccaacaccgtggtgagaaccaccctgagaaacgacctgagccaggagggcatcatccaccacctgaagatcctgagccccatctactgcgccttccagaacgacctgctgaccagcagcggcttcaccctggagtggggcgtgtacaccatcatcgaggacctgcacggcgccggcaacttcgtgaccgagatgcagctgttcatcggcgacagccccatcccccagaactacagcgtgagcgccagcgacgacgtgagaatcgaggtgggcctgtacagacagaagagcaacctgaaggtggtgctgaccgagtgctgggccacccccagcagcaacgccagagaccccatcaccttcagcttcatcaacaacagctgccccgtgcccaacacctacaccaacgtgatcgagaacggcaacagcaacaaggcccagttcaagctgagaatcttcagcttcatcaacgacagcatcgtgtacctgcactgcaagctgagagtgtgcatggagagccccggcgccacctgcaagatcaactgcaacaacttcagactgctgcagaacagcgagaccagcgccacccaccagatgagctggggccccctgatcagaagcgagggcgagcccccccacgccgaggccggcctgggcgccggctacgtggtgctgatcgtggtggccatcttcgtgctggtggccggcaccgccaccctgctgatcgtgagataccagagaatgaacggcagatacaacttcaagatccagagcaacaacttcagctaccaggtgttctacgagtag

SEQ ID NO: 104786 - DNA, 4341 bp, synthetic construct
  misc_feature 1..4341: note = Description of Artificial Sequence: Synthetic coding sequence
  source 1..4341: mol_type = other DNA
atgctgagaaccagcggcctggccctgctggccctggtgagcgccgtgggccccagccaggccagcggcttcaccgagaagggcctgagcctgctgggctaccagctgtgcagccacagagtgacccacaccgtgcagaaggtggaggccgtgcagaccagctacaccagctacgtgagctgcggcggctggatcccctggagaagatgccccaagatggtgtacagaacccagtacctggtggtggaggtgcccgagagcagaaacgtgaccgactgctgcgagggctacgagcagctgggcctgtactgcgtgctgcccctgaaccagagcggccagttcaccagcagacccggcgcctgccccgccgagggccccgagcccagcaccagcccctgcagcctggacatcgactgccccggcctggagaagtgctgcccctggagcggcggcagatactgcatggcccccgccccccaggcccccgagagagaccccgtgggcagctggtacaacgtgaccatcctggtgaagatggacttcaaggagctgcagcaggtggaccccagactgctgaaccacatgagactgctgcacagcctggtgaccagcgccctgcagcccatggccagcaccgtgcaccacctgcacagcgcccccggcaacgccagcaccaccgtgagcagactgctgctgggcctgcccagacccctgcccgtggccgacgtgagcaccctgctgggcgacatcgccaagagagtgtacgaggtgatcagcgtgcaggtgcaggacgtgaacgagtgcttctacgaggagctgaacgcctgcagcggcagagagctgtgcgccaacctggagggcagctactggtgcgtgtgccaccaggaggcccccgccaccagccccagaaagctgaacctggagtgggaggactgcccccccgtgagcgactacgtggtgctgaacgtgaccagcgacagcttccaggtgagctggagactgaacagcacccagaaccacaccttccacgtgagagtgtacagaggcatggagctgctgagaagcgccagaacccagagccaggccctggccgtggccggcctggaggccggcgtgctgtacagagtgaagaccagctaccagggctgcggcgccgacgtgagcaccaccctgaccatcaagaccaacgcccaggtgttcgaggtgaccatcaagatcgtgaaccacaacctgaccgagaagctgctgaacagaagcagcgtggagtaccaggacttcagcagacagctgctgcacgaggtggagagcagcttcccccccgtggtgagcgacctgtacagaagcggcaagctgagaatgcagatcgtgagcctgcaggccggcagcgtggtggtgagactgaagctgaccgtgcaggaccccggcttccccatgggcatcagcaccctggcccccatcctgcagcccctgctggccagcaccgtgttccagatcgacagacagggcaccagagtgcaggactgggacgagtgcgtggacagcgccgagcacgactgcagccccgccgcctggtgcatcaacctggagggcagctacacctgccagtgcagaaccaccagagacgccacccccagcagagccggcagagcctgcgagggcgacctggtgagccccatgggcggcggcctgagcgccgccaccggcgtgaccgtgcccggcctgggcaccggcaccgccgccctgggcctggagaacttcaccctgagccccagccccggctacccccagggcacccccgccgccggccaggcctggacccccgagcccagccccagaagaggcggcagcaacgtggtgggctacgacagaaacaacaccggcaagggcgtggagcaggaggtgcccagcaccgcccccggcctgggcatggaccagggcagccccagccaggtgaaccccagccagggcagccccagccagggcagcctgagacaggagagcaccagccaggccagccccagccagagaagcaccagccagggcagccccagccaggtgaaccccagccagagaagcaccagccacgccaacagcagccagggcagccccagccagggcagccccagccaggagagccccagccagggcagcaccagccaggccagccccagccacagaaacaccatcggcgtgatcggcaccaccagcagccccaaggccaccggcagcacccacagcttcccccccggcgccaccgacggccccctggccctgcccggccagctgcagggcaacagcatcatggagccccccagctggcccagccccaccgaggaccccaccggccacttcctgtggcacgccaccagaagcaccagagagaccctgctgaaccccacctggctgagaaacgaggacagcggccccagcggcagcgtggacctgcccctgaccagcaccctgaccgccctgaagacccccgcctgcgtgcccgtgagcatcggcagaatcatggtgagcaacgtgaccagcaccggcttccacctggcctgggaggccgacctggccatggacagcaccttccagctgaccctgaccagcatgtggagccccgccgtggtgctggagacctggaacaccagcgtgaccctgagcggcctggagcccggcgtgctgcacctggtggagatcatggccaaggcctgcggcaaggagggcgccagagcccacctgaaggtgagaaccgccgccagaaagctgatcggcaaggtgagaatcaagaacgtgagatacagcgagagcttcagaaacgccagcagccaggagtacagagacttcctggagctgttcttcagaatggtgagaggcagcctgcccgccaccatgtgccagcacatggacgccggcggcgtgagaatggaggtggtgagcgtgaccaacggcagcatcgtggtggagttccacctgctgatcatcgccgacgtggacgtgcaggaggtgagcgccgccttcctgaccgccttccagaccgtgcccctgctggaggtgatcagaggcgacaccttcatccaggactacgacgagtgcgagagaaaggaggacgactgcgtgcccggcaccagctgcagaaacaccctgggcagcttcacctgcagctgcgagggcggcgcccccgacttccccgtggagtacagcgagagaccctgcgagggcgacagccccggcaacgagacctgggccaccagccccgagagacccctgaccaccgccggcaccaaggccgccttcgtgcagggcaccagccccaccccccagggcctgccccagagactgaacctgaccggcgccgtgagagtgctgtgcgagatcgagaaggtggtggtggccatccagaagagattcctgcagcaggagagcatccccgagagcagcctgtacctgagccaccccagctgcaacgtgagccacagcaacggcacccacgtgctgctggaggccggctggagcgagtgcggcaccctgatgcagagcaacatgaccaacaccgtggtgagaaccaccctgagaaacgacctgagccaggagggcatcatccaccacctgaagatcctgagccccatctactgcgccttccagaacgacctgctgaccagcagcggcttcaccctggagtggggcgtgtacaccatcatcgaggacctgcacggcgccggcaacttcgtgaccgagatgcagctgttcatcggcgacagccccatcccccagaactacagcgtgagcgccagcgacgacgtgagaatcgaggtgggcctgtacagacagaagagcaacctgaaggtggtgctgaccgagtgctgggccacccccagcagcaacgccagagaccccatcaccttcagcttcatcaacaacagctgccccgtgcccaacacctacaccaacgtgatcgagaacggcaacagcaacaaggcccagttcaagctgagaatcttcagcttcatcaacgacagcatcgtgtacctgcactgcaagctgagagtgtgcatggagagccccggcgccacctgcaagatcaactgcaacaacttcagactgctgcagaacagcgagaccagcgccacccaccagatgagctggggccccctgatcagaagcgagggcgagcccccccacgccgaggccggcctgggcgccggctacgtggtgctgatcgtggtggccatcttcgtgctggtggccggcaccgccaccctgctgatcgtgagataccagagaatgaacggcagatacaacttcaagatccagagcaacaacttcagctaccaggtgttctacgagtag

SEQ ID NO: 104787 - DNA, 234 bp, synthetic construct
  misc_feature 1..234: note = Description of Artificial Sequence: Synthetic coding sequence
  source 1..234: mol_type = other DNA
cccgtgggcagctggtacaacgtgaccatcctggtgaagatggacttcaaggagctgcagcaggtggaccccagactgctgaaccacatgagactgctgcacagcctgatgagcatgagcgtgagcatgagaagcagcatgcccgccctggagggcaactgcgcccagacctggagagccagaaccggcgccagcgtgaccagaaagctgcagcccagactgcacggcagctag

SEQ ID NO: 104788 - DNA, 411 bp, synthetic construct
  misc_feature 1..411: note = Description of Artificial Sequence: Synthetic coding sequence
  source 1..411: mol_type = other DNA
atgcagctgttcatcggcgacagccccatcccccagaactacagcgtgagcgccagcgacgacgtgagaatcgaggtgggcctgtacagacagaagagcaacctgaaggtggtgctgaccgagtgctgggccacccccagcagcaacgccagagaccccatcaccttcagcttcatcaacaacagctgccccgtgcccaacacctacaccaacgtgatcgagaacggcaacagcaacaaggcccagttcaagctgagaatcttcagcttcatcaacgacagcatcgtgtacctgcactgcaagctgagagtgtgcatggagagccccggcgccacctgcaagatcgccgccctgggcagaagaacccacgtggactggtgggccttccccatcagccagtggctgagctag

SEQ ID NO: 104789 - DNA, 1221 bp, synthetic construct
  misc_feature 1..1221: note = Description of Artificial Sequence: Synthetic coding sequence
  source 1..1221: mol_type = other DNA
atgaagaagaagcagcagcaccccggcggcggcgccgacccctggccccacggcgcccccatgggcggcgccccccccggcctgggcagctggaagagaagagtgcccctgctgcccttcctgagattcagcctgagagactacggcttctgcatggccaccctgctggtgttctgcctgggcagcctgctgtaccagctgagcggcggcccccccagattcctgctggacctgagacagtacctgggcaacagcacctacctggacgaccacggccccccccccagcaaggtgctgcccttccccagccaggtggtgtacaacagagtgggcaagtgcggcagcagaaccgtggtgctgctgctgagaatcctgagcgagaagcacggcttcaacctggtgaccagcgacatccacaacaagaccagactgaccaagaacgagcagatggagctgatcaagaacatcagcaccgccgagcagccctacctgttcaccagacacgtgcacttcctgaacttcagcagattcggcggcgaccagcccgtgtacatcaacatcatcagagaccccgtgaacagattcctgagcaactacttcttcagaagattcggcgactggagaggcgagcagaaccacatgatcagaacccccagcatgagacaggaggagagatacctggacatcaacgagtgcatcctggagaactaccccgagtgcagcaaccccagactgttctacatcatcccctacttctgcggccagcaccccagatgcagagagcccggcgagtgggccctggagagagccaagctgaacgtgaacgagaacttcctgctggtgggcatcctggaggagctggaggacgtgctgctgctgctggagagattcctgccccactacttcaagggcgtgctgagcatctacaaggaccccgagcacagaaagctgggcaacatgaccgtgaccgtgaagaagaccgtgcccagccccgaggccgtgcagatcctgtaccagagaatgagatacgagtacgagttctaccactacgtgaaggagcagttccacctgctgaagagaaagttcggcctgaagagccacgtgagcaagccccccctgagaccccacttcttcatccccacccccctggagaccgaggagcccatcgacgacgaggagcaggacgacgagaagtggctggaggacatctacaagagatag

SEQ ID NO: 104790 - DNA, 2274 bp, synthetic construct
  misc_feature 1..2274: note = Description of Artificial Sequence: Synthetic coding sequence
  source 1..2274: mol_type = other DNA
atggtgcccgacaccgcctgcgtgctgctgctgaccctggccgccctgggcgccagcggccagggccagagccccctgggcagcgacctgggcccccagatgctgagagagctgcaggagaccaacgccgccctgcaggacgtgagagagctgctgagacagcaggtgagagagatcaccttcctgaagaacaccgtgatggagtgcgacgcctgcggcatgcagcagagcgtgagaaccggcctgcccagcgtgagacccctgctgcactgcgcccccggcttctgcttccccggcgtggcctgcatccagaccgagagcggcgccagatgcggcccctgccccgccggcttcaccggcaacggcagccactgcaccgacgtgaacgagtgcaacgcccacccctgcttccccagagtgagatgcatcaacaccagccccggcttcagatgcgaggcctgcccccccggctacagcggccccacccaccagggcgtgggcctggccttcgccaaggccaacaagcaggtgtgcaccgacatcaacgagtgcgagaccggccagcacaactgcgtgcccaacagcgtgtgcatcaacaccagaggcagcttccagtgcggcccctgccagcccggcttcgtgggcgaccaggccagcggctgccagagaagagcccagagattctgccccgacggcagccccagcgagtgccacgagcacgccgactgcgtgctggagagagacggcagcagaagctgcgtgtgcgccgtgggctgggccggcaacggcatcctgtgcggcagagacaccgacctggacggcttccccgacgagaagctgagatgccccgagagacagtgcagaaaggacaactgcgtgaccgtgcccaacagcggccaggaggacgtggacagagacggcatcggcgacgcctgcgaccccgacgccgacggcgacggcgtgcccaacgagaaggacaactgccccctggtgagaaaccccgaccagagaaacaccgacgaggacaagtggggcgacgcctgcgacaactgcagaagccagaagaacgacgaccagaaggacaccgaccaggacggcagaggcgacgcctgcgacgacgacatcgacggcgacagaatcagaaaccaggccgacaactgccccagagtgcccaacagcgaccagaaggacagcgacggcgacggcatcggcgacgcctgcgacaactgcccccagaagagcaaccccgaccaggccgacgtggaccacgacttcgtgggcgacgcctgcgacagcgaccaggaccaggacggcgacggccaccaggacagcagagacaactgccccaccgtgcccaacagcgcccaggaggacagcgaccacgacggccagggcgacgcctgcgacgacgacgacgacaacgacggcgtgcccgacagcagagacaactgcagactggtgcccaaccccggccaggaggacgccgacagagacggcgtgggcgacgtgtgccaggacgacttcgacgccgacaaggtggtggacaagatcgacgtgtgccccgagaacgccgaggtgaccctgaccgacttcagagccttccagaccgtggtgctggaccccgagggcgacgcccagatcgaccccaactgggtggtgctgaaccagggcagagagatcgtgcagaccatgaacagcgaccccggcctggccgtgggctacaccgccttcaacggcgtggacttcgagggcaccttccacgtgaacaccgtgaccgacgacgactacgccggcttcatcttcggctaccaggacagcagcagcttctacgtggtgatgtggaagcagatggagcagacctactggcaggccaaccccttcagagccgtggccgagcccggcatccagctgaaggccgtgaagagcagcaccggccccggcgagcagctgagaaacgccctgtggcacaccggcgacaccgagagccaggtgagactgctgtggaaggaccccagaaacgtgggctggaaggacaagaagagctacagatggttcctgcagcacagaccccaggtgggctacatcagagtgagattctacgagggccccgagctggtggccgacagcaacgtggtgctggacaccaccatgagaggcggcagactgggcgtgttctgcttcagccaggagaacatcatctgggccaacctgagatacagatgcaacgacaccatccccgaggactacgagacccaccagctgagacaggcctag

SEQ ID NO: 104791 - DNA, 822 bp, synthetic construct
  misc_feature 1..822: note = Description of Artificial Sequence: Synthetic coding sequence
  source 1..822: mol_type = other DNA
atggccagcgccgccgccgccgaggccgagaagggcagccccgtggtggtgggcctgctggtggtgggcaacatcatcatcctgctgagcggcctgagcctgttcgccgagaccatctgggtgaccgccgaccagtacagagtgtaccccctgatgggcgtgagcggcaaggacgacgtgttcgccggcgcctggatcgccatcttctgcggcttcagcttcttcatggtggccagcttcggcgtgggcgccgccctgtgcagaagaagaagcatggtgctgacctacctggtgctgatgctgatcgtgtacatcttcgagtgcgccagctgcatcaccagctacacccacagagactacatggtgagcaaccccagcctgatcaccaagcagatgctgaccttctacagcgccgacaccgaccagggccaggagctgaccagactgtgggacagagtgatgatcgagcaggagtgctgcggcaccagcggccccatggactgggtgaacttcaccagcgccttcagagccgccacccccgaggtggtgttcccctggccccccctgtgctgcagaagaaccggcaacttcatccccctgaacgaggagggctgcagactgggccacatggactacctgttcaccaaggccggcgtgcagtggcacaacctgagcagcctgcagagactgccccccggcttcaagggcttcagccacctgagcttccagagcagctgggactacagagccgccagcaacaccagcgccacccccagcaccgccaccagaggcgtgagcagaggcctgggcctgcccagctag

SEQ ID NO: 104792 - DNA, 783 bp, synthetic construct
  misc_feature 1..783: note = Description of Artificial Sequence: Synthetic coding sequence
  source 1..783: mol_type = other DNA
atggccaaggacaacagcaccgtgagatgcttccagggcctgctgatcttcggcaacgtgatcatcggctgctgcggcatcgccctgaccgccgagtgcatcttcttcgtgagcgaccagcacagcctgtaccccctgctggaggccaccgacaacgacgacatctacggcgccgcctggatcggcatcttcgtgggcatctgcctgttctgcctgagcgtgctgggcatcgtgggcatcatgaagagcagcagaaagatcctgctggcctacttcatcctgatgttcatcgtgtacgccttcgaggtggccagctgcatcaccgccgccacccagcaggacttcttcacccccaacctgttcctgaagcagatgctggagagataccagaacaacagcccccccaacaacgacgaccagtggaagaacaacggcgtgaccaagacctgggacagactgatgctgcaggacaactgctgcggcgtgaacggccccagcgactggcagaagtacaccagcgccttcagaaccgagaacaacgacgccgactacccctggcccagacagtgctgcgtgatgaacaacctgaaggagcccctgaacctggaggcctgcaagctgggcgtgcccggcttctaccacaaccagggctgctacgagctgatcagcggccccatgaacagacacgcctggggcgtggcctggttcggcttcgccatcctgtgctggaccttctgggtgctgctgggcaccatgttctactggagcagaatcgagtactag

SEQ ID NO: 104793 - DNA, 510 bp, synthetic construct
  misc_feature 1..510: note = Description of Artificial Sequence: Synthetic coding sequence
  source 1..510: mol_type = other DNA
atggccaaggacaacagcaccgtgagatgcttccagggcctgctgatcttcggcaacgtgatcatcggctgctgcggcatcgccctgaccgccgagtgcatcttcttcgtgagcgaccagcacagcctgtaccccctgctggaggccaccgacaacgacgacatctacggcgccgcctggatcggcatcttcgtgggcatctgcctgttctgcctgagcgtgctgggcatcgtgggcatcatgaagagcagcagaaagatcctgctggcctacttcatcctgatgttcatcgtgtacgccttcgaggtggccagctgcatcaccgccgccacccagcaggacttcttcacccccaacctgttcctgaagcagatgctggagagataccagaacaacagcccccccaacaacgacgaccagtggaagaacaacggcgtgaccaagacctgggacagactgatgctgcaggacaactgctgcggcgtgaacggccccagcgactggcagtag

SEQ ID NO: 104794 - DNA, 570 bp, synthetic construct
  misc_feature 1..570: note = Description of Artificial Sequence: Synthetic coding sequence
  source 1..570: mol_type = other DNA
atggccaaggacaacagcaccgtgagatgcttccagggcctgctgatcttcggcaacgtgatcatcggctgctgcggcatcgccctgaccgccgagtgcatcttcttcgtgagcgaccagcacagcctgtaccccctgctggaggccaccgacaacgacgacatctacggcgccgcctggatcggcatcttcgtgggcatctgcctgttctgcctgagcgtgctgggcatcgtgggcatcatgaagagcagcagaaagatcctgctggcctacttcatcctgatgttcatcgtgtacgccttcgaggtggccagctgcatcaccgccgccacccagcaggacttcttcacccccaacctgttcctgaagcagatgctggagagataccagaacaacagcccccccaacaacgacgaccagtggaagaacaacggcgtgaccaagacctgggacagactgatgctgcaggacaactgctgcggcgtgaacggccccagcgactggcagaagtacaccagcgccttcagaaccgagaacaacgacgccgactacccctggcccagacagtag

SEQ ID NO: 104795 - DNA, 555 bp, synthetic construct
  misc_feature 1..555: note = Description of Artificial Sequence: Synthetic coding sequence
  source 1..555: mol_type = other DNA
atggcccccctgctgcccatcagaaccctgcccctgatcctgatcctgctggccctgctgagccccggcgccgccgacttcaacatcagcagcctgagcggcctgctgagccccgccctgaccgagagcctgctggtggccctgcccccctgccacctgaccggcggcaacgccaccctgatggtgagaagagccaacgacagcaaggtggtgaccagcagcttcgtggtgcccccctgcagaggcagaagagagctggtgagcgtggtggacagcggcgccggcttcaccgtgaccagactgagcgcctaccaggtgaccaacctggtgcccggcaccaagttctacatcagctacctggtgaagaagggcaccgccaccgagagcagcagagagatccccatgagcaccctgcccagaagaaacatggagagcatcggcctgggcatggccagaaccggcggcatggtggtgatcaccgtgctgctgagcgtggccatgttcctgctggtgctgggcttcatcatcgccctggccctgggcagcagaaagtag

SEQ ID NO: 104796 - DNA, 333 bp, synthetic construct; identical to SEQ ID NO: 92518
  misc_feature 1..333: note = Description of Artificial Sequence: Synthetic coding sequence
  source 1..333: mol_type = other DNA

SEQ ID NO: 104797 - DNA, 501 bp, synthetic construct
  misc_feature 1..501: note = Description of Artificial Sequence: Synthetic coding sequence
  source 1..501: mol_type = other DNA
atgccccccctgtgggccctgctggccctgggctgcctgagattcggcagcgccgtgaacctgcagccccagctggccagcgtgaccttcgccaccaacaaccccaccctgaccaccgtggccctggagaagcccctgtgcatgttcgacagcaaggaggccctgaccggcacccacgaggtgtacctgtacgtgctggtggacagcgtgaccccctacagcaccatcgacacctggcccggcagaagaagcggcggcatgatcgtgatcaccagcatcctgggcagcctgcccttcttcctgctggtgggcttcgccggcgccatcgccctgagcctggtggacatgggcagcagcgacggcgagaccacccacgacagccagatcacccaggaggccgtgcccaagagcctgggcgccagcgagagcagctacaccagcgtgaacagaggcccccccctggacagagccgaggtgtacagcagcaagctgcaggactag

SEQ ID NO: 104798 - DNA, 963 bp, synthetic construct
  misc_feature 1..963: note = Description of Artificial Sequence: Synthetic coding sequence
  source 1..963: mol_type = other DNA
atgggcctgccctggggccagccccacctgggcctgcagatgctgctgctggccctgaactgcctgagacccagcctgagcctgggcgagtggggcagctggatggacgccagcagccagacccagggcgccggcggccccgccggcgtgatcggcccctgggcccccgcccccctgagactgggcgaggccgcccccggcacccccacccccgtgagcgtggcccacctgctgagccccgtggccaccgagctggtgccctacaccccccagatcaccgcctgggacctggagggcaaggtgaccgccaccaccttcagcctggagcagcccagatgcgtgttcgacggcctggccagcgccagcgacaccgtgtggctggtggtggccttcagcaacgccagcagaggcttccagaaccccgagaccctggccgacatccccgccagcccccagctgctgaccgacggccactacatgaccctgcccctgagccccgaccagctgccctgcggcgaccccatggccggcagcggcggcgcccccgtgctgagagtgggccacgaccacggctgccaccagcagcccttctgcaacgcccccctgcccggccccggcccctacagagaggaccccagaatccacagacacctggccagagccgccaagtggcagcacgacagacactacctgcaccccctgttcagcggcagaccccccaccctgggcctgctgggcagcctgtaccacgccctgctgcagcccgtggtggccggcggcggccccggcgccgccgccgacagactgctgcacggccaggccctgcacgaccccccccaccccacccagagaggcagacacaccgccggcggcctgcaggcctggcccggcccccccccccagccccagcccctggcctggcccctgtgcatgggcctgggcgagatgggcagatgggagtag

SEQ ID NO: 104799 - DNA, 831 bp, synthetic construct
  misc_feature 1..831: note = Description of Artificial Sequence: Synthetic coding sequence
  source 1..831: mol_type = other DNA
atgggcctgccctggggccagccccacctgggcctgcagatgctgctgctggccctgaactgcctgagacccagcctgagcctggagctggtgccctacaccccccagatcaccgcctgggacctggagggcaaggtgaccgccaccaccttcagcctggagcagcccagatgcgtgttcgacggcctggccagcgccagcgacaccgtgtggctggtggtggccttcagcaacgccagcagaggcttccagaaccccgagaccctggccgacatccccgccagcccccagctgctgaccgacggccactacatgaccctgcccctgagccccgaccagctgccctgcggcgaccccatggccggcagcggcggcgcccccgtgctgagagtgggccacgaccacggctgccaccagcagcccttctgcaacgcccccctgcccggccccggcccctacagagtgaagttcctgctgatggacaccagaggcagccccagagccgagaccaagtggagcgaccccatcaccctgcaccagggcaagacccccggcagcatcgacacctggcccggcagaagaagcggcagcatgatcgtgatcaccagcatcctgagcagcctggccggcctgctgctgctggccttcctggccgccagcaccatgagattcagcagcctgtggtggcccgaggaggcccccgagcagctgagaatcggcagcttcatgggcaagagatacatgacccaccacatcccccccagagaggccgccaccctgcccgtgggctgcaagcccggcctggaccccctgcccagcctgagcccctag

SEQ ID NO: 104800 - DNA, 963 bp, synthetic construct; identical to SEQ ID NO: 104798
  misc_feature 1..963: note = Description of Artificial Sequence: Synthetic coding sequence
  source 1..963: mol_type = other DNA

SEQ ID NO: 104801 - DNA, 831 bp, synthetic construct; identical to SEQ ID NO: 104799
  misc_feature 1..831: note = Description of Artificial Sequence: Synthetic coding sequence
  source 1..831: mol_type = other DNA

SEQ ID NO: 104802 - DNA, 963 bp, synthetic construct; identical to SEQ ID NO: 104798
  misc_feature 1..963: note = Description of Artificial Sequence: Synthetic coding sequence
  source 1..963: mol_type = other DNA

SEQ ID NO: 104803 - DNA, 1104 bp, synthetic construct
  misc_feature 1..1104: note = Description of Artificial Sequence: Synthetic coding sequence
  source 1..1104: mol_type = other DNA
atggaggccaacggcctgggcccccagggcttccccgagctgaagaacgacaccttcctgagagccgcctggggcgaggagaccgactacacccccgtgtggtgcatgagacaggccggcagatacctgcccgagttcagagagaccagagccgcccaggacttcttcagcacctgcagaagccccgaggcctgctgcgagctgaccctgcagcccctgagaagattccccctggacgccgccatcatcttcagcgacatcctggtggtgccccaggccctgggcatggaggtgaccatggtgcccggcaagggccccagcttccccgagcccctgagagaggagcaggacctggagagactgagagaccccgaggtggtggccagcgagctgggctacgtgttccaggccatcaccctgaccagacagagactggccggcagagtgcccctgatcggcttcgccggcgccccctggaccctgatgacctacatggtggagggcggcggcagcagcaccatggcccaggccaagagatggctgtaccagagaccccaggccagccaccagctgctgagaatcctgaccgacgccctggtgccctacctggtgggccaggtggtggccggcgcccaggccctgcagctgttcgagagccacgccggccacctgggcccccagctgttcaacaagttcgccctgccctacatcagagacgtggccaagcaggtgaaggccagactgagagaggccggcctggcccccgtgcccatgatcatcttcgccaaggacggccacttcgccctggaggagctggcccaggccggctacgaggtggtgggcctggactggaccgtggcccccaagaaggccagagagtgcgtgggcaagaccgtgaccctgcagggcaacctggacccctgcgccctgtacgccagcgaggaggagatcggccagctggtgaagcagatgctggacgacttcggcccccacagatacatcgccaacctgggccacggcctgtaccccgacatggaccccgagcacgtgggcgccttcgtggacgccgtgcacaagcacagcagactgctgagacagaactag

SEQ ID NO: 104804 - DNA, 582 bp, synthetic construct
  misc_feature 1..582: note = Description of Artificial Sequence: Synthetic coding sequence
  source 1..582: mol_type = other DNA
atggaggccaacggcctgggcccccagggcttccccgagctgaagaacgacaccttcctgagagccgcctggggcgaggagaccgactacacccccgtgtggtgcatgagacaggccggcagatacctgcccgagttcagagagaccagagccgcccaggacttcttcagcacctgcagaagccccgaggcctgctgcgagctgaccctgcaggccctgggcatggaggtgaccatggtgcccggcaagggccccagcttccccgagcccctgagagaggagcaggacctggagagactgagagaccccgaggtggtggccagcgagctgggctacgtgttccaggccatcaccctgaccagacagagactggccggcagagtgcccctgatcggcttcgccggcgccccctggaccctgatgacctacatggtggagggcggcggcagcagcaccatggcccaggccaagagatggctgtaccagagaccccaggccagccaccagctgctgagaatcctgaccgacgccctggtgccctacctggtgggccaggtggtggccggcgcccaggccctgtag

SEQ ID NO: 104805 - DNA, 684 bp, synthetic construct
  misc_feature 1..684: note = Description of Artificial Sequence: Synthetic coding sequence
  source 1..684: mol_type = other DNA
ccccagggcttccccgagctgaagaacgacaccttcctgagagccgcctggggcgaggagaccgactacacccccgtgtggtgcatgagacaggccggcagatacctgcccgagttcagagagaccagagccgcccaggacttcttcagcacctgcagaagccccgaggcctgctgcgagctgaccctgcagcccctgagaagattccccctggacgccgccatcatcttcagcgacatcctggtggtgccccaggccctgggcatggaggtgaccatggtgcccggcaagggccccagcttccccgagcccctgagagaggagcaggacctggagagactgagagaccccgaggtggtggccagcgagctgggctacgtgttccaggccatcaccctgaccagacagagactggccggcagagtgcccctgatcggcttcgccggcgcccccgccctgcagctgttcgagagccacgccggccacctgggcccccagctgttcaacaagttcgccctgccctacatcagagacgtggccaagcaggtgaaggccagactgagagaggccggcctggcccccgtgcccatgatcatcttcgccaaggacggccacttcgccctggaggagctggcccaggccggctacgaggtggtgggcctggactggaccgtggccccctag

SEQ ID NO: 104806 - DNA, 687 bp, synthetic construct
  misc_feature 1..687: note = Description of Artificial Sequence: Synthetic coding sequence
  source 1..687: mol_type = other DNA
tgaccccagggcttccccgagctgaagaacgacaccttcctgagagccgcctggggcgaggagaccgactacacccccgtgtggtgcatgagacaggccggcagatacctgcccgagttcagagagaccagagccgcccaggacttcttcagcacctgcagaagccccgaggcctgctgcgagctgaccctgcagcccctgagaagattccccctggacgccgccatcatcttcagcgacatcctggtggtgccccaggccctgggcatggaggtgaccatggtgcccggcaagggccccagcttccccgagcccctgagagaggagcaggacctggagagactgagagaccccgaggtggtggccagcgagctgggctacgtgttccaggccatcaccctgaccagacagagactggccggcagagtgcccctgatcggcttcgccggcgcccccgccctgcagctgttcgagagccacgccggccacctgggcccccagctgttcaacaagttcgccctgccctacatcagagacgtggccaagcaggtgaaggccagactgagagaggccggcctggcccccgtgcccatgatcatcttcgccaaggacggccacttcgccctggaggagctggcccaggccggctacgaggtggtgggcctggactggaccgtggccccctag

SEQ ID NO: 104807 - DNA, 582 bp, synthetic construct; identical to SEQ ID NO: 104804
  misc_feature 1..582: note = Description of Artificial Sequence: Synthetic coding sequence
  source 1..582: mol_type = other DNA

SEQ ID NO: 104808 - DNA, 402 bp, synthetic construct
  misc_feature 1..402: note = Description of Artificial Sequence: Synthetic coding sequence
  source 1..402: mol_type = other DNA
atgaaggtgctgctgctgaaggacgccaaggaggacgactgcggccaggacccctacatcagagagctgggcctgtacggcctggaggccaccctgatccccgtgctgagcttcgagttcctgagcctgcccagcttcagcgagaagctgagccaccccgaggactacggcggcctgatcttcaccagccccagagccgtggaggccgccgagctgtgcctggagcagaacaacaagaccgaggtgtgggagagaagcctgaaggagaagtggaacgccaagagcgtgtacgtggtgggcaacgccaccgccagcctggtgagcaagatcggcctggacaccgagggcgagacctgcggcaacgccgagaagctggccgagtacatctgcagcagcaagtag

SEQ ID NO: 104809 - DNA, 420 bp, synthetic construct
  misc_feature 1..420: note = Description of Artificial Sequence: Synthetic coding sequence
  source 1..420: mol_type = other DNA
atgaaggtgctgctgctgaaggacgccaaggaggacgactgcggccaggacccctacatcagagagctgggcctgtacggcctggaggccaccctgatccccgtgctgagcttcgagttcctgagcctgcccagcttcagcgagaagctgagccaccccgaggactacggcggcctgatcttcaccagccccagagccgtggaggccgccgagctgtgcctggagcagaacaacaagaccgaggtgtgggagagaagcctgaaggagaagtggaacgccaagagcgtgtacgtggtgggcaacgccaccgccagcctggtgagcaagatcggcctggacaccgagggcgagacctgcggcaacgccgagaagctggccgagtacatctgcagcagcgaggaggtgaagggcatcttctag

SEQ ID NO: 104810 - DNA, 798 bp, synthetic construct
  misc_feature 1..798: note = Description of Artificial Sequence: Synthetic coding sequence
  source 1..798: mol_type = other DNA
atgaaggtgctgctgctgaaggacgccaaggaggacgactgcggccaggacccctacatcagagagctgggcctgtacggcctggaggccaccctgatccccgtgctgagcttcgagttcctgagcctgcccagcttcagcgagaagctgagccaccccgaggactacggcggcctgatcttcaccagccccagagccgtggaggccgccgagctgtgcctggagcagaacaacaagaccgaggtgtgggagagaagcctgaaggagaagtggaacgccaagagcgtgtacgtggtgggcaacgccaccgccagcctggtgagcaagatcggcctggacaccgagggcgagacctgcggcaacgccgagaagctggccgagtacatctgcagcagagagagcagcgccctgcccctgctgttcccctgcggcaacctgaagagagagatcctgcccaaggccctgaaggacaagggcatcgccatggagagcatcaccgtgtaccagaccgtggcccaccccggcatccagggcaacctgaacagctactacagccagcagggcgtgcccgccagcatcaccttcttcagccccagcggcctgacctacagcctgaagcacatccaggagctgagcggcgacaacatcgaccagatcaagttcgccgccatcggccccaccaccgccagagccctggccgcccagggcctgcccgtgagctgcaccgccgagagccccaccccccaggccctggccaccggcatcagaaaggccctgcagccccacggctgctgctag

SEQ ID NO: 104811 - DNA, 798 bp, synthetic construct; identical to SEQ ID NO: 104810
  misc_feature 1..798: note = Description of Artificial Sequence: Synthetic coding sequence
  source 1..798: mol_type = other DNA

SEQ ID NO: 104812 - DNA, 558 bp, synthetic construct
  misc_feature 1..558: note = Description of Artificial Sequence: Synthetic coding sequence
  source 1..558: mol_type = other DNA
atgaaggtgctgctgctgaaggacgccaaggaggacgactgcggccaggacccctacatcagactgagccaccccgaggactacggcggcctgatcttcaccagccccagagccgtggaggccgccgagctgtgcctggagcagaacaacaagaccgaggtgtgggagagaagcctgaaggagaagtggaacgccaagagcgtgtacgtggtgggcaacgccaccgccagcctggtgagcaagatcggcctggacaccgagggcgagacctgcggcaacgccgagaagctggccgagtacatctgcagcagagagagcagcgccctgcccctgctgttcccctgcggcaacctgaagagagagatcctgcccaaggccctgaaggacaagggcatcgccatggagagcatcaccgtgtaccagaccgtggcccaccccggcatccagggcaacctgaacagctactacagccagcagggcgtgcccgccagcatcaccttcttcagccccagcggcctgacctacagcctgaagcacatccaggagctgagcggctag

SEQ ID NO: 104813 - DNA, 2700 bp, synthetic construct
  misc_feature 1..2700: note = Description of Artificial Sequence: Synthetic coding sequence
  source 1..2700: mol_type = other DNA
atggacagaaaggtggccagagagttcagacacaaggtggacttcctgatcgagaacgacgccgagaaggactacctgtacgacgtgctgagaatgtaccaccagaccatggacgtggccgtgctggtgggcgacctgaagctggtgatcaacgagcccagcagactgcccctgttcgacgccatcagacccctgatccccctgaagcaccaggtggagtacgaccagctgacccccagaagaagcagaaagctgaaggaggtgagactggacagactgcaccccgagggcctgggcctgagcgtgagaggcggcctggagttcggctgcggcctgttcatcagccacctgatcaagggcggccaggccgacagcgtgggcctgcaggtgggcgacgagatcgtgagaatcaacggctacagcatcagcagctgcacccacgaggaggtgatcaacctgatcagaaccaagaagaccgtgagcatcaaggtgagacacatcggcctgatccccgtgaagagcagccccgacgagcccctgacctggcagtacgtggaccagttcgtgagcgagagcggcggcgtgagaggcagcctgggcagccccggcaacagagagaacaaggagaagaaggtgttcatcagcctggtgggcagcagaggcctgggctgcagcatcagcagcggccccatccagaagcccggcatcttcatcagccacgtgaagcccggcagcctgagcgccgaggtgggcctggagatcggcgaccagatcgtggaggtgaacggcgtggacttcagcaacctggaccacaaggaggccgtgaacgtgctgaagagcagcagaagcctgaccatcagcatcgtggccgccgccggcagagagctgttcatgaccgacagagagagactggccgaggccagacagagagagctgcagagacaggagctgctgatgcagaagagactggccatggagagcaacaagatcctgcaggagcagcaggagatggagagacagagaagaaaggagatcgcccagaaggccgccgaggagaacgagagatacagaaaggagatggagcagatcgtggaggaggaggagaagttcaagaagcagtgggaggaggactggggcagcaaggagcagctgctgctgcccaagaccatcaccgccgaggtgcaccccgtgcccctgagaaagcccaagagcttcggctggttctacagatacgacggcaagttccccaccatcagaaagaagggcaaggacaagaagaaggccaagtacggcagcctgcaggacctgagaaagaacaagaaggagctggagttcgagcagaagctgtacaaggagaaggaggagatgctggagaaggagaagcagctgaagatcaacagactggcccaggaggtgagcgagaccgagagagaggacctggaggagagcgagaagatccagtactgggtggagagactgtgccagaccagactggagcagatcagcagcgccgacaacgagatcagcgagatgaccaccggcccccccccccccccccccagcgtgagccccctggccccccccctgagaagattcgccggcggcctgcacctgcacaccaccgacctggacgacatccccctggacatgttctactacccccccaagacccccagcgccctgcccgtgatgccccaccccccccccagcaaccccccccacaaggtgcccgccccccccgtgctgcccctgagcggccacgtgagcgccagcagcagcccctgggtgcagagaacccccccccccatccccatcccccccccccccagcgtgcccacccaggacctgacccccaccagacccctgcccagcgccctggaggaggccctgagcaaccaccccttcagaaccggcgacaccggcaaccccgtggaggactgggaggccaagaaccacagcggcaagcccaccaacagccccgtgcccgagcagagcttcccccccacccccaagaccttctgccccagcccccagccccccagaggccccggcgtgagcaccatcagcaagcccgtgatggtgcaccaggagcccaacttcatctacagacccgccgtgaagagcgaggtgctgccccaggagatgctgaagagaatggtggtgtaccagaccgccttcagacaggacttcagaaagtacgaggagggcttcgacccctacagcatgttcacccccgagcagatcatgggcaaggacgtgagactgctgagaatcaagaaggagggcagcctggacctggccctggagggcggcgtggacagccccatcggcaaggtggtggtgagcgccgtgtacgagagaggcgccgccgagagacacggcggcatcgtgaagggcgacgagatcatggccatcaacggcaagatcgtgaccgactacaccctggccgaggccgaggccgccctgcagaaggcctggaaccagggcggcgactggatcgacctggtggtggccgtgtgcccccccaaggagtacgacgacgagctggccagcctgcccagcagcgtggccgagagcccccagcccgtgagaaagctgctggaggacagagccgccgtgcacagacacggcttcctgctgcagctggagcccaccgacctgctgctgaagagcaagagaggcaaccagatccacagatag

SEQ ID NO: 104814 - DNA, 1659 bp, synthetic construct
  misc_feature 1..1659: note = Description of Artificial Sequence: Synthetic coding sequence
  source 1..1659: mol_type = other DNA
atggacagaaaggtggccagagagttcagacacaaggtggacttcctgatcgagaacgacgccgagaaggactacctgtacgacgtgctgagaatgtaccaccagaccatggacgtggccgtgctggtgggcgacctgaagctggtgatcaacgagcccagcagactgcccctgttcgacgccatcagacccctgatccccctgaagcaccaggtggagtacgaccagctgacccccagaagaagcagaaagctgaaggaggtgagactggacagactgcaccccgagggcctgggcctgagcgtgagaggcggcctggagttcggctgcggcctgttcatcagccacctgatcaagggcggccaggccgacagcgtgggcctgcaggtgggcgacgagatcgtgagaatcaacggctacagcatcagcagctgcacccacgaggaggtgatcaacctgatcagaaccaagaagaccgtgagcatcaaggtgagacacatcggcctgatccccgtgaagagcagccccgacgagcccctgacctggcagtacgtggaccagttcgtgagcgagagcggcggcgtgagaggcagcctgggcagccccggcaacagagagaacaaggagaagaaggtgttcatcagcctggtgggcagcagaggcctgggctgcagcatcagcagcggccccatccagaagcccggcatcttcatcagccacgtgaagcccggcagcctgagcgccgaggtgggcctggagatcggcgaccagatcgtggaggtgaacggcgtggacttcagcaacctggaccacaaggaggccgtgaacgtgctgaagagcagcagaagcctgaccatcagcatcgtggccgccgccggcagagagctgttcatgaccgacagagagagactggccgaggccagacagagagagctgcagagacaggagctgctgatgcagaagagactggccatggagagcaacaagatcctgcaggagcagcaggagatggagagacagagaagaaaggagatcgcccagaaggccgccgaggagaacgagagatacagaaaggagatggagcagatcgtggaggaggaggagaagttcaagaagcagtgggaggaggactggggcagcaaggagcagctgctgctgcccaagaccatcaccgccgaggtgcaccccgtgcccctgagaaagcccaagtacgaccagggcgtggagcccgagctggagcccgccgacgacctggacggcggcaccgaggagcagggcgagcaggacttcagaaagtacgaggagggcttcgacccctacagcatgttcacccccgagcagatcatgggcaaggacgtgagactgctgagaatcaagaaggagggcagcctggacctggccctggagggcggcgtggacagccccatcggcaaggtggtggtgagcgccgtgtacgagagaggcgccgccgagagacacggcggcatcgtgaagggcgacgagatcatggccatcaacggcaagatcgtgaccgactacaccctggccgaggccgaggccgccctgcagaaggcctggaaccagggcggcgactggatcgacctggtggtggccgtgtgcccccccaaggagtacgacgacgagctgaccttcttctag

SEQ ID NO: 104815 - DNA, 1602 bp, synthetic construct
  misc_feature 1..1602: note = Description of Artificial Sequence: Synthetic coding sequence
  source 1..1602: mol_type = other DNA
atggacagaaaggtggccagagagttcagacacaaggtggacttcctgatcgagaacgacgccgagaaggactacctgtacgacgtgctgagaatgtaccaccagaccatggacgtggccgtgctggtgggcgacctgaagctggtgatcaacgagcccagcagactgcccctgttcgacgccatcagacccctgatccccctgaagcaccaggtggagtacgaccagctgacccccagaagaagcagaaagctgaaggaggtgagactggacagactgcaccccgagggcctgggcctgagcgtgagaggcggcctggagttcggctgcggcctgttcatcagccacctgatcaagggcggccaggccgacagcgtgggcctgcaggtgggcgacgagatcgtgagaatcaacggctacagcatcagcagctgcacccacgaggaggtgatcaacctgatcagaaccaagaagaccgtgagcatcaaggtgagacacatcggcctgatccccgtgaagagcagccccgacgagcccctgacctggcagtacgtggaccagttcgtgagcgagagcggcggcgtgagaggcagcctgggcagccccggcaacagagagaacaaggagaagaaggtgttcatcagcctggtgggcagcagaggcctgggctgcagcatcagcagcggccccatccagaagcccggcatcttcatcagccacgtgaagcccggcagcctgagcgccgaggtgggcctggagatcggcgaccagatcgtggaggtgaacggcgtggacttcagcaacctggaccacaaggagggcagagagctgttcatgaccgacagagagagactggccgaggccagacagagagagctgcagagacaggagctgctgatgcagaagagactggccatggagagcaacaagatcctgcaggagcagcaggagatggagagacagagaagaaaggagatcgcccagaaggccgccgaggagaacgagagatacagaaaggagatggagcagatcgtggaggaggaggagaagttcaagaagcagtgggaggaggactggggcagcaaggagcagctgctgctgcccaagaccatcaccgccgaggtgcaccccgtgcccctgagaaagcccaagtacgaccagggcgtggagcccgagctggagcccgccgacgacctggacggcggcaccgaggagcagggcgagcaggacttcagaaagtacgaggagggcttcgacccctacagcatgttcacccccgagcagatcatgggcaaggacgtgagactgctgagaatcaagaaggagggcagcctggacctggccctggagggcggcgtggacagccccatcggcaaggtggtggtgagcgccgtgtacgagagaggcgccgccgagagacacggcggcatcgtgaagggcgacgagatcatggccatcaacggcaagatcgtgaccgactacaccctggccgaggccgaggccgccctgcagaaggcctggaaccagggcggcgactggatcgacctggtggtggccgtgtgcccccccaaggagtacgacgacgagctgaccttcttctag

SEQ ID NO: 104816 - DNA, 1566 bp, synthetic construct
  misc_feature 1..1566: note = Description of Artificial Sequence: Synthetic coding sequence
  source 1..1566: mol_type = other DNA
atgtaccaccagaccatggacgtggccgtgctggtgggcgacctgaagctggtgatcaacgagcccagcagactgcccctgttcgacgccatcagacccctgatccccctgaagcaccaggtggagtacgaccagctgacccccagaagaagcagaaagctgaaggaggtgagactggacagactgcaccccgagggcctgggcctgagcgtgagaggcggcctggagttcggctgcggcctgttcatcagccacctgatcaagggcggccaggccgacagcgtgggcctgcaggtgggcgacgagatcgtgagaatcaacggctacagcatcagcagctgcacccacgaggaggtgatcaacctgatcagaaccaagaagaccgtgagcatcaaggtgagacacatcggcctgatccccgtgaagagcagccccgacgagcccctgacctggcagtacgtggaccagttcgtgagcgagagcggcggcgtgagaggcagcctgggcagccccggcaacagagagaacaaggagaagaaggtgttcatcagcctggtgggcagcagaggcctgggctgcagcatcagcagcggccccatccagaagcccggcatcttcatcagccacgtgaagcccggcagcctgagcgccgaggtgggcctggagatcggcgaccagatcgtggaggtgaacggcgtggacttcagcaacctggaccacaaggaggccgtgaacgtgctgaagagcagcagaagcctgaccatcagcatcgtggccgccgccggcagagagctgttcatgaccgacagagagagactggccgaggccagacagagagagctgcagagacaggagctgctgatgcagaagagactggccatggagagcaacaagatcctgcaggagcagcaggagatggagagacagagaagaaaggagatcgcccagaaggccgccgaggagaacgagagatacagaaaggagatggagcagatcgtggaggaggaggagaagttcaagaagcagtgggaggaggactggggcagcaaggagcagctgctgctgcccaagaccatcaccgccgaggtgcaccccgtgcccctgagaaagcccaagtacgaccagggcgtggagcccgagctggagcccgccgacgacctggacggcggcaccgaggagcagggcgagcaggacttcagaaagtacgaggagggcttcgacccctacagcatgttcacccccgagcagatcatgggcaaggacgtgagactgctgagaatcaagaaggagggcagcctggacctggccctggagggcggcgtggacagccccatcggcaaggtggtggtgagcgccgtgtacgagagaggcgccgccgagagacacggcggcatcgtgaagggcgacgagatcatggccatcaacggcaagatcgtgaccgactacaccctggccgaggccgaggccgccctgcagaaggcctggaaccagggcggcgactggatcgacctggtggtggccgtgtgcccccccaaggagtacgacgacgagctgaccttcttctag

SEQ ID NO: 104817 - DNA, 2112 bp, synthetic construct
  misc_feature 1..2112: note = Description of Artificial Sequence: Synthetic coding sequence
  source 1..2112: mol_type = other DNA
atgagcgccagagccaccagacccagaagcagaagaggcagacacgccccccccggcgagctggaccccgtggccgagagcagcgaggaggtggaggccgccagcggcagcagcaagcccagcttcgcccccccccccgtgagcagcggcctggagcagctgggccccatggaggaggtgagcggccagggcctgggcagcagaaccgacaagaagatggacggcggcagcggcagagagctggccagcgcccccgaggtgccccacaagcccgccgtggaggcccaccaggcccccgaggccgccctgcagtacaaggagaccgtgccccccggcaacggcgcccccgacgtgttccagaccctgcagcacaccctgagcagcctggaggccgccgccgccgcctggagacaccagccccccagccacagcggccccatggagttcgagggcaccagcgagggcggcgccggcagcctgggcaagcaggagggcgccggcagctgccagagagaggccgccagactggccgagagaaacgcctggctgagactggccctgagcagcagagaggacgagctggtgagaacccaggccagcctggaggccatcagagccgagaaggagaccctgcagaaggaggtgcaggagctgcaggacagcctgctgagactggagccctgcccccacctgagccacaaccaggccggcggcagcggcagcggcagcagcagcagcgaggccgacagagagccctgggagacccaggacagcttcagcctggcccaccccctgctgagaagactgagaagccacagcagcacccagatcctgggcagcctgcccaaccagcccctgagccccgagatgcacatcatggaggcccagatggagcagctgagaggcagcatcgagaagctgaagtgcttcaacagactgctgagcgccgtgctgcagggctacaagggcagatgcgagggcctgagcatgcagctgggccagagagaggccgaggccaccgccctgcacctggccctgcagtacagcgagcactgcgaggaggcctacagagtgctgctggccctgagagaggccgacagcggcgccggcgacgaggcccccatgagcgacctgcaggccgccgagaaggaggcctggagactgctggcccaggaggaggccgccatggacgccggcgcccagcagaacccccagcccagccccgagggcagcagcgtggacaagcccaccccccaggaggtggccttccagctgagaagctacgtgcagagactgcaggagagaagaagcctgatgaagatcctgagcgagcccggccccaccctggcccccatgcccaccgtgcccagagccgaggccatggtgcaggccatcctgggcacccaggccggccccgccctgcccagactggagaagacccagatccagcaggacctggtggccgccagagaggccctggccgacctgatgctgagactgcagctggtgagaagagagaagagaggcctggagctgagagaggccgccctgagagccctgggccccgcccacgtgctgctgctggagcagctgagatgggagagagccgagctgcaggccggcggcgccaacagcagcggcggccacagcagcggcggcggcagcagcggcgacgaggaggagtggtaccagggcctgcccgccgtgcccggcggcaccagcggcatcgacggcggccaggtgggcagagcctgggaccccgagaagctggcccaggagctggccgccagcctgaccagaaccctggacctgcaggagcagctgcagagcctgagaagagagctggagcaggtggcccagaagggcagagccagaagaagccagagcgccgagctgaacagagacctgtgcaaggcccacagcgccctggtgctggccttcagaggcgcccacagaaagcaggaggagcagagaagaaagctggagcagcagatggccctgatggaggcccagcaggccgaggaggtggccgtgctggaggccaccgccagagccctgggcaagcccagaccccccctgccccccccccagctgggcgacaccttcctgtag

SEQ ID NO: 104818 - DNA, 1152 bp, synthetic construct
  misc_feature 1..1152: note = Description of Artificial Sequence: Synthetic coding sequence
  source 1..1152: mol_type = other DNA
atgagcgccagagccaccagacccagaagcagaagaggcagacacgccccccccggcgagctggaccccgtggccgagagcagcgaggaggtggaggccgccagcggcagcagcaagcccagcttcgcccccccccccgtgagcagcggcctggagcagctgggccccatggaggaggtgagcggccagggcctgggcagcagaaccgacaagaagatggacggcggcagcggcagagagctggccagcgcccccgaggtgccccacaagcccgccgtggaggcccaccaggcccccgaggccgccctgcagtacaaggagaccgtgccccccggcaacggcgcccccgacgtgttccagaccctgcagcacaccctgagcagcctggaggccgccgccgccgcctggagacaccagccccccagccacagcggccccatggagttcgagggcaccagcgagggcggcgccggcagcctgggcaagcaggagggcgccggcagctgccagagagaggccgccagactggccgagagaaacgcctggctgagactggccctgagcagcagagaggacgagctggtgagaacccaggccagcctggaggccatcagagccgagaaggagaccctgcagaaggaggtgcaggagctgcaggacagcctgctgagactggagccctgcccccacctgagccacaaccaggccggcggcagcggcagcggcagcagcagcagcgaggccgacagagagccctgggagacccaggacagcttcagcctggcccaccccctgctgagaagactgagaagccacagcagcacccagatcctgggcagcctgcccaaccagcccctgagccccgagatgcacatcatggaggcccagatggagcagctgagaggcagcatcgagaagctgaagtgcttcaacagactgctgagcgccgtgctgcagggctacaagggcagatgcgagggcctgagcatgcagctgggccagagagaggccgaggccaccgccctgcacctggccctgcagtacagagtgctgctgtgccaccccggctggagcgccgtggtgcccagctggctgaccgccaccagcgccagccccgtgcaggtgatcctgctgccccagccccccgagtag

SEQ ID NO: 104819 - DNA, 1920 bp, synthetic construct
  misc_feature 1..1920: note = Description of Artificial Sequence: Synthetic coding sequence
  source 1..1920: mol_type = other DNA
atgctgcaccccaccgacaagaagatggacggcggcagcggcagagagctggccagcgcccccgaggtgccccacaagcccgccgtggaggcccaccaggcccccgaggccgccctgcagtacaaggagaccgtgccccccggcaacggcgcccccgacgtgttccagaccctgcagcacaccctgagcagcctggaggccgccgccgccgcctggagacaccagccccccagccacagcggccccatggagttcgagggcaccagcgagggcggcgccggcagcctgggcaagcaggagggcgccggcagctgccagagagaggccgccagactggccgagagaaacgcctggctgagactggccctgagcagcagagaggacgagctggtgagaacccaggccagcctggaggccatcagagccgagaaggagaccctgcagaaggaggtgcaggagctgcaggacagcctgctgagactggagccctgcccccacctgagccacaaccaggccggcggcagcggcagcggcagcagcagcagcgaggccgacagagagccctgggagacccaggacagcttcagcctggcccaccccctgctgagaagactgagaagccacagcagcacccagatcctgggcagcctgcccaaccagcccctgagccccgagatgcacatcatggaggcccagatggagcagctgagaggcagcatcgagaagctgaagtgcttcaacagactgctgagcgccgtgctgcagggctacaagggcagatgcgagggcctgagcatgcagctgggccagagagaggccgaggccaccgccctgcacctggccctgcagtacagcgagcactgcgaggaggcctacagagtgctgctggccctgagagaggccgacagcggcgccggcgacgaggcccccatgagcgacctgcaggccgccgagaaggaggcctggagactgctggcccaggaggaggccgccatggacgccggcgcccagcagaacccccagcccagccccgagggcagcagcgtggacaagcccaccccccaggaggtggccttccagctgagaagctacgtgcagagactgcaggagagaagaagcctgatgaagatcctgagcgagcccggccccaccctggcccccatgcccaccgtgcccagagccgaggccatggtgcaggccatcctgggcacccaggccggccccgccctgcccagactggagaagacccagatccagcaggacctggtggccgccagagaggccctggccgacctgatgctgagactgcagctggtgagaagagagaagagaggcctggagctgagagaggccgccctgagagccctgggccccgcccacgtgctgctgctggagcagctgagatgggagagagccgagctgcaggccggcggcgccaacagcagcggcggccacagcagcggcggcggcagcagcggcgacgaggaggagtggtaccagggcctgcccgccgtgcccggcggcaccagcggcatcgacggcggccaggtgggcagagcctgggaccccgagaagctggcccaggagctggccgccagcctgaccagaaccctggacctgcaggagcagctgcagagcctgagaagagagctggagcaggtggcccagaagggcagagccagaagaagccagagcgccgagctgaacagagacctgtgcaaggcccacagcgccctggtgctggccttcagaggcgcccacagaaagcaggaggagcagagaagaaagctggagcagcagatggccctgatggaggcccagcaggccgaggaggtggccgtgctggaggccaccgccagagccctgggcaagcccagaccccccctgccccccccccagctgggcgacaccttcctgtag

SEQ ID NO: 104820 - DNA, 1386 bp, synthetic construct
  misc_feature 1..1386: note = Description of Artificial Sequence: Synthetic coding sequence
  source 1..1386: mol_type = other DNA
atgaacgaccagtaccacagagccgccagagacggctacctggagctgctgaaggaggccaccagaaaggagctgaacgcccccgacgaggacggcatgacccccaccctgtgggccgcctaccacggcaacctggagagcctgagactgatcgtgagcagaggcggcgaccccgacaagtgcgacatctggggcaacacccccctgcacctggccgccagcaacggccacctgcactgcctgagcttcctggtgagcttcggcgccaacatctggtgcctggacaacgactaccacacccccctggacatggccgccatgaagggccacatggagtgcgtgagatacctggacagcatcgccgccaagcagagcagcctgaaccccaagctggtgggcaagctgaaggacaaggccttcagagaggccgagagaagaatcagagagtgcgccaagctgcagagaagacaccacgagagaatggagagaagatacagaagagagctggccgagagaagcgacaccctgagcttcagcagcctgaccagcagcaccctgagcagaagactgcagcacctggccctgggcagccacctgccctacagccaggccaccctgcacggcaccgccagaggcaagaccaagatgcagaagaagctggagagaagaaagcagggcggcgagggcaccttcaaggtgagcgaggacggcagaaagagcgccagaagcctgagcggcctgcagctgggcagcgacgtgatgttcgtgagacagggcacctacgccaaccccaaggagtggggcagagcccccctgagagacatgttcctgagcgacgaggacagcgtgagcagagccaccctggccgccgagcccgcccacagcgaggtgagcaccgacagcggccacgacagcctgttcaccagacccggcctgggcaccatggtgttcagaagaaactacctgagcagcggcctgcacggcctgggcagagaggacggcggcctggacggcgtgggcgcccccagaggcagactgcagagcagccccagcctggacgacgacagcctgggcagcgccaacagcctgcaggacagaagctgcggcgaggagctgccctgggacgagctggacctgggcctggacgaggacctggagcccgagaccagccccctggagaccttcctggccagcctgcacatggaggacttcgccgccctgctgagacaggagaagatcgacctggaggccctgatgctgtgcagcgacctggacctgagaagcatcagcgtgcccctgggccccagaaagaagatcctgggcgccgtgagaagaagaagacaggccatggagagaccccccgccctggaggacaccgagctgtag

SEQ ID NO: 104821 - DNA, 15609 bp, synthetic construct
  misc_feature 1..15609: note = Description of Artificial Sequence: Synthetic coding sequence
  source 1..15609: mol_type = other DNA
atgaactgccccgtgctgagcctgggcagcggcttcctgttccaggtgatcgagatgctgatcttcgcctacttcgccagcatcagcctgaccgagagcagaggcctgttccccagactggagaacgtgggcgccttcaagaaggtgagcatcgtgcccacccaggccgtgtgcggcctgcccgacagaagcaccttctgccacagcagcgccgccgccgagagcatccagttctgcacccagagattctgcatccaggactgcccctacagaagcagccaccccacctacaccgccctgttcagcgccggcctgagcagctgcatcacccccgacaagaacgacctgcaccccaacgcccacagcaacagcgccagcttcatcttcggcaaccacaagagctgcttcagcagcccccccagccccaagctgatggccagcttcaccctggccgtgtggctgaagcccgagcagcagggcgtgatgtgcgtgatcgagaagaccgtggacggccagatcgtgttcaagctgaccatcagcgagaaggagaccatgttctactacagaaccgtgaacggcctgcagccccccatcaaggtgatgaccctgggcagaatcctggtgaagaagtggatccacctgagcgtgcaggtgcaccagaccaagatcagcttcttcatcaacggcgtggagaaggaccacacccccttcaacgccagaaccctgagcggcagcatcaccgacttcgccagcggcaccgtgcagatcggccagagcctgaacggcctggagcagttcgtgggcagaatgcaggacttcagactgtaccaggtggccctgaccaacagagagatcctggaggtgttcagcggcgacctgctgagactgcacgcccagagccactgcagatgccccggcagccaccccagagtgcaccccctggcccagagatactgcatccccaacgacgccggcgacaccgccgacaacagagtgagcagactgaaccccgaggcccaccccctgagcttcgtgaacgacaacgacgtgggcaccagctgggtgagcaacgtgttcaccaacatcacccagctgaaccagggcgtgaccatcagcgtggacctggagaacggccagtaccaggtgttctacatcatcatccagttcttcagcccccagcccaccgagatcagaatccagagaaagaaggagaacagcctggactgggaggactggcagtacttcgccagaaactgcggcgccttcggcatgaagaacaacggcgacctggagaagcccgacagcgtgaactgcctgcagctgagcaacttcaccccctacagcagaggcaacgtgaccttcagcatcctgacccccggccccaactacagacccggctacaacaacttctacaacacccccagcctgcaggagttcgtgaaggccacccagatcagattccacttccacggccagtactacaccaccgagaccgccgtgaacctgagacacagatactacgccgtggacgagatcaccatcagcggcagatgccagtgccacggccacgccgacaactgcgacaccaccagccagccctacagatgcctgtgcagccaggagagcttcaccgagggcctgcactgcgacagatgcctgcccctgtacaacgacaagcccttcagacagggcgaccaggtgtacgccttcaactgcaagccctgccagtgcaacagccacagcaagagctgccactacaacatcagcgtggaccccttccccttcgagcacttcagaggcggcggcggcgtgtgcgacgactgcgagcacaacaccaccggcagaaactgcgagctgtgcaaggactacttcttcagacaggtgggcgccgaccccagcgccatcgacgtgtgcaagccctgcgactgcgacaccgtgggcaccagaaacggcagcatcctgtgcgaccagatcggcggccagtgcaactgcaagagacacgtgagcggcagacagtgcaaccagtgccagaacggcttctacaacctgcaggagctggaccccgacggctgcagcccctgcaactgcaacaccagcggcaccgtggacggcgacatcacctgccaccagaacagcggccagtgcaagtgcaaggccaacgtgatcggcctgagatgcgaccactgcaacttcggcttcaagttcctgagaagcttcaacgacgtgggctgcgagccctgccagtgcaacctgcacggcagcgtgaacaagttctgcaacccccacagcggccagtgcgagtgcaagaaggaggccaagggcctgcagtgcgacacctgcagagagaacttctacggcctggacgtgaccaactgcaaggcctgcgactgcgacaccgccggcagcctgcccggcaccgtgtgcaacgccaagaccggccagtgcatctgcaagcccaacgtggagggcagacagtgcaacaagtgcctggagggcaacttctacctgagacagaacaacagcttcctgtgcctgccctgcaactgcgacaagaccggcaccatcaacggcagcctgctgtgcaacaagagcaccggccagtgcccctgcaagctgggcgtgaccggcctgagatgcaaccagtgcgagccccacagatacaacctgaccatcgacaacttccagcactgccagatgtgcgagtgcgacagcctgggcaccctgcccggcaccatctgcgaccccatcagcggccagtgcctgtgcgtgcccaacagacagggcagaagatgcaaccagtgccagcccggcttctacatcagccccggcaacgccaccggctgcctgccctgcagctgccacaccaccggcgccgtgaaccacatctgcaacagcctgaccggccagtgcgtgtgccaggacgccagcatcgccggccagagatgcgaccagtgcaaggaccactacttcggcttcgacccccagaccggcagatgccagccctgcaactgccacctgagcggcgccctgaacgagacctgccacctggtgaccggccagtgcttctgcaagcagttcgtgaccggcagcaagtgcgacgcctgcgtgcccagcgccagccacctggacgtgaacaacctgctgggctgcagcaagacccccttccagcagcccccccccagaggccaggtgcagagcagcagcgccatcaacctgagctggagcccccccgacagccccaacgcccactggctgacctacagcctgctgagagacggcttcgagatctacaccaccgaggaccagtacccctacagcatccagtacttcctggacaccgacctgctgccctacaccaagtacagctactacatcgagaccaccaacgtgcacggcagcaccagaagcgtggccgtgacctacaagaccaagcccggcgtgcccgagggcaacctgaccctgagctacatcatccccatcggcagcgacagcgtgaccctgacctggaccaccctgagcaaccagagcggccccatcgagaagtacatcctgagctgcgcccccctggccggcggccagccctgcgtgagctacgagggccacgagaccagcgccaccatctggaacctggtgcccttcgccaagtacgacttcagcgtgcaggcctgcaccagcggcggctgcctgcacagcctgcccatcaccgtgaccaccgcccaggcccccccccagagactgagcccccccaagatgcagaagatcagcagcaccgagctgcacgtggagtggagcccccccgccgagctgaacggcatcatcatcagatacgagctgtacatgagaagactgagaagcaccaaggagaccaccagcgaggagagcagagtgttccagagcagcggctggctgagcccccacagcttcgtggagagcgccaacgagaacgccctgaagcccccccagaccatgaccaccatcaccggcctggagccctacaccaagtacgagttcagagtgctggccgtgaacatggccggcagcgtgagcagcgcctgggtgagcgagagaaccggcgagagcgcccccgtgttcatgatcccccccagcgtgttccccctgagcagctacagcctgaacatcagctgggagaagcccgccgacaacgtgaccagaggcaaggtggtgggctacgacatcaacatgctgagcgagcagagcccccagcagagcatccccatggccttcagccagctgctgcacaccgccaagagccaggagctgagctacaccgtggagggcctgaagccctacagaatctacgagttcaccatcaccctgtgcaacagcgtgggctgcgtgaccagcgccagcggcgccggccagaccctggccgccgcccccgcccagctgagaccccccctggtgaagggcatcaacagcaccaccatccacctgagatggttcccccccgaggagctgaacggccccagccccatctaccagctggagagaagagagagcagcctgcccgccctgatgaccaccatgatgaagggcatcagattcatcggcaacggctactgcaagttccccagcagcacccaccccgtgaacaccgacttcaccggcatcaaggccagcttcagaaccaaggtgcccgagggcctgatcgtgttcgccgccagccccggcaaccaggaggagtacttcgccctgcagctgaagaagggcagactgtacttcctgttcgacccccagggcagccccgtggaggtgaccaccaccaacgaccacggcaagcagtacagcgacggcaagtggcacgagatcatcgccatcagacaccaggccttcggccagatcaccctggacggcatctacaccggcagcagcgccatcctgaacggcagcaccgtgatcggcgacaacaccggcgtgttcctgggcggcctgcccagaagctacaccatcctgagaaaggaccccgagatcatccagaagggcttcgtgggctgcctgaaggacgtgcacttcatgaagaactacaaccccagcgccatctgggagcccctggactggcagagcagcgaggagcagatcaacgtgtacaacagctgggagggctgccccgccagcctgaacgagggcgcccagttcctgggcgccggcttcctggagctgcacccctacatgttccacggcggcatgaacttcgagatcagcttcaagttcagaaccgaccagctgaacggcctgctgctgttcgtgtacaacaaggacggccccgacttcctggccatggagctgaagagcggcatcctgaccttcagactgaacaccagcctggccttcacccaggtggacctgctgctgggcctgagctactgcaacggcaagtggaacaaggtgatcatcaagaaggagggcagcttcatcagcgccagcgtgaacggcctgatgaagcacgccagcgagagcggcgaccagcccctggtggtgaacagccccgtgtacgtgggcggcatcccccaggagctgctgaacagctaccagcacctgtgcctggagcagggcttcggcggctgcatgaaggacgtgaagttcaccagaggcgccgtggtgaacctggccagcgtgagcagcggcgccgtgagagtgaacctggacggctgcctgagcaccgacagcgccgtgaactgcagaggcaacgacagcatcctggtgtaccagggcaaggagcagagcgtgtacgagggcggcctgcagcccttcaccgagtacctgtacagagtgatcgccagccacgagggcggcagcgtgtacagcgactggagcagaggcagaaccaccggcgccgccccccagagcgtgcccacccccagcagagtgagaagcctgaacggctacagcatcgaggtgacctgggacgagcccgtggtgagaggcgtgatcgagaagtacatcctgaaggcctacagcgaggacagcaccagaccccccagaatgcccagcgccagcgccgagttcgtgaacaccagcaacctgaccggcatcctgaccggcctgctgcccttcaagaactacgccgtgaccctgaccgcctgcaccctggccggctgcaccgagagcagccacgccctgaacatcagcaccccccaggaggccccccaggaggtgcagccccccgtggccaagagcctgcccagcagcctgctgctgagctggaacccccccaagaaggccaacggcatcatcacccagtactgcctgtacatggacggcagactgatctacagcggcagcgaggagaactacatcgtgaccgacctggccgtgttcaccccccaccagttcctgctgagcgcctgcacccacgtgggctgcaccaacagcagctgggtgctgctgtacaccgcccagctgccccccgagcacgtggacagccccgtgctgaccgtgctggacagcagaaccatccacatccagtggaagcagcccagaaagatcagcggcatcctggagagatacgtgctgtacatgagcaaccacacccacgacttcaccatctggagcgtgatctacaacagcaccgagctgttccaggaccacatgctgcagtacgtgctgcccggcaacaagtacctgatcaagctgggcgcctgcaccggcggcggctgcaccgtgagcgaggccagcgaggccctgaccgacgaggacatccccgagggcgtgcccgcccccaaggcccacagctacagccccgacagcttcaacgtgagctggaccgagcccgagtaccccaacggcgtgatcaccagctacggcctgtacctggacggcatcctgatccacaacagcagcgagctgagctacagagcctacggcttcgccccctggagcctgcacagcttcagagtgcaggcctgcaccgccaagggctgcgccctgggccccctggtggagaacagaaccctggaggccccccccgagggcaccgtgaacgtgttcgtgaagacccagggcagcagaaaggcccacgtgagatgggaggcccccttcagacccaacggcctgctgacccacagcgtgctgttcaccggcatcttctacgtggaccccgtgggcaacaactacaccctgctgaacgtgaccaaggtgatgtacagcggcgaggagaccaacctgtgggtgctgatcgacggcctggtgcccttcaccaactacaccgtgcaggtgaacatcagcaacagccagggcagcctgatcaccgaccccatcaccatcgccatgccccccggcgcccccgacggcgtgctgccccccagactgagcagcgccacccccaccagcctgcaggtggtgtggagcacccccgccagaaacaacgcccccggcagccccagataccagctgcagatgagaagcggcgacagcacccacggcttcctggagctgttcagcaaccccagcgccagcctgagctacgaggtgagcgacctgcagccctacaccgagtacatgttcagactggtggccagcaacggcttcggcagcgcccacagcagctggatccccttcatgaccgccgaggacaagcccggccccgtggtgccccccatcctgctggacgtgaagagcagaatgatgctggtgacctggcagcaccccagaaagagcaacggcgtgatcacccactacaacatctacctgcacggcagactgtacctgagaacccccggcaacgtgaccaactgcaccgtgatgcacctgcacccctacaccgcctacaagttccaggtggaggcctgcaccagcaagggctgcagcctgagccccgagagccagaccgtgtggaccctgcccggcgcccccgagggcatccccagccccgagctgttcagcgacacccccaccagcgtgatcatcagctggcagccccccacccaccccaacggcctggtggagaacttcaccatcgagagaagagtgaagggcaaggaggaggtgaccaccctggtgaccctgcccagaagccacagcatgagattcatcgacaagaccagcgccctgagcccctggaccaagtacgagtacagagtgctgatgagcaccctgcacggcggcaccaacagcagcgcctgggtggaggtgaccaccagacccagcagacccgccggcgtgcagccccccgtggtgaccgtgctggagcccgacgccgtgcaggtgacctggaagccccccctgatccagaacggcgacatcctgagctacgagatccacatgcccgacccccacatcaccctgaccaacgtgaccagcgccgtgctgagccagaaggtgacccacctgatccccttcaccaactacagcgtgaccatcgtggcctgcagcggcggcaacggctacctgggcggctgcaccgagagcctgcccacctacgtgaccacccaccccaccgtgccccagaacgtgggccccctgagcgtgatccccctgagcgagagctacgtggtgatcagctggcagccccccagcaagcccaacggccccaacctgagatacgagctgctgagaagaaagatccagcagcccctggccagcaacccccccgaggacctgaacagatggcacaacatctacagcggcacccagtggctgtacgaggacaagggcctgagcagattcaccacctacgagtacatgctgttcgtgcacaacagcgtgggcttcacccccagcagagaggtgaccgtgaccaccctggccggcctgcccgagagaggcgccaacctgaccgccagcgtgctgaaccacaccgccatcgacgtgagatgggccaagcccaccgtgcaggacctgcagggcgaggtggagtactacaccctgttctggagcagcgccaccagcaacgacagcctgaagatcctgcccgacgtgaacagccacgtgatcggccacctgaagcccaacaccgagtactggatcttcatcagcgtgttcaacggcgtgcacagcatcaacagcgccggcctgcacgccaccacctgcgacggcgagccccagggcatgctgccccccgaggtggtgatcatcaacagcaccgccgtgagagtgatctggaccagccccagcaaccccaacggcgtggtgaccgagtacagcatctacgtgaacaacaagctgtacaagaccggcatgaacgtgcccggcagcttcatcctgagagacctgagccccttcaccatctacgacatccaggtggaggtgtgcaccatctacgcctgcgtgaagagcaacggcacccagatcaccaccgtggaggacacccccagcgacatccccacccccaccatcagaggcatcaccagcagaagcctgcagatcgactgggtgagccccagaaagcccaacggcatcatcctgggctacgacctgctgtggaagacctggtacccctgcgccaagacccagaagctggtgcaggaccagagcgacgagctgtgcaaggccgtgagatgccagaagcccgagagcatctgcggccacatctgctacagcagcgaggccaaggtgtgctgcaacggcgtgctgtacaaccccaagcccggccacagatgctgcgaggagaagtacatccccttcgtgctgaacagcaccggcgtgtgctgcggcggcagaatccaggaggcccagcccaaccaccagtgctgcagcggctactacgccagaatcctgcccggcgaggtgtgctgccccgacgagcagcacaacagagtgagcgtgggcatcggcgacagctgctgcggcagaatgccctacagcaccagcggcaaccagatctgctgcgccggcagactgcacgacggccacggccagaagtgctgcggcagacagatcgtgagcaacgacctggagtgctgcggcggcgaggagggcgtggtgtacaacagactgcccggcatgttctgctgcggccaggactacgtgaacatgagcgacaccatctgctgcagcgccagcagcggcgagagcaaggcccacatcaagaagaacgaccccgtgcccgtgaagtgctgcgagaccgagctgatccccaagagccagaagtgctgcaacggcgtgggctacaaccccctgaagtacgtgtgcagcgacaagatcagcaccggcatgatgatgaaggagaccaaggagtgcagaatcctgtgccccgccagcatggaggccaccgagcactgcggcagatgcgacttcaacttcaccagccacatctgcaccgtgatcagaggcagccacaacagcaccggcaaggccagcatcgaggagatgtgcagcagcgccgaggagaccatccacaccggcagcgtgaacacctacagctacaccgacgtgaacctgaagccctacatgacctacgagtacagaatcagcgcctggaacagctacggcagaggcctgagcaaggccgtgagagccagaaccaaggaggacgtgccccagggcgtgagcccccccacctggaccaagatcgacaacctggaggacaccatcgtgctgaactggagaaagcccatccagagcaacggccccatcatctactacatcctgctgagaaacggcatcgagagattcagaggcaccagcctgagcttcagcgacaaggagggcatccagcccttccaggagtacagctaccagctgaaggcctgcaccgtggccggctgcgccaccagcagcaaggtggtggccgccaccacccagggcgtgcccgagagcatcctgccccccagcatcaccgccctgagcgccgtggccctgcacctgagctggagcgtgcccgagaagagcaacggcgtgatcaaggagtaccagatcagacaggtgggcaagggcctgatccacaccgacaccaccgacagaagacagcacaccgtgaccggcctgcagccctacaccaactacagcttcaccctgaccgcctgcaccagcgccggctgcaccagcagcgagcccttcctgggccagaccctgcaggccgcccccgagggcgtgtgggtgacccccagacacatcatcatcaacagcaccaccgtggagctgtactggagcctgcccgagaagcccaacggcctggtgagccagtaccagctgagcagaaacggcaacctgctgttcctgggcggcagcgaggagcagaacttcaccgacaagaacctggagcccaacagcagatacacctacaagctggaggtgaagaccggcggcggcagcagcgccagcgacgactacatcgtgcagacccccatgagcacccccgaggagatctaccccccctacaacatcaccgtgatcggcccctacagcatcttcgtggcctggatcccccccggcatcctgatccccgagatccccgtggagtacaacgtgctgctgaacgacggcagcgtgacccccctggccttcagcgtgggccaccaccagagcaccctgctggagaacctgacccccttcacccagtacgagatcagaatccaggcctgccagaacggcagctgcggcgtgagcagcagaatgttcgtgaagacccccgaggccgcccccatggacctgaacagccccgtgctgaaggccctgggcagcgcctgcatcgagatcaagtggatgccccccgagaagcccaacggcatcatcatcaactacttcatctacagaagacccgccggcatcgaggaggagagcgtgctgttcgtgtggagcgagggcgccctggagttcatggacgagggcgacaccctgagacccttcaccctgtacgagtacagagtgagagcctgcaacagcaagggcagcgtggagagcctgtggagcctgacccagaccctggaggcccccccccaggacttccccgccccctgggcccaggccaccagcgcccacagcgtgctgctgaactggaccaagcccgagagccccaacggcatcatcagccactacagagtggtgtaccaggagagacccgacgaccccaccttcaacagccccaccgtgcacgccttcaccgtgaagggcaccagccaccaggcccacctgtacggcctggagcccttcaccacctacagaatcggcgtggtggccgccaaccacgccggcgagatcctgagcccctggaccctgatccagaccctggagagcagccccagcggcctgagaaacttcatcgtggagcagaaggagaacggcagagccctgctgctgcagtggagcgagcccatgagaaccaacggcgtgatcaagacctacaacatcttcagcgacggcttcctggagtacagcggcctgaacagacagttcctgttcagaagactggaccccttcaccctgtacaccctgaccctggaggcctgcaccagagccggctgcgcccacagcgccccccagcccctgtggaccgacgaggccccccccgacagccagctggcccccaccgtgcacagcgtgaagagcaccagcgtggagctgagctggagcgagcccgtgaaccccaacggcaagatcatcagatacgaggtgatcagaagatgcttcgagggcaaggcctggggcaaccagaccatccaggccgacgagaagatcgtgttcaccgagtacaacaccgagagaaacaccttcatgtacaacgacaccggcctgcagccctggacccagtgcgagtacaagatctacacctggaacagcgccggccacacctgcagcagctggaacgtggtgagaaccctgcaggccccccccgagggcctgagcccccccgtgatcagctacgtgagcatgaacccccagaagctgctgatcagctggatcccccccgagcagagcaacggcatcatccagagctacagactgcagagaaacgagatgctgtaccccttcagcttcgaccccgtgaccttcaactacaccgacgaggagctgctgcccttcagcacctacagctacgccctgcaggcctgcaccagcggcggctgcagcaccagcaagcccaccagcatcaccaccctggaggccgcccccagcgaggtgagcccccccgacctgtgggccgtgagcgccacccagatgaacgtgtgctggagcccccccaccgtgcagaacggcaagatcaccaagtacctggtgagatacgacaacaaggagagcctggccggccagggcctgtgcctgctggtgagccacctgcagccctacagccagtacaacttcagcctggtggcctgcaccaacggcggctgcaccgccagcgtgagcaagagcgcctggaccatggaggccctgcccgagaacatggacagccccaccctgcaggtgaccggcagcgagagcatcgagatcacctggaagccccccagaaaccccaacggccagatcagaagctacgagctgagaagagacggcaccatcgtgtacaccggcctggagaccagatacagagacttcaccctgacccccggcgtggagtacagctacaccgtgaccgccagcaacagccagggcggcatcctgagccccctggtgaaggacagaaccagccccagcgcccccagcggcatggagccccccaagctgcaggccagaggcccccaggagatcctggtgaactgggacccccccgtgagaaccaacggcgacatcatcaactacaccctgttcatcagagagctgttcgagagagagaccaagatcatccacatcaacaccacccacaacagcttcggcatgcagagctacatcgtgaaccagctgaagcccttccacagatacgagatcagaatccaggcctgcaccaccctgggctgcgccagcagcgactggaccttcatccagacccccgagatcgcccccctgatgcagccccccccccacctggaggtgcagatggcccccggcggcttccagcccaccgtgagcctgctgtggaccggccccctgcagcccaacggcaaggtgctgtactacgagctgtacagaagacagatcgccacccagcccagaaagagcaaccccgtgctgatctacaacggcagcagcaccagcttcatcgacagcgagctgctgcccttcaccgagtacgagtaccaggtgtgggccgtgaacagcgccggcaaggcccccagcagctggacctggtgcagaaccggccccgccccccccgagggcctgagagcccccaccttccacgtgatcagcagcacccaggccgtggtgaacatcagcgcccccggcaagcccaacggcatcgtgagcctgtacagactgttcagcagcagcgcccacggcgccgagaccgtgctgagcgagggcatggccacccagcagaccctgcacggcctgcaggccttcaccaactacagcatcggcgtggaggcctgcacctgcttcaactgctgcagcaagggccccaccgccgagctgagaacccaccccgccccccccagcggcctgagcagcccccagatcggcaccctggccagcagaaccgccagcttcagatggagcccccccatgttccccaacggcgtgatccacagctacgagctgcagttccacgtggcctgcccccccgacagcgccctgccctgcacccccagccagatcgagaccaagtacaccggcctgggccagaaggccagcctgggcggcctgcagccctacaccacctacaagctgagagtggtggcccacaacgaggtgggcagcaccgccagcgagtggatcagcttcaccacccagaaggagctgccccagtacagagcccccttcagcgtggacagcaacctgagcgtggtgtgcgtgaactggagcgacaccttcctgctgaacggccagctgaaggagtacgtgctgaccgacggcggcagaagagtgtacagcggcctggacaccaccctgtacatccccagaaccgccgacaagaccttcttcttccaggtgatctgcaccaccgacgagggcagcgtgaagacccccctgatccagtacgacaccagcaccggcctgggcctggtgctgaccacccccggcaagaagaagggcagcagaagcaagagcaccgagttctacagcgagctgtggttcatcgtgctgatggccatgctgggcctgatcctgctggccatcttcctgagcctgatcctgcagagaaagatccacaaggagccctacatcagagagagaccccccctggtgcccctgcagaagagaatgagccccctgaacgtgtacccccccggcgagaaccacatgggcctggccgacaccaagatccccagaagcggcacccccgtgagcatcagaagcaacagaagcgcctgcgtgctgagaatccccagccagaaccagaccagcctgacctacagccagggcagcctgcacagaagcgtgagccagctgatggacatccaggacaagaaggtgctgatggacaacagcctgtgggaggccatcatgggccacaacagcggcctgtacgtggacgaggaggacctgatgaacgccatcaaggacttcagcagcgtgaccaaggagagaaccaccttcaccgacacccacctgtag

SEQ ID NO: 104822 - DNA, 4641 bp, synthetic construct
  misc_feature 1..4641: note = Description of Artificial Sequence: Synthetic coding sequence
  source 1..4641: mol_type = other DNA
atgaactgccccgtgctgagcctgggcagcggcttcctgttccaggtgatcgagatgctgatcttcgcctacttcgccagcatcagcctgaccgagagcagaggcctgttccccagactggagaacgtgggcgccttcaagaaggtgagcatcgtgcccacccaggccgtgtgcggcctgcccgacagaagcaccttctgccacagcagcgccgccgccgagagcatccagttctgcacccagagattctgcatccaggactgcccctacagaagcagccaccccacctacaccgccctgttcagcgccggcctgagcagctgcatcacccccgacaagaacgacctgcaccccaacgcccacagcaacagcgccagcttcatcttcggcaaccacaagagctgcttcagcagcccccccagccccaagctgatggccagcttcaccctggccgtgtggctgaagcccgagcagcagggcgtgatgtgcgtgatcgagaagaccgtggacggccagatcgtgttcaagctgaccatcagcgagaaggagaccatgttctactacagaaccgtgaacggcctgcagccccccatcaaggtgatgaccctgggcagaatcctggtgaagaagtggatccacctgagcgtgcaggtgcaccagaccaagatcagcttcttcatcaacggcgtggagaaggaccacacccccttcaacgccagaaccctgagcggcagcatcaccgacttcgccagcggcaccgtgcagatcggccagagcctgaacggcctggagcagttcgtgggcagaatgcaggacttcagactgtaccaggtggccctgaccaacagagagatcctggaggtgttcagcggcgacctgctgagactgcacgcccagagccactgcagatgccccggcagccaccccagagtgcaccccctggcccagagatactgcatccccaacgacgccggcgacaccgccgacaacagagtgagcagactgaaccccgaggcccaccccctgagcttcgtgaacgacaacgacgtgggcaccagctgggtgagcaacgtgttcaccaacatcacccagctgaaccagggcgtgaccatcagcgtggacctggagaacggccagtaccaggtgttctacatcatcatccagttcttcagcccccagcccaccgagatcagaatccagagaaagaaggagaacagcctggactgggaggactggcagtacttcgccagaaactgcggcgccttcggcatgaagaacaacggcgacctggagaagcccgacagcgtgaactgcctgcagctgagcaacttcaccccctacagcagaggcaacgtgaccttcagcatcctgacccccggccccaactacagacccggctacaacaacttctacaacacccccagcctgcaggagttcgtgaaggccacccagatcagattccacttccacggccagtactacaccaccgagaccgccgtgaacctgagacacagatactacgccgtggacgagatcaccatcagcggcagatgccagtgccacggccacgccgacaactgcgacaccaccagccagccctacagatgcctgtgcagccaggagagcttcaccgagggcctgcactgcgacagatgcctgcccctgtacaacgacaagcccttcagacagggcgaccaggtgtacgccttcaactgcaagccctgccagtgcaacagccacagcaagagctgccactacaacatcagcgtggaccccttccccttcgagcacttcagaggcggcggcggcgtgtgcgacgactgcgagcacaacaccaccggcagaaactgcgagctgtgcaaggactacttcttcagacaggtgggcgccgaccccagcgccatcgacgtgtgcaagccctgcgactgcgacaccgtgggcaccagaaacggcagcatcctgtgcgaccagatcggcggccagtgcaactgcaagagacacgtgagcggcagacagtgcaaccagtgccagaacggcttctacaacctgcaggagctggaccccgacggctgcagcccctgcaactgcaacaccagcggcaccgtggacggcgacatcacctgccaccagaacagcggccagtgcaagtgcaaggccaacgtgatcggcctgagatgcgaccactgcaacttcggcttcaagttcctgagaagcttcaacgacgtgggctgcgagccctgccagtgcaacctgcacggcagcgtgaacaagttctgcaacccccacagcggccagtgcgagtgcaagaaggaggccaagggcctgcagtgcgacacctgcagagagaacttctacggcctggacgtgaccaactgcaaggcctgcgactgcgacaccgccggcagcctgcccggcaccgtgtgcaacgccaagaccggccagtgcatctgcaagcccaacgtggagggcagacagtgcaacaagtgcctggagggcaacttctacctgagacagaacaacagcttcctgtgcctgccctgcaactgcgacaagaccggcaccatcaacggcagcctgctgtgcaacaagagcaccggccagtgcccctgcaagctgggcgtgaccggcctgagatgcaaccagtgcgagccccacagatacaacctgaccatcgacaacttccagcactgccagatgtgcgagtgcgacagcctgggcaccctgcccggcaccatctgcgaccccatcagcggccagtgcctgtgcgtgcccaacagacagggcagaagatgcaaccagtgccagcccggcttctacatcagccccggcaacgccaccggctgcctgccctgcagctgccacaccaccggcgccgtgaaccacatctgcaacagcctgaccggccagtgcgtgtgccaggacgccagcatcgccggccagagatgcgaccagtgcaaggaccactacttcggcttcgacccccagaccggcagatgccagccctgcaactgccacctgagcggcgccctgaacgagacctgccacctggtgaccggccagtgcttctgcaagcagttcgtgaccggcagcaagtgcgacgcctgcgtgcccagcgccagccacctggacgtgaacaacctgctgggctgcagcaagacccccttccagcagcccccccccagaggccaggtgcagagcagcagcgccatcaacctgagctggagcccccccgacagccccaacgcccactggctgacctacagcctgctgagagacggcttcgagatctacaccaccgaggaccagtacccctacagcatccagtacttcctggacaccgacctgctgccctacaccaagtacagctactacatcgagaccaccaacgtgcacggcagcaccagaagcgtggccgtgacctacaagaccaagcccggcgtgcccgagggcaacctgaccctgagctacatcatccccatcggcagcgacagcgtgaccctgacctggaccaccctgagcaaccagagcggccccatcgagaagtacatcctgagctgcgcccccctggccggcggccagccctgcgtgagctacgagggccacgagaccagcgccaccatctggaacctggtgcccttcgccaagtacgacttcagcgtgcaggcctgcaccagcggcggctgcctgcacagcctgcccatcaccgtgaccaccgcccaggcccccccccagagactgagcccccccaagatgcagaagatcagcagcaccgagctgcacgtggagtggagcccccccgccgagctgaacggcatcatcatcagatacgagctgtacatgagaagactgagaagcaccaaggagaccaccagcgaggagagcagagtgttccagagcagcggctggctgagcccccacagcttcgtggagagcgccaacgagaacgccctgaagcccccccagaccatgaccaccatcaccggcctggagccctacaccaagtacgagttcagagtgctggccgtgaacatggccggcagcgtgagcagcgcctgggtgagcgagagaaccggcgagagcgcccccgtgttcatgatcccccccagcgtgttccccctgagcagctacagcctgaacatcagctgggagaagcccgccgacaacgtgaccagaggcaaggtggtgggctacgacatcaacatgctgagcgagcagagcccccagcagagcatccccatggccttcagccagctgctgcacaccgccaagagccaggagctgagctacaccgtggagggcctgaagccctacagaatctacgagttcaccatcaccctgtgcaacagcgtgggctgcgtgaccagcgccagcggcgccggccagaccctggccgccgcccccgcccagctgagaccccccctggtgaagggcatcaacagcaccaccatccacctgagatggttcccccccgaggagctgaacggccccagccccatctaccagctggagagaagagagagcagcctgcccgccctgatgaccaccatgatgaagggcatcagattcatcggcaacggctactgcaagttccccagcagcacccaccccgtgaacaccgacttcaccggcaagtgcgtgtag

SEQ ID NO: 104823 - DNA, 15681 bp, synthetic construct
  misc_feature 1..15681: note = Description of Artificial Sequence: Synthetic coding sequence
  source 1..15681: mol_type = other DNA
atgaactgccccgtgctgagcctgggcagcggcttcctgttccaggtgatcgagatgctgatcttcgcctacttcgccagcatcagcctgaccgagagcagaggcctgttccccagactggagaacgtgggcgccttcaagaaggtgagcatcgtgcccacccaggccgtgtgcggcctgcccgacagaagcaccttctgccacagcagcgccgccgccgagagcatccagttctgcacccagagattctgcatccaggactgcccctacagaagcagccaccccacctacaccgccctgttcagcgccggcctgagcagctgcatcacccccgacaagaacgacctgcaccccaacgcccacagcaacagcgccagcttcatcttcggcaaccacaagagctgcttcagcagcccccccagccccaagctgatggccagcttcaccctggccgtgtggctgaagcccgagcagcagggcgtgatgtgcgtgatcgagaagaccgtggacggccagatcgtgttcaagctgaccatcagcgagaaggagaccatgttctactacagaaccgtgaacggcctgcagccccccatcaaggtgatgaccctgggcagaatcctggtgaagaagtggatccacctgagcgtgcaggtgcaccagaccaagatcagcttcttcatcaacggcgtggagaaggaccacacccccttcaacgccagaaccctgagcggcagcatcaccgacttcgccagcggcaccgtgcagatcggccagagcctgaacggcctggagcagttcgtgggcagaatgcaggacttcagactgtaccaggtggccctgaccaacagagagatcctggaggtgttcagcggcgacctgctgagactgcacgcccagagccactgcagatgccccggcagccaccccagagtgcaccccctggcccagagatactgcatccccaacgacgccggcgacaccgccgacaacagagtgagcagactgaaccccgaggcccaccccctgagcttcgtgaacgacaacgacgtgggcaccagctgggtgagcaacgtgttcaccaacatcacccagctgaaccagggcgtgaccatcagcgtggacctggagaacggccagtaccaggtgttctacatcatcatccagttcttcagcccccagcccaccgagatcagaatccagagaaagaaggagaacagcctggactgggaggactggcagtacttcgccagaaactgcggcgccttcggcatgaagaacaacggcgacctggagaagcccgacagcgtgaactgcctgcagctgagcaacttcaccccctacagcagaggcaacgtgaccttcagcatcctgacccccggccccaactacagacccggctacaacaacttctacaacacccccagcctgcaggagttcgtgaaggccacccagatcagattccacttccacggccagtactacaccaccgagaccgccgtgaacctgagacacagatactacgccgtggacgagatcaccatcagcggcagatgccagtgccacggccacgccgacaactgcgacaccaccagccagccctacagatgcctgtgcagccaggagagcttcaccgagggcctgcactgcgacagatgcctgcccctgtacaacgacaagcccttcagacagggcgaccaggtgtacgccttcaactgcaagccctgccagtgcaacagccacagcaagagctgccactacaacatcagcgtggaccccttccccttcgagcacttcagaggcggcggcggcgtgtgcgacgactgcgagcacaacaccaccggcagaaactgcgagctgtgcaaggactacttcttcagacaggtgggcgccgaccccagcgccatcgacgtgtgcaagccctgcgactgcgacaccgtgggcaccagaaacggcagcatcctgtgcgaccagatcggcggccagtgcaactgcaagagacacgtgagcggcagacagtgcaaccagtgccagaacggcttctacaacctgcaggagctggaccccgacggctgcagcccctgcaactgcaacaccagcggcaccgtggacggcgacatcacctgccaccagaacagcggccagtgcaagtgcaaggccaacgtgatcggcctgagatgcgaccactgcaacttcggcttcaagttcctgagaagcttcaacgacgtgggctgcgagccctgccagtgcaacctgcacggcagcgtgaacaagttctgcaacccccacagcggccagtgcgagtgcaagaaggaggccaagggcctgcagtgcgacacctgcagagagaacttctacggcctggacgtgaccaactgcaaggcctgcgactgcgacaccgccggcagcctgcccggcaccgtgtgcaacgccaagaccggccagtgcatctgcaagcccaacgtggagggcagacagtgcaacaagtgcctggagggcaacttctacctgagacagaacaacagcttcctgtgcctgccctgcaactgcgacaagaccggcaccatcaacggcagcctgctgtgcaacaagagcaccggccagtgcccctgcaagctgggcgtgaccggcctgagatgcaaccagtgcgagccccacagatacaacctgaccatcgacaacttccagcactgccagatgtgcgagtgcgacagcctgggcaccctgcccggcaccatctgcgaccccatcagcggccagtgcctgtgcgtgcccaacagacagggcagaagatgcaaccagtgccagcccggcttctacatcagccccggcaacgccaccggctgcctgccctgcagctgccacaccaccggcgccgtgaaccacatctgcaacagcctgaccggccagtgcgtgtgccaggacgccagcatcgccggccagagatgcgaccagtgcaaggaccactacttcggcttcgacccccagaccggcagatgccagccctgcaactgccacctgagcggcgccctgaacgagacctgccacctggtgaccggccagtgcttctgcaagcagttcgtgaccggcagcaagtgcgacgcctgcgtgcccagcgccagccacctggacgtgaacaacctgctgggctgcagcaagacccccttccagcagcccccccccagaggccaggtgcagagcagcagcgccatcaacctgagctggagcccccccgacagccccaacgcccactggctgacctacagcctgctgagagacggcttcgagatctacaccaccgaggaccagtacccctacagcatccagtacttcctggacaccgacctgctgccctacaccaagtacagctactacatcgagaccaccaacgtgcacggcagcaccagaagcgtggccgtgacctacaagaccaagcccggcgtgcccgagggcaacctgaccctgagctacatcatccccatcggcagcgacagcgtgaccctgacctggaccaccctgagcaaccagagcggccccatcgagaagtacatcctgagctgcgcccccctggccggcggccagccctgcgtgagctacgagggccacgagaccagcgccaccatctggaacctggtgcccttcgccaagtacgacttcagcgtgcaggcctgcaccagcggcggctgcctgcacagcctgcccatcaccgtgaccaccgcccaggcccccccccagagactgagcccccccaagatgcagaagatcagcagcaccgagctgcacgtggagtggagcccccccgccgagctgaacggcatcatcatcagatacgagctgtacatgagaagactgagaagcaccaaggagaccaccagcgaggagagcagagtgttccagagcagcggctggctgagcccccacagcttcgtggagagcgccaacgagaacgccctgaagcccccccagaccatgaccaccatcaccggcctggagccctacaccaagtacgagttcagagtgctggccgtgaacatggccggcagcgtgagcagcgcctgggtgagcgagagaaccggcgagagcgcccccgtgttcatgatcccccccagcgtgttccccctgagcagctacagcctgaacatcagctgggagaagcccgccgacaacgtgaccagaggcaaggtggtgggctacgacatcaacatgctgagcgagcagagcccccagcagagcatccccatggccttcagccagctgctgcacaccgccaagagccaggagctgagctacaccgtggagggcctgaagccctacagaatctacgagttcaccatcaccctgtgcaacagcgtgggctgcgtgaccagcgccagcggcgccggccagaccctggccgccgcccccgcccagctgagaccccccctggtgaagggcatcaacagcaccaccatccacctgagatggttcccccccgaggagctgaacggccccagccccatctaccagctggagagaagagagagcagcctgcccgccctgatgaccaccatgatgaagggcatcagattcatcggcaacggctactgcaagttccccagcagcacccaccccgtgaacaccgacttcaccggcatcaaggccagcttcagaaccaaggtgcccgagggcctgatcgtgttcgccgccagccccggcaaccaggaggagtacttcgccctgcagctgaagaagggcagactgtacttcctgttcgacccccagggcagccccgtggaggtgaccaccaccaacgaccacggcaagcagtacagcgacggcaagtggcacgagatcatcgccatcagacaccaggccttcggccagatcaccctggacggcatctacaccggcagcagcgccatcctgaacggcagcaccgtgatcggcgacaacaccggcgtgttcctgggcggcctgcccagaagctacaccatcctgagaaaggaccccgagatcatccagaagggcttcgtgggctgcctgaaggacgtgcacttcatgaagaactacaaccccagcgccatctgggagcccctggactggcagagcagcgaggagcagatcaacgtgtacaacagctgggagggctgccccgccagcctgaacgagggcgcccagttcctgggcgccggcttcctggagctgcacccctacatgttccacggcggcatgaacttcgagatcagcttcaagttcagaaccgaccagctgaacggcctgctgctgttcgtgtacaacaaggacggccccgacttcctggccatggagctgaagagcggcatcctgaccttcagactgaacaccagcctggccttcacccaggtggacctgctgctgggcctgagctactgcaacggcaagtggaacaaggtgatcatcaagaaggagggcagcttcatcagcgccagcgtgaacggcctgatgaagcacgccagcgagagcggcgaccagcccctggtggtgaacagccccgtgtacgtgggcggcatcccccaggagctgctgaacagctaccagcacctgtgcctggagcagggcttcggcggctgcatgaaggacgtgaagttcaccagaggcgccgtggtgaacctggccagcgtgagcagcggcgccgtgagagtgaacctggacggctgcctgagcaccgacagcgccgtgaactgcagaggcaacgacagcatcctggtgtaccagggcaaggagcagagcgtgtacgagggcggcctgcagcccttcaccgagtacctgtacagagtgatcgccagccacgagggcggcagcgtgtacagcgactggagcagaggcagaaccaccggcgccgccccccagagcgtgcccacccccagcagagtgagaagcctgaacggctacagcatcgaggtgacctgggacgagcccgtggtgagaggcgtgatcgagaagtacatcctgaaggcctacagcgaggacagcaccagaccccccagaatgcccagcgccagcgccgagttcgtgaacaccagcaacctgaccggcatcctgaccggcctgctgcccttcaagaactacgccgtgaccctgaccgcctgcaccctggccggctgcaccgagagcagccacgccctgaacatcagcaccccccaggaggccccccaggaggtgcagccccccgtggccaagagcctgcccagcagcctgctgctgagctggaacccccccaagaaggccaacggcatcatcacccagtactgcctgtacatggacggcagactgatctacagcggcagcgaggagaactacatcgtgaccgacctggccgtgttcaccccccaccagttcctgctgagcgcctgcacccacgtgggctgcaccaacagcagctgggtgctgctgtacaccgcccagctgccccccgagcacgtggacagccccgtgctgaccgtgctggacagcagaaccatccacatccagtggaagcagcccagaaagatcagcggcatcctggagagatacgtgctgtacatgagcaaccacacccacgacttcaccatctggagcgtgatctacaacagcaccgagctgttccaggaccacatgctgcagtacgtgctgcccggcaacaagtacctgatcaagctgggcgcctgcaccggcggcggctgcaccgtgagcgaggccagcgaggccctgaccgacgaggacatccccgagggcgtgcccgcccccaaggcccacagctacagccccgacagcttcaacgtgagctggaccgagcccgagtaccccaacggcgtgatcaccagctacggcctgtacctggacggcatcctgatccacaacagcagcgagctgagctacagagcctacggcttcgccccctggagcctgcacagcttcagagtgcaggcctgcaccgccaagggctgcgccctgggccccctggtggagaacagaaccctggaggccccccccgagggcaccgtgaacgtgttcgtgaagacccagggcagcagaaaggcccacgtgagatgggaggcccccttcagacccaacggcctgctgacccacagcgtgctgttcaccggcatcttctacgtggaccccgtgggcaacaactacaccctgctgaacgtgaccaaggtgatgtacagcggcgaggagaccaacctgtgggtgctgatcgacggcctggtgcccttcaccaactacaccgtgcaggtgaacatcagcaacagccagggcagcctgatcaccgaccccatcaccatcgccatgccccccggcgcccccgacggcgtgctgccccccagactgagcagcgccacccccaccagcctgcaggtggtgtggagcacccccgccagaaacaacgcccccggcagccccagataccagctgcagatgagaagcggcgacagcacccacggcttcctggagctgttcagcaaccccagcgccagcctgagctacgaggtgagcgacctgcagccctacaccgagtacatgttcagactggtggccagcaacggcttcggcagcgcccacagcagctggatccccttcatgaccgccgaggacaagcccggccccgtggtgccccccatcctgctggacgtgaagagcagaatgatgctggtgacctggcagcaccccagaaagagcaacggcgtgatcacccactacaacatctacctgcacggcagactgtacctgagaacccccggcaacgtgaccaactgcaccgtgatgcacctgcacccctacaccgcctacaagttccaggtggaggcctgcaccagcaagggctgcagcctgagccccgagagccagaccgtgtggaccctgcccggcgcccccgagggcatccccagccccgagctgttcagcgacacccccaccagcgtgatcatcagctggcagccccccacccaccccaacggcctggtggagaacttcaccatcgagagaagagtgaagggcaaggaggaggtgaccaccctggtgaccctgcccagaagccacagcatgagattcatcgacaagaccagcgccctgagcccctggaccaagtacgagtacagagtgctgatgagcaccctgcacggcggcaccaacagcagcgcctgggtggaggtgaccaccagacccagcagacccgccggcgtgcagccccccgtggtgaccgtgctggagcccgacgccgtgcaggtgacctggaagccccccctgatccagaacggcgacatcctgagctacgagatccacatgcccgacccccacatcaccctgaccaacgtgaccagcgccgtgctgagccagaaggtgacccacctgatccccttcaccaactacagcgtgaccatcgtggcctgcagcggcggcaacggctacctgggcggctgcaccgagagcctgcccacctacgtgaccacccaccccaccgtgccccagaacgtgggccccctgagcgtgatccccctgagcgagagctacgtggtgatcagctggcagccccccagcaagcccaacggccccaacctgagatacgagctgctgagaagaaagatccagcagcccctggccagcaacccccccgaggacctgaacagatggcacaacatctacagcggcacccagtggctgtacgaggacaagggcctgagcagattcaccacctacgagtacatgctgttcgtgcacaacagcgtgggcttcacccccagcagagaggtgaccgtgaccaccctggccggcctgcccgagagaggcgccaacctgaccgccagcgtgctgaaccacaccgccatcgacgtgagatgggccaagcccaccgtgcaggacctgcagggcgaggtggagtactacaccctgttctggagcagcgccaccagcaacgacagcctgaagatcctgcccgacgtgaacagccacgtgatcggccacctgaagcccaacaccgagtactggatcttcatcagcgtgttcaacggcgtgcacagcatcaacagcgccggcctgcacgccaccacctgcgacggcgagccccagggcatgctgccccccgaggtggtgatcatcaacagcaccgccgtgagagtgatctggaccagccccagcaaccccaacggcgtggtgaccgagtacagcatctacgtgaacaacaagctgtacaagaccggcatgaacgtgcccggcagcttcatcctgagagacctgagccccttcaccatctacgacatccaggtggaggtgtgcaccatctacgcctgcgtgaagagcaacggcacccagatcaccaccgtggaggacacccccagcgacatccccacccccaccatcagaggcatcaccagcagaagcctgcagatcgactgggtgagccccagaaagcccaacggcatcatcctgggctacgacctgctgtggaagacctggtacccctgcgccaagacccagaagctggtgcaggaccagagcgacgagctgtgcaaggccgtgagatgccagaagcccgagagcatctgcggccacatctgctacagcagcgaggccaaggtgtgctgcaacggcgtgctgtacaaccccaagcccggccacagatgctgcgaggagaagtacatccccttcgtgctgaacagcaccggcgtgtgctgcggcggcagaatccaggaggcccagcccaaccaccagtgctgcagcggctactacgccagaatcctgcccggcgaggtgtgctgccccgacgagcagcacaacagagtgagcgtgggcatcggcgacagctgctgcggcagaatgccctacagcaccagcggcaaccagatctgctgcgccggcagactgcacgacggccacggccagaagtgctgcggcagacagatcgtgagcaacgacctggagtgctgcggcggcgaggagggcgtggtgtacaacagactgcccggcatgttctgctgcggccaggactacgtgaacatgagcgacaccatctgctgcagcgccagcagcggcgagagcaaggcccacatcaagaagaacgaccccgtgcccgtgaagtgctgcgagaccgagctgatccccaagagccagaagtgctgcaacggcgtgggctacaaccccctgaagtacgtgtgcagcgacaagatcagcaccggcatgatgatgaaggagaccaaggagtgcagaatcctgtgccccgccagcatggaggccaccgagcactgcggcagatgcgacttcaacttcaccagccacatctgcaccgtgatcagaggcagccacaacagcaccggcaaggccagcatcgaggagatgtgcagcagcgccgaggagaccatccacaccggcagcgtgaacacctacagctacaccgacgtgaacctgaagccctacatgacctacgagtacagaatcagcgcctggaacagctacggcagaggcctgagcaaggccgtgagagccagaaccaaggaggacgtgccccagggcgtgagcccccccacctggaccaagatcgacaacctggaggacaccatcgtgctgaactggagaaagcccatccagagcaacggccccatcatctactacatcctgctgagaaacggcatcgagagattcagaggcaccagcctgagcttcagcgacaaggagggcatccagcccttccaggagtacagctaccagctgaaggcctgcaccgtggccggctgcgccaccagcagcaaggtggtggccgccaccacccagggcgtgcccgagagcatcctgccccccagcatcaccgccctgagcgccgtggccctgcacctgagctggagcgtgcccgagaagagcaacggcgtgatcaaggagtaccagatcagacaggtgggcaagggcctgatccacaccgacaccaccgacagaagacagcacaccgtgaccggcctgcagccctacaccaactacagcttcaccctgaccgcctgcaccagcgccggctgcaccagcagcgagcccttcctgggccagaccctgcaggccgcccccgagggcgtgtgggtgacccccagacacatcatcatcaacagcaccaccgtggagctgtactggagcctgcccgagaagcccaacggcctggtgagccagtaccagctgagcagaaacggcaacctgctgttcctgggcggcagcgaggagcagaacttcaccgacaagaacctggagcccaacagcagatacacctacaagctggaggtgaagaccggcggcggcagcagcgccagcgacgactacatcgtgcagacccccatgagcacccccgaggagatctaccccccctacaacatcaccgtgatcggcccctacagcatcttcgtggcctggatcccccccggcatcctgatccccgagatccccgtggagtacaacgtgctgctgaacgacggcagcgtgacccccctggccttcagcgtgggccaccaccagagcaccctgctggagaacctgacccccttcacccagtacgagatcagaatccaggcctgccagaacggcagctgcggcgtgagcagcagaatgttcgtgaagacccccgaggccgcccccatggacctgaacagccccgtgctgaaggccctgggcagcgcctgcatcgagatcaagtggatgccccccgagaagcccaacggcatcatcatcaactacttcatctacagaagacccgccggcatcgaggaggagagcgtgctgttcgtgtggagcgagggcgccctggagttcatggacgagggcgacaccctgagacccttcaccctgtacgagtacagagtgagagcctgcaacagcaagggcagcgtggagagcctgtggagcctgacccagaccctggaggcccccccccaggacttccccgccccctgggcccaggccaccagcgcccacagcgtgctgctgaactggaccaagcccgagagccccaacggcatcatcagccactacagagtggtgtaccaggagagacccgacgaccccaccttcaacagccccaccgtgcacgccttcaccgtgaagggcaccagccaccaggcccacctgtacggcctggagcccttcaccacctacagaatcggcgtggtggccgccaaccacgccggcgagatcctgagcccctggaccctgatccagaccctggagagcagccccagcggcctgagaaacttcatcgtggagcagaaggagaacggcagagccctgctgctgcagtggagcgagcccatgagaaccaacggcgtgatcaagacctacaacatcttcagcgacggcttcctggagtacagcggcctgaacagacagttcctgttcagaagactggaccccttcaccctgtacaccctgaccctggaggcctgcaccagagccggctgcgcccacagcgccccccagcccctgtggaccgacgaggccccccccgacagccagctggcccccaccgtgcacagcgtgaagagcaccagcgtggagctgagctggagcgagcccgtgaaccccaacggcaagatcatcagatacgaggtgatcagaagatgcttcgagggcaaggcctggggcaaccagaccatccaggccgacgagaagatcgtgttcaccgagtacaacaccgagagaaacaccttcatgtacaacgacaccggcctgcagccctggacccagtgcgagtacaagatctacacctggaacagcgccggccacacctgcagcagctggaacgtggtgagaaccctgcaggccccccccgagggcctgagcccccccgtgatcagctacgtgagcatgaacccccagaagctgctgatcagctggatcccccccgagcagagcaacggcatcatccagagctacagactgcagagaaacgagatgctgtaccccttcagcttcgaccccgtgaccttcaactacaccgacgaggagctgctgcccttcagcacctacagctacgccctgcaggcctgcaccagcggcggctgcagcaccagcaagcccaccagcatcaccaccctggaggccgcccccagcgaggtgagcccccccgacctgtgggccgtgagcgccacccagatgaacgtgtgctggagcccccccaccgtgcagaacggcaagatcaccaagtacctggtgagatacgacaacaaggagagcctggccggccagggcctgtgcctgctggtgagccacctgcagccctacagccagtacaacttcagcctggtggcctgcaccaacggcggctgcaccgccagcgtgagcaagagcgcctggaccatggaggccctgcccgagaacatggacagccccaccctgcaggtgaccggcagcgagagcatcgagatcacctggaagccccccagaaaccccaacggccagatcagaagctacgagctgagaagagacggcaccatcgtgtacaccggcctggagaccagatacagagacttcaccctgacccccggcgtggagtacagctacaccgtgaccgccagcaacagccagggcggcatcctgagccccctggtgaaggacagaaccagccccagcgcccccagcggcatggagccccccaagctgcaggccagaggcccccaggagatcctggtgaactgggacccccccgtgagaaccaacggcgacatcatcaactacaccctgttcatcagagagctgttcgagagagagaccaagatcatccacatcaacaccacccacaacagcttcggcatgcagagctacatcgtgaaccagctgaagcccttccacagatacgagatcagaatccaggcctgcaccaccctgggctgcgccagcagcgactggaccttcatccagacccccgagatcgcccccctgatgcagccccccccccacctggaggtgcagatggcccccggcggcttccagcccaccgtgagcctgctgtggaccggccccctgcagcccaacggcaaggtgctgtactacgagctgtacagaagacagatcgccacccagcccagaaagagcaaccccgtgctgatctacaacggcagcagcaccagcttcatcgacagcgagctgctgcccttcaccgagtacgagtaccaggtgtgggccgtgaacagcgccggcaaggcccccagcagctggacctggtgcagaaccggccccgccccccccgagggcctgagagcccccaccttccacgtgatcagcagcacccaggccgtggtgaacatcagcgcccccggcaagcccaacggcatcgtgagcctgtacagactgttcagcagcagcgcccacggcgccgagaccgtgctgagcgagggcatggccacccagcagaccctgcacggcctgcaggccttcaccaactacagcatcggcgtggaggcctgcacctgcttcaactgctgcagcaagggccccaccgccgagctgagaacccaccccgccccccccagcggcctgagcagcccccagatcggcaccctggccagcagaaccgccagcttcagatggagcccccccatgttccccaacggcgtgatccacagctacgagctgcagttccacgtggcctgcccccccgacagcgccctgccctgcacccccagccagatcgagaccaagtacaccggcctgggccagaaggccagcctgggcggcctgcagccctacaccacctacaagctgagagtggtggcccacaacgaggtgggcagcaccgccagcgagtggatcagcttcaccacccagaaggagctgccccagtacagagcccccttcagcgtggacagcaacctgagcgtggtgtgcgtgaactggagcgacaccttcctgctgaacggccagctgaaggagtacgtgctgaccgacggcggcagaagagtgtacagcggcctggacaccaccctgtacatccccagaaccgccgacaagaccttcttcttccaggtgatctgcaccaccgacgagggcagcgtgaagacccccctgatccagtacgacaccagcaccggcctgggcctggtgctgaccacccccggcaagaagaagggcagcagaagcaagagcaccgagttctacagcgagctgtggttcatcgtgctgatggccatgctgggcctgatcctgctggccatcttcctgagcctgatcctgcagagaaagatccacaaggagccctacatcagagagagaccccccctggtgcccctgcagaagagaatgagccccctgaacgtgtacccccccggcgagaaccacatgttcgacagcgtggccgacatcagcgacgtgagcagcaacgtgaccctgaagagctacaccatgcacttcgagggcctggccgacaccaagatccccagaagcggcacccccgtgagcatcagaagcaacagaagcgcctgcgtgctgagaatccccagccagaaccagaccagcctgacctacagccagggcagcctgcacagaagcgtgagccagctgatggacatccaggacaagaaggtgctgatggacaacagcctgtgggaggccatcatgggccacaacagcggcctgtacgtggacgaggaggacctgatgaacgccatcaaggacttcagcagcgtgaccaaggagagaaccaccttcaccgacacccacctgtag

SEQ ID NO: 104824 - DNA, 2538 bp, synthetic construct
  misc_feature 1..2538: note = Description of Artificial Sequence: Synthetic coding sequence
  source 1..2538: mol_type = other DNA
atgagaaccgaggccgtggtgaacagccagggccagaccgactacctgaccaaggacagcgaccaggacgtggccctgaagctggcccaggagagagccgagatcgtggccaagtacgacagaggcagagagggcgccgagatcgagccctgggaggacgccgactacctggtgtacaaggtgaccgacagattcggcttcctgcacgaggaggagctgcccgaccacaacgtggccgtggagagacagaagcacctggagatcgagagaaccaccaagtggctgaagatgctgaagggctgggagaagtacaagaacaccgagaagttccacagaagaatctacaagggcatccccctgcagctgagaggcgaggtgtgggccctgctgctggagatccccaagatgaaggaggagaccagagacctgtacagcaagctgaagcacagagccagaggctgcagccccgacatcagacagatcgacctggacgtgaacagaaccttcagagaccacatcatgttcagagacagatacggcgtgaagcagcagagcctgttccacgtgctggccgcctacagcatctacaacaccgaggtgggctactgccagggcatgagccagatcaccgccctgctgctgatgtacatgaacgaggaggacgccttctgggccctggtgaagctgttcagcggccccaagcacgccatgcacggcttcttcgtgcagggcttccccaagctgctgagattccaggagcaccacgagaagatcctgaacaagttcctgagcaagctgaagcagcacctggacagccaggagatctacaccagcttctacaccatgaagtggttcttccagtgcttcctggacagaacccccttcaccctgaacctgagaatctgggacatctacatcttcgagggcgagagagtgctgaccgccatgagctacaccatcctgaagctgcacaagaagcacctgatgaagctgagcatggaggagctggtggagttcttccaggagaccctggccaaggacttcttcttcgaggacgacttcgtgatcgagcagctgcagatcagcatgaccgagctgaagagagccaagctggacctgcccgagcccggcaaggaggacgagtaccccaagaagcccctgggccagctgccccccgagctgcagagctggggcgtgcaccacctgagcaacggccagagaagcgtgggcagacccagccccctggccagcggcagaagagagagcggcgccccccacagaagacacgagcacagcccccacccccagagcagaaccggcacccccgagagagcccagccccccagaagaaagagcgtggaggaggagagcaagaagctgaaggacgaggccgacttccagagaaagctgcccagcggcccccaggacagcagcagacagtacaaccacgccgccgccaaccagaacagcaacgccaccagcaacatcagaaaggagttcgtgcccaagtggaacaagcccagcgacgtgagcgccaccgagagaaccgccaagtacaccatggagggcaagggcagagccgcccaccccgccctggccgtgaccgtgcccggccccgccgaggtgagagtgagcaacgtgagacccaagatgaaggccctggacgccgaggacggcaagagaggcagcaccgccagccagtacgacaacgtgcccggccccgagctggacagcggcgccagcgtggaggaggccctggagagagcctacagccagagccccagacacgccctgtacccccccagccccagaaagcacgccgagcccagcagcagccccagcaaggtgagcaacaagttcaccttcaaggtgcagccccccagccacgccagataccccagccagctggacggcgaggccagaggcctggcccacccccccagctacagcaacccccccgtgtaccacggcaacagccccaagcacttccccaccgccaacagcagcttcgccagcccccagttcagccccggcacccagctgaaccccagcagaagaccccacggcagcaccctgagcgtgagcgccagccccgagaagagctacagcagacccagccccctggtgctgcccagcagcagaatcgaggtgctgcccgtggacaccggcgccggcggctacagcggcaacagcggcagccccaagaacggcaagctgatcatcccccccgtggactacctgcccgacaacagaacctggagcgaggtgagctacacctacagacccgagacccagggccagagctggaccagagacgccagcagaggcaacctgcccaagtacagcgccttccagctggcccccttccaggaccacggcctgcccgccgtgagcgtggacagccccgtgagatacaaggccagccccgccgccgaggacgccagccccagcggctacccctacagcggcccccccccccccgcctaccactacagaaacagagacggcctgagcatccaggagagcgtgctgctgtag

SEQ ID NO: 104825 - DNA, 2487 bp, synthetic construct
  misc_feature 1..2487: note = Description of Artificial Sequence: Synthetic coding sequence
  source 1..2487: mol_type = other DNA
atgaacagcgaccaggacgtggccctgaagctggcccaggagagagccgagatcgtggccaagtacgacagaggcagagagggcgccgagatcgagccctgggaggacgccgactacctggtgtacaaggtgaccgacagattcggcttcctgcacgaggaggagctgcccgaccacaacgtggccgtggagagacagaagcacctggagatcgagagaaccaccaagtggctgaagatgctgaagggctgggagaagtacaagaacaccgagaagttccacagaagaatctacaagggcatccccctgcagctgagaggcgaggtgtgggccctgctgctggagatccccaagatgaaggaggagaccagagacctgtacagcaagctgaagcacagagccagaggctgcagccccgacatcagacagatcgacctggacgtgaacagaaccttcagagaccacatcatgttcagagacagatacggcgtgaagcagcagagcctgttccacgtgctggccgcctacagcatctacaacaccgaggtgggctactgccagggcatgagccagatcaccgccctgctgctgatgtacatgaacgaggaggacgccttctgggccctggtgaagctgttcagcggccccaagcacgccatgcacggcttcttcgtgcagggcttccccaagctgctgagattccaggagcaccacgagaagatcctgaacaagttcctgagcaagctgaagcagcacctggacagccaggagatctacaccagcttctacaccatgaagtggttcttccagtgcttcctggacagaacccccttcaccctgaacctgagaatctgggacatctacatcttcgagggcgagagagtgctgaccgccatgagctacaccatcctgaagctgcacaagaagcacctgatgaagctgagcatggaggagctggtggagttcttccaggagaccctggccaaggacttcttcttcgaggacgacttcgtgatcgagcagctgcagatcagcatgaccgagctgaagagagccaagctggacctgcccgagcccggcaaggaggacgagtaccccaagaagcccctgggccagctgccccccgagctgcagagctggggcgtgcaccacctgagcaacggccagagaagcgtgggcagacccagccccctggccagcggcagaagagagagcggcgccccccacagaagacacgagcacagcccccacccccagagcagaaccggcacccccgagagagcccagccccccagaagaaagagcgtggaggaggagagcaagaagctgaaggacgaggccgacttccagagaaagctgcccagcggcccccaggacagcagcagacagtacaaccacgccgccgccaaccagaacagcaacgccaccagcaacatcagaaaggagttcgtgcccaagtggaacaagcccagcgacgtgagcgccaccgagagaaccgccaagtacaccatggagggcaagggcagagccgcccaccccgccctggccgtgaccgtgcccggccccgccgaggtgagagtgagcaacgtgagacccaagatgaaggccctggacgccgaggacggcaagagaggcagcaccgccagccagtacgacaacgtgcccggccccgagctggacagcggcgccagcgtggaggaggccctggagagagcctacagccagagccccagacacgccctgtacccccccagccccagaaagcacgccgagcccagcagcagccccagcaaggtgagcaacaagttcaccttcaaggtgcagccccccagccacgccagataccccagccagctggacggcgaggccagaggcctggcccacccccccagctacagcaacccccccgtgtaccacggcaacagccccaagcacttccccaccgccaacagcagcttcgccagcccccagttcagccccggcacccagctgaaccccagcagaagaccccacggcagcaccctgagcgtgagcgccagccccgagaagagctacagcagacccagccccctggtgctgcccagcagcagaatcgaggtgctgcccgtggacaccggcgccggcggctacagcggcaacagcggcagccccaagaacggcaagctgatcatcccccccgtggactacctgcccgacaacagaacctggagcgaggtgagctacacctacagacccgagacccagggccagagctggaccagagacgccagcagaggcaacctgcccaagtacagcgccttccagctggcccccttccaggaccacggcctgcccgccgtgagcgtggacagccccgtgagatacaaggccagccccgccgccgaggacgccagccccagcggctacccctacagcggcccccccccccccgcctaccactacagaaacagagacggcctgagcatccaggagagcgtgctgctgtag

SEQ ID NO: 104826 - DNA, 2487 bp, synthetic construct; identical to SEQ ID NO: 104825
  misc_feature 1..2487: note = Description of Artificial Sequence: Synthetic coding sequence
  source 1..2487: mol_type = other DNA

SEQ ID NO: 104827 - DNA, 762 bp, synthetic construct
  misc_feature 1..762: note = Description of Artificial Sequence: Synthetic coding sequence
  source 1..762: mol_type = other DNA
atggccgccgccttcagaaaggccgccaagagcagacagagagagcacagagagagaagccagcccggcttcagaaagcacctgggcctgctggagaagaagaaggactacaagctgagagccgacgactacagaaagaagcaggagtacctgaaggccctgagaaagaaggccctggagaagaaccccgacgagttctactacaagatgaccagagtgaagctgcaggacggcgtgcacatcatcaaggagaccaaggaggaggtgacccccgagcagctgaagctgatgagaacccaggacgtgaagtacatcgagatgaagagagtggccgaggccaagaagatcgagagactgaagagcgagctgcacctgctggacttccagggcaagcagcagaacaagcacgtgttcttcttcgacaccaagaaggaggtggagcagttcgacgtggccacccacctgcagaccgcccccgagctggtggacagagtgttcaacagacccagaatcgagaccctgcagaaggagaaggtgaagggcgtgaccaaccagaccggcctgaagagaatcgccaaggagagacagaagcagtacaactgcctgacccagagaatcgagagagagaagaagctgttcgtgatcgcccagaagatccagaccagaaaggacctgatggacaagacccagaaggtgaaggtgaagaaggagaccgtgaacagccccgccatctacaagttccagagcagaagaaagagatag

SEQ ID NO: 104828 - DNA, 447 bp, synthetic construct
  misc_feature 1..447: note = Description of Artificial Sequence: Synthetic coding sequence
  source 1..447: mol_type = other DNA
atggccgccgccttcagaaaggccgccaagagcagacagagagagcacagagagagaagccagcccggcttcagaaagcacctgggcctgctggagaagaagaaggactacaagctgagagccgacgactacagaaagaagcaggagtacctgaaggccctgagaaagaaggccctggagaagaaccccgacgagttctactacaagatgaccagagtgaagctgcaggacggcgtgcacatcatcaaggagaccaaggaggaggtgacccccgagcagctgaagctgatgagaacccaggacgtgaagtacatcgagatgaagagagtggccgaggccaagaagatcgagagactgaagagcgagctgcacctgctggacttccagggcaagcagcagaacaagcacgtgttcttcttcgacaccaagaaggaggccaacagctag

SEQ ID NO: 104829 - DNA, 2124 bp, synthetic construct
  misc_feature 1..2124: note = Description of Artificial Sequence: Synthetic coding sequence
  source 1..2124: mol_type = other DNA
atgcccgaggaggccggcttcccccccgccaagagattcagacccggcagcggcccccccagcagagccggcagcttcccccccggcagacaggtggtgatgctgctgaccgccggcagcggcggcagaggcggcggcggcggcagaagacagcagccccccctggcccagcccagcgccagcccctaccccgaggccgtggagctgcagagaagaagcctgcccatcttccaggccagaggccagctgctggcccagctgagaaacctggacaacgccgtgctgatcggcgagaccggcagcggcaagaccacccagatcccccagtacctgtacgagggcggcatcagcagacagggcatcatcgccgtgacccagcccagaagagtggccgccatcagcctggccaccagagtgagcgacgagaagagaaccgagctgggcaagctggtgggctacaccgtgagattcgacgacgtgaccagcgaggacaccagaatcaagttcctgaccgacggcatgctgctgagagaggccatcagcgacagcctgctgagaaagtacagctgcgtgatcctggacgaggcccacgagagaaccatccacaccgacgtgctgttcggcgtggtgaaggccgcccagaagagaagaaaggagctgggcaagctgcccctgaaggtgatcgtgatgagcgccaccatggacgtggacctgttcagccagtacttcaacggcgcccccgtgctgtacctggagggcagacagcaccccatccaggtgttctacaccaagcagccccagaacgactacctgcacgccgccctggtgagcgtgttccagatccaccaggaggcccccagcagccaggacatcctggtgttcctgaccggccaggaggagatcgaggccatgagcaagacctgcagagacatcgccaagcacctgcccgacggctgccccgccatgctggtgctgcccctgtacgccagcctgccctacgcccagcagctgagagtgttccagggcgcccccaagggctacagaaaggtgatcatcagcaccaacatcgccgagaccagcatcaccatcaccggcatcaagtacgtggtggacaccggcatggtgaaggccaagaagtacaaccccgacagcggcctggaggtgctggccgtgcagagagtgagcaagacccaggcctggcagagaaccggcagagccggcagagaggacagcggcatctgctacagactgtacaccgaggacgagttcgagaagttcgacaagatgaccgtgcccgagatccagagatgcaacctggccagcgtgatgctgcagctgctggccatgaaggtgcccaacgtgctgaccttcgacttcatgagcaagcccagccccgaccacatccaggccgccatcgcccagctggacctgctgggcgccctggagcacaaggacgaccagctgaccctgacccccatgggcagaaagatggccgccttccccctggagcccaagttcgccaagaccatcctgatgagccccaagttccactgcaccgaggagatcctgaccatcgtgagcctgctgagcgtggacagcgtgctgcacaacccccccagcagaagagaggaggtgcagggcgtgagaaagaagttcatcagcagcgagggcgaccacatgaccctgctgaacatctacagaaccttcaagaacctgggcggcaacaaggactggtgcaaggagaacttcgtgaacagcaagaacatgaccctggtggccgaggtgagagcccagctgagagacatctgcctgaagatgagcatgcccatcgccagcagcagaggcgacgtggagagcgtgagaagatgcctggcccacagcctgttcatgagcaccgccgagctgcagcccgacggcacctacgccaccaccgacacccaccagcccgtggccatccaccccagcagcgtgctgttccactgcaagcccgcctgcgtggtgtacaccgagctgctgtacaccaacaagtgctacatgagagacctgtgcgtgatcgacgcccagtggctgtacgaggccgcccccgagtacttcagaagaaagctgagaaccgccagaaactag

SEQ ID NO: 104830 - DNA, 1566 bp, synthetic construct
  misc_feature 1..1566: note = Description of Artificial Sequence: Synthetic coding sequence
  source 1..1566: mol_type = other DNA
atgagacccgactggaaggccggcgccggccccggcggccccccccagaagcccgcccccagcagccagagaaagccccccgccagacccagcgccgccgccgccgccatcgccgtggccgccgccgaggaggagagaagactgagacagagaaacagactgagactggaggaggacaagcccgccgtggagagatgcctggaggagctggtgttcggcgacgtggagaacgacgaggacgccctgctgagaagactgagaggccccagagtgcaggagcacgaggacagcggcgacagcgaggtggagaacgaggccaagggcaacttccccccccagaagaagcccgtgtgggtggacgaggaggacgaggacgaggagatggtggacatgatgaacaacagattcagaaaggacatgatgaagaacgccagcgagagcaagctgagcaaggacaacctgaagaagagactgaaggaggagttccagcacgccatgggcggcgtgcccgcctgggccgagaccaccaagagaaagaccagcagcgacgacgagagcgaggaggacgaggacgacctgctgcagagaaccggcaacttcatcagcaccagcaccagcctgcccagaggcatcctgaagatgaagaactgccagcacgccaacgccgagagacccaccgtggccagaatcagcagcgtgcagttccaccccggcgcccagatcgtgatggtggccggcctggacaacgccgtgagcctgttccaggtggacggcaagaccaaccccaagatccagagcatctacctggagagattccccatcttcaaggcctgcttcagcgccaacggcgaggaggtgctggccaccagcacccacagcaaggtgctgtacgtgtacgacatgctggccggcaagctgatccccgtgcaccaggtgagaggcctgaaggagaagatcgtgagaagcttcgaggtgagccccgacggcagcttcctgctgatcaacggcatcgccggctacctgcacctgctggccatgaagaccaaggagctgatcggcagcatgaagatcaacggcagagtggccgccagcaccttcagcagcgacagcaagaaggtgtacgccagcagcggcgacggcgaggtgtacgtgtgggacgtgaacagcagaaagtgcctgaacagattcgtggacgagggcagcctgtacggcctgagcatcgccaccagcagaaacggccagtacgtggcctgcggcagcaactgcggcgtggtgaacatctacaaccaggacagctgcctgcaggagaccaaccccaagcccatcaaggccatcatgaacctggtgaccggcgtgaccagcctgaccttcaaccccaccaccgagatcctggccatcgccagcgagaagatgaaggaggccgtgagactggtgcacctgcccagctgcaccgtgttcagcaacttccccgtgatcaagaacaagaacatcagccacgtgcacaccatggacttcagccccagaagcggctacttcgccctgggcaacgagaaggccagaccctag

SEQ ID NO: 104831 - DNA, 8358 bp, synthetic construct
  misc_feature 1..8358: note = Description of Artificial Sequence: Synthetic coding sequence
  source 1..8358: mol_type = other DNA
atgaagaccaagcccgtgagccacaagaccgagaacacctacagattcctgaccttcgccgagagactgggcaacgtgaacatcgacatcatccacagaatcgacagaaccgccagctacgaggaggaggtggagacctacttcttcgagggcctgctgaagtggagagagctgaacctgaccgagcacttcggcaagttctacaaggaggtgatcgacaagtgccagagcttcaaccagctggtgtaccaccagaacgagatcgtgcagagcctgaagacccacctgcaggtgaagaacagcttcgcctaccagcccctgctggacctggtggtgcagctggccagagacctgcagatggacttctacccccacttccccgagttcttcctgaccatcaccagcatcctggagacccaggacaccgagctgctggagtgggccttcaccagcctgagctacctgtacaagtacctgtggagactgatggtgaaggacatgagcagcatctacagcatgtacagcaccctgctggcccacaagaagctgcacatcagaaacttcgccgccgagagcttcaccttcctgatgagaaaggtgagcgacaagaacgccctgttcaacctgatgttcctggacctggacaagcaccccgagaaggtggagggcgtgggccagctgctgttcgagatgtgcaagggcgtgagaaacatgttccacagctgcaccggccaggccgtgaagctgatcctgagaaagctgggccccgtgaccgagaccgagacccagctgccctggatgctgatcggcgagaccctgaagaacatggtgaagagcaccgtgagctacatcagcaaggagcacttcggcaccttcttcgagtgcctgcaggagagcctgctggacctgcacaccaaggtgaccaagaccaactgctgcgagagcagcgagcagatcaagagactgctggagacctacctgatcctggtgaagcacggcagcggcaccaagatccccacccccgccgacgtgtgcaaggtgctgagccagaccctgcaggtggccagcctgagcaccagctgctgggagaccctgctggacgtgatcagcgccctgatcctgggcgagaacgtgagcctgcccgagaccctgatcaaggagaccatcgagaagatcttcgagagcagattcgagaagagactgatcttcagcttcagcgaggtgatgttcgccatgaagcagttcgagcagctgttcctgcccagcttcctgagctacatcgtgaactgcttcctgatcgacgacgccgtggtgaaggacgaggccctggccatcctggccaagctgatcctgaacaaggccgccccccccaccgccggcagcatggccatcgagaagtaccccctggtgttcagcccccagatggtgggcttctacatcaagcagaagaagaccagaagcaagggcagaaacgagcagttccccgtgctggaccacctgctgagcatcatcaagctgccccccaacaaggacaccacctacctgagccagagctgggccgccctggtggtgctgccccacatcagacccctggagaaggagaaggtgatccccctggtgaccggcttcatcgaggccctgttcatgaccgtggacaagggcagcttcggcaagggcaacctgttcgtgctgtgccaggccgtgaacaccctgctgagcctggaggagagcagcgagctgctgcacctggtgcccgtggagagagtgaagaacctggtgctgaccttccccctggagcccagcgtgctgctgctgaccgacctgtactaccagagactggccctgtgcggctgcaagggccccctgagccaggaggccctgatggagctgttccccaagctgcaggccaacatcagcaccggcgtgagcaagatcagactgctgaccatcagaatcctgaaccacttcgacgtgcagctgcccgagagcatggaggacgacggcctgagcgagagacagagcgtgttcgccatcctgagacaggccgagctggtgcccgccaccgtgaacgactacagagagaagctgctgcacctgagaaagctgagacacgacgtggtgcagaccgccgtgcccgacggccccctgcaggaggtgcccctgagatacctgctgggcatgctgtacatcaacttcagcgccctgtgggaccccgtgatcgagctgatcagcagccacgcccacgagatggagaacaagcagttctggaaggtgtactacgagcacctggagaaggccgccacccacgccgagaaggagctgcagaacgacatgaccgacgagaagagcgtgggcgacgagagctgggagcagacccaggagggcgacgtgggcgccctgtaccacgagcagctggccctgaagaccgactgccaggagagactggaccacaccaacttcagattcctgctgtggagagccctgaccaagttccccgagagagtggagcccagaagcagagagctgagccccctgttcctgagattcatcaacaacgagtactaccccgccgacctgcaggtggcccccacccaggacctgagaagaaagggcaagggcatggtggccgaggagatcgaggaggagcccgccgccggcgacgacgaggagctggaggaggaggccgtgccccaggacgagagcagccagaagaagaagaccagaagagccgccgccaagcagctgatcgcccacctgcaggtgttcagcaagttcagcaaccccagagccctgtacctggagagcaagctgtacgagctgtacctgcagctgctgctgcaccaggaccagatggtgcagaagatcaccctggactgcatcatgacctacaagcacccccacgtgctgccctacagagagaacctgcagagactgctggaggacagaagcttcaaggaggagatcgtgcacttcagcatcagcgaggacaacgccgtggtgaagaccgcccacagagccgacctgttccccatcctgatgagaatcctgtacggcagaatgaagaacaagaccggcagcaagacccagggcaagagcgccagcggcaccagaatggccatcgtgctgagattcctggccggcacccagcccgaggagatccagatcttcctggacctgctgttcgagcccgtgagacacttcaagaacggcgagtgccacagcgccgtgatccaggccgtggaggacctggacctgagcaaggtgctgcccctgggcagacagcacggcatcctgaacagcctggagatcgtgctgaagaacatcagccacctgatcagcgcctacctgcccaagatcctgcagatcctgctgtgcatgaccgccaccgtgagccacatcctggaccagagagagaagatccagctgagattcatcaaccccctgaagaacctgagaagactgggcatcaagatggtgaccgacatcttcctggactgggagagctaccagttcagaaccgaggagatcgacgccgtgttccacggcgccgtgtggccccagatcagcagactgggcagcgagagccagtacagccccacccccctgctgaagctgatcagcatctggagcagaaacgccagatacttccccctgctggccaagcagaagcccggccaccccgagtgcgacatcctgaccaacgtgttcgccatcctgagcgccaagaacctgagcgacgccaccgccagcatcgtgatggacatcgtggacgacctgctgaacctgcccgacttcgagcccaccgagaccgtgctgaacctgctggtgaccggctgcgtgtaccccggcatcgccgagaacatcggcgagagcatcaccatcggcggcagactgatcctgccccacgtgcccgccatcctgcagtacctgagcaagaccaccatcagcgccgagaaggtgaagaagaagaagaacagagcccaggtgagcaaggagctgggcatcctgagcaagatcagcaagttcatgaaggacaaggagcagagcagcgtgctgatcaccctgctgctgcccttcctgcacagaggcaacatcgccgaggacaccgaggtggacatcctggtgaccgtgcagaacctgctgaagcactgcgtggaccccaccagcttcctgaagcccatcgccaagctgttcagcgtgatcaagaacaagctgagcagaaagctgctgtgcaccgtgttcgagaccctgagcgacttcgagagcggcctgaagtacatcaccgacgtggtgaagctgaacgccttcgaccagagacacctggacgacatcaacttcgacgtgagattcgagaccttccagaccatcaccagctacatcaaggagatgcagatcgtggacgtgaactacctgatccccgtgatgcacaactgcttctacaacctggagctgggcgacatgagcctgagcgacaacgccagcatgtgcctgatgagcatcatcaagaagctggccgccctgaacgtgaccgagaaggactacagagagatcatccacagaagcctgctggagaagctgagaaagggcctgaagagccagaccgagagcatccagcaggactacaccaccatcctgagctgcctgatccagaccttccccaaccagctggagttcaaggacctggtgcagctgacccactaccacgaccccgagatggacttcttcgagaacatgaagcacatccagatccacagaagagccagagccctgaagaagctggccaagcagctgatggagggcaaggtggtgctgagcagcaagagcctgcagaactacatcatgccctacgccatgacccccatcttcgacgagaagatgctgaagcacgagaacatcaccaccgccgccaccgagatcatcggcgccatctgcaagcacctgagctggagcgcctacatgtactacctgaagcacttcatccacgtgctgcagaccggccagatcaaccagaagctgggcgtgagcctgctggtgatcgtgctggaggccttccacttcgaccacaagaccctggaggagcagatgggcaagatcgagaacgaggagaacgccatcgaggccatcgagctgcccgagcccgaggccatggagctggagagagtggacgaggaggagaaggagtacacctgcaagagcctgagcgacaacggccagcccggcacccccgaccccgccgacagcggcggcaccagcgccaaggagagcgagtgcatcaccaagcccgtgagcttcctgccccagaacaaggaggagatcgagagaaccatcaagaacatccagggcaccatcaccggcgacatcctgcccagactgcacaagtgcctggccagcaccaccaagagagaggaggagcacaagctggtgaagagcaaggtggtgaacgacgaggaggtggtgagagtgcccctggccttcgccatggtgaagctgatgcagagcctgccccaggaggtgatggaggccaacctgcccagcatcctgctgaaggtgtgcgccctgctgaagaacagagcccaggagatcagagacatcgccagaagcaccctggccaagatcatcgaggacctgggcgtgcacttcctgctgtacgtgctgaaggagctgcagaccaccctggtgagaggctaccaggtgcacgtgctgaccttcaccgtgcacatgctgctgcagggcctgaccaacaagctgcaggtgggcgacctggacagctgcctggacatcatgatcgagatcttcaaccacgagctgttcggcgccgtggccgaggagaaggaggtgaagcagatcctgagcaaggtgatggaggccagaagaagcaagagctacgacagctacgagatcctgggcaagttcgtgggcaaggaccaggtgaccaagctgatcctgcccctgaaggagatcctgcagaacaccaccagcctgaagctggccagaaaggtgcacgagaccctgagaagaatcaccgtgggcctgatcgtgaaccaggagatgaccgccgagagcatcctgctgctgagctacggcctgatcagcgagaacctgcccctgctgaccgagaaggagaagaaccccgtggcccccgcccccgaccccagactgcccccccagagctgcctgctgctgccccccacccccgtgagaggcggccagaaggccgtggtgagcagaaagaccaacatgcacatcttcatcgagagcggcctgagactgctgcacctgagcctgaagaccagcaagatcaagagcagcggcgagtgcgtgctggagatgctggaccccttcgtgagcctgctgatcgactgcctgggcagcatggacgtgaaggtgatcaccggcgccctgcagtgcctgatctgggtgctgagattccccctgcccagcatcgagaccaaggccgagcagctgaccaagcacctgttcctgctgctgaaggactacgccaagctgggcgccgccagaggccagaacttccacctggtggtgaactgcttcaagtgcgtgaccatcctggtgaagaaggtgaagagctaccagatcaccgagaagcagctgcaggtgctgctggcctacgccgaggaggacatctacgacaccagcagacaggccaccgccttcggcctgctgaaggccatcctgagcagaaagctgctggtgcccgagatcgacgaggtgatgagaaaggtgagcaagctggccgtgagcgcccagagcgagcccgccagagtgcagtgcagacaggtgttcctgaagtacatcctggactaccccctgggcgacaagctgagacccaacctggagttcatgctggcccagctgaactacgagcacgagaccggcagagagagcaccctggagatgatcgcctacctgttcgacaccttcccccagggcctgctgcacgagaactgcggcatgttcttcatccccctgtgcctgatgaccatcaacgacgacagcgccacctgcaagaagatggccagcatgaccatcaagagcctgctgggcaagatcagcctggagaagaaggactggctgttcgacatggtgaccacctggttcggcgccaagaagagactgaacagacagctggccgccctgatctgcggcctgttcgtggagagcgagggcgtggacttcgagaagagactgggcaccgtgctgcccgtgatcgagaaggagatcgaccccgagaacttcaaggacatcatggaggagaccgaggagaaggccgccgacagactgctgttcagcttcctgaccctgatcaccaagctgatcaaggagtgcaacatcatccagttcaccaagcccgccgagaccctgagcaagatctggagccacgtgcacagccacctgagacacccccacaactgggtgtggctgaccgccgcccagatcttcggcctgctgttcgccagctgccagcccgaggagctgatccagaagtggaacaccaagaagaccaagaagcacctgcccgagcccgtggccatcaagttcctggccagcgacctggaccagaagatgaagagcatcagcctggccagctgccaccagctgcacagcaagttcctggaccagagcctgggcgagcaggtggtgaagaacctgctgttcgccgccaaggtgctgtacctgctggagctgtactgcgaggacaagcagagcaagatcaaggaggacctggaggagcaggaggccctggaggacggcgtggcctgcgccgacgagaaggccgagagcgacggcgaggagaaggaggaggtgaaggaggagctgggcagacccgccaccctgctgtggctgatccagaagctgagcagaatcgccaagctggaggccgcctacagccccagaaaccccctgaagagaacctgcatcttcaagttcctgggcgccgtggccatggacctgggcatcgacaaggtgaagccctacctgcccatgatcatcgcccccctgttcagagagctgaacagcacctacagcgagcaggaccccctgctgaagaacctgagccaggagatcatcgagctgctgaagaagctggtgggcctggagagcttcagcctggccttcgccagcgtgcagaagcaggccaacgagaagagagccctgagaaagaagagaaaggccctggagttcgtgaccaaccccgacatcgccgccaagaagaagatgaagaagcacaagaacaagagcgaggccaagaagagaaagatcgagttcctgagacccggctacaaggccaagagacagaagagccacagcctgaaggacctggccatggtggagtag

SEQ ID NO: 104832 - DNA, 1440 bp, synthetic construct
  misc_feature 1..1440: note = Description of Artificial Sequence: Synthetic coding sequence
  source 1..1440: mol_type = other DNA
atggtgggcagaagcagaagaagaggcgccgccaagtgggccgccgtgagagccaaggccggccccaccctgaccgacgagaacggcgacgacctgggcctgccccccagccccggcgacaccagctactaccaggaccaggtggacgacttccacgaggccagaagcagagccgccctggccaagggctggaacgaggtgcagagcggcgacgaggaggacggcgaggaggaggaggaggaggtgctggccctggacatggacgacgaggacgacgaggacggcggcaacgccggcgaggaggaggaggaggagaacgccgacgacgacggcggcagcagcgtgcagagcgaggccgaggccagcgtggaccccagcctgagctggggccagagaaagaagctgtactacgacaccgactacggcagcaagagcagaggcagacagagccagcaggaggccgaggaggaggagagagaggaggaggaggaggcccagatcatccagagaagactggcccaggccctgcaggaggacgacttcggcgtggcctgggtggaggccttcgccaagcccgtgccccaggtggacgaggccgagaccagagtggtgaaggacctggccaaggtgagcgtgaaggagaagctgaagatgctgagaaaggagagccccgagctgctggagctgatcgaggacctgaaggtgaagctgaccgaggtgaaggacgagctggagcccctgctggagctggtggagcagggcatcatcccccccggcaagggcagccagtacctgagaaccaagtacaacctgtacctgaactactgcagcaacatcagcttctacctgatcctgaaggccagaagagtgcccgcccacggccaccccgtgatcgagagactggtgacctacagaaacctgatcaacaagctgagcgtggtggaccagaagctgagcagcgagatcagacacctgctgaccctgaaggacgacgccgtgaagaaggagctgatccccaaggccaagagcaccaagcccaagcccaagagcgtgagcaagaccagcgccgccgcctgcgccgtgaccgacctgagcgacgacagcgacttcgacgagaaggccaagctgaagtactacaaggagatcgaggacagacagaagctgaagagaaagaaggaggagaacagcaccgaggagcaggccctggaggaccagaacgccaagagagccatcacctaccagatcgccaagaacagaggcctgacccccagaagaaagaagatcgacagaaaccccagagtgaagcacagagagaagttcagaagagccaagatcagaagaagaggccaggtgagagaggtgagaaaggaggagcagagatacagcggcgagctgagcggcatcagagccggcgtgaagaagagcatcaagctgaagtag

SEQ ID NO: 104833 - DNA, 756 bp, synthetic construct
  misc_feature 1..756: note = Description of Artificial Sequence: Synthetic coding sequence
  source 1..756: mol_type = other DNA
tgaatcggcctgatgagcctgagcaagggcctgctggaggagaagtacagatacctgttcaaggaggtggccggccccaccgagatgtgcgaccagagacagctgggcctgctgctgcacgacgccatccagatccccagacagctgggcgaggtggccgccttcggcggcagcaacatcgagcccagcgtgagaagctgcttccagcagaacaacaacaagcccgagatcagcgtgaaggagttcatcgactggatgcacctggagccccagagcatggtgtggctgcccgtgctgcacagagtggccgccgccgagaccgccaagcaccaggccaagtgcaacatctgcaaggagtgccccatcgtgggcttcagatacagaagcctgaagcacttcaactacgacgtgtgccagagctgcttcttcagcggcagaaccgccaagggccacaagctgcactaccccatggtggagtactgcatccccaccaccagcggcgaggacgtgagagacttcaccaaggtgctgaagaacaagttcagaagcaagaagtacttcgccaagcaccccagactgggctacctgcccgtgcagaccgtgctggagggcgacaacctggagacccccagccagagcccccagctgttccacgacgacacccacagcagaatcgagcagtacgccaccagactggcccagatggagagaaccaacggcagcttcctgaccgacagcagcagcaccaccggctag

SEQ ID NO: 104834 - DNA, 201 bp, synthetic construct
  misc_feature 1..201: note = Description of Artificial Sequence: Synthetic coding sequence
  source 1..201: mol_type = other DNA
atgatcggcctgaacttcaacctgagagagctgctgaccaagttcgagaaggacatccaggccgagatcgacgcccacaacgacatcttcaagagcatcgacggcaacagacagaagatggtgaaggccctgggcaacagcgaggaggccaccatgctgcagcacagactggacgacatgaaccagagatggaacgactag

SEQ ID NO: 104835 - DNA, 2967 bp, synthetic construct
  misc_feature 1..2967: note = Description of Artificial Sequence: Synthetic coding sequence
  source 1..2967: mol_type = other DNA
atgcagatcctgagatgcctgcagaagtgcggcaagctgaagatgatggccgtggtgagaaccagcctgcagaaggtggtggtgctgctgcacagactgcagagaatggccgtgagcagccccagataccagaagctgtgcaaggacatccaggccgagatcgacgcccacaacgacatcttcaagagcatcgacggcaacagacagaagatggtgaaggccctgggcaacagcgaggaggccaccatgctgcagcacagactggacgacatgaaccagagatggaacgacctgaaggccaagagcgccagcatcagagcccacctggaggccagcgccgagaagtggaacagactgctgatgagcctggaggagctgatcaagtggctgaacatgaaggacgaggagctgaagaagcagatgcccatcggcggcgacgtgcccgccctgcagctgcagtacgaccactgcaaggccctgagaagagagctgaaggagaaggagtacagcgtgctgaacgccgtggaccaggccagagtgttcctggccgaccagcccatcgaggcccccgaggagcccagaagaaacctgcagagcaagaccgagctgacccccgaggagagagcccagaagatcgccaaggccatgagaaagcagagcagcgaggtgaaggagaagtgggagagcctgaacgccgtgaccagcaactggcagaagcaggtggacaaggccctggagaagctgagagacctgcagggcgccatggacgacctggacgccgacatgaaggaggccgagagcgtgagaaacggctggaagcccgtgggcgacctgctgatcgacagcctgcaggaccacatcgagaagatcatggccttcagagaggagatcgcccccatcaacttcaaggtgaagaccgtgaacgacctgagcagccagctgagccccctggacctgcaccccagcctgaagatgagcagacagctggacgacctgaacatgagatggaagctgctgcaggtgagcgtggacgacagactgaagcagctgcaggaggcccacagagacttcggccccagcagccagcacttcctgagcaccagcgtgcagctgccctggcagagaagcatcagccacaacaaggtgccctactacatcaaccaccagacccagaccacctgctgggaccaccccaagatgaccgagctgttccagagcctggccgacctgaacaacgtgagattcagcgcctacagaaccgccatcaagatcagaagactgcagaaggccctgtgcctggacctgctggagctgagcaccaccaacgagatcttcaagcagcacaagctgaaccagaacgaccagctgctgagcgtgcccgacgtgatcaactgcctgaccaccacctacgacggcctggagcagatgcacaaggacctggtgaacgtgcccctgtgcgtggacatgtgcctgaactggctgctgaacgtgtacgacaccggcagaaccggcaagatcagagtgcagagcctgaagatcggcctgatgagcctgagcaagggcctgctggaggagaagtacagatacctgttcaaggaggtggccggccccaccgagatgtgcgaccagagacagctgggcctgctgctgcacgacgccatccagatccccagacagctgggcgaggtggccgccttcggcggcagcaacatcgagcccagcgtgagaagctgcttccagcagaacaacaacaagcccgagatcagcgtgaaggagttcatcgactggatgcacctggagccccagagcatggtgtggctgcccgtgctgcacagagtggccgccgccgagaccgccaagcaccaggccaagtgcaacatctgcaaggagtgccccatcgtgggcttcagatacagaagcctgaagcacttcaactacgacgtgtgccagagctgcttcttcagcggcagaaccgccaagggccacaagctgcactaccccatggtggagtactgcatccccaccaccagcggcgaggacgtgagagacttcaccaaggtgctgaagaacaagttcagaagcaagaagtacttcgccaagcaccccagactgggctacctgcccgtgcagaccgtgctggagggcgacaacctggagacccccatcaccctgatcagcatgtggcccgagcactacgaccccagccagagcccccagctgttccacgacgacacccacagcagaatcgagcagtacgccaccagactggcccagatggagagaaccaacggcagcttcctgaccgacagcagcagcaccaccggcagcgtggaggacgagcacgccctgatccagcagtactgccagaccctgggcggcgagagccccgtgagccagccccagagccccgcccagatcctgaagagcgtggagagagaggagagaggcgagctggagagaatcatcgccgacctggaggaggagcagagaaacctgcaggtggagtacgagcagctgaaggaccagcacctgagaagaggcctgcccgtgggcagcccccccgagagcatcatcagcccccaccacaccagcgaggacagcgagctgatcgccgaggccaagctgctgagacagcacaagggcagactggaggccagaatgcagatcctggaggaccacaacaagcagctggagagccagctgcacagactgagacagctgctggagcagcccgagagcgacagcagaatcaacggcgtgagcccctgggccagcccccagcacagcgccctgagctacagcctggaccccgacgccagcggcccccagttccaccaggccgccggcgaggacctgctggcccccccccacgacaccagcaccgacctgaccgaggtgatggagcagatccacagcaccttccccagctgctgccccaacgtgcccagcagaccccaggccatgtag

SEQ ID NO: 104836 - DNA, 3069 bp, synthetic construct
  misc_feature 1..3069: note = Description of Artificial Sequence: Synthetic coding sequence
  source 1..3069: mol_type = other DNA
atggccaagtacggcgagcacgaggccagccccgacaacggccagaacgagttcagcgacatcatcaagagcagaagcgacgagcacaacgacgtgcagaagaagaccttcaccaagtggatcaacgccagattcagcaagagcggcaagccccccatcaacgacatgttcaccgacctgaaggacggcagaaagctgctggacctgctggagggcctgaccggcaccagcctgcccaaggagagaggcagcaccagagtgcacgccctgaacaacgtgaacagagtgctgcaggtgctgcaccagaacaacgtggagctggtgaacatcggcggcaccgacatcgtggacggcaaccacaagctgaccctgggcctgctgtggagcatcatcctgcactggcaggtgaaggacgtgatgaaggacgtgatgagcgacctgcagcagaccaacagcgagaagatcctgctgagctgggtgagacagaccaccagaccctacagccaggtgaacgtgctgaacttcaccaccagctggaccgacggcctggccttcaacgccgtgctgcacagacacaagcccgacctgttcagctgggacaaggtggtgaagatgagccccatcgagagactggagcacgccttcagcaaggcccagacctacctgggcatcgagaagctgctggaccccgaggacgtggccgtgcagctgcccgacaagaagagcatcatcatgtacctgaccagcctgttcgaggtgctgccccagcaggtgaccatcgacgccatcagagaggtggagaccctgcccagaaagtacaagaaggagtgcgaggaggaggccatcaacatccagagcaccgcccccgaggaggagcacgagagccccagagccgagacccccagcaccgtgaccgaggtggacatggacctggacagctaccagatcgccctggaggaggtgctgacctggctgctgagcgccgaggacaccttccaggagcaggacgacatcagcgacgacgtggaggaggtgaaggaccagttcgccacccacgaggccttcatgatggagctgaccgcccaccagagcagcgtgggcagcgtgctgcaggccggcaaccagctgatcacccagggcaccctgagcgacgaggaggagttcgagatccaggagcagatgaccctgctgaacgccagatgggaggccctgagagtggagagcatggacagacagagcagactgcacgacgtgctgatggagctgcagaagaagcagctgcagcagctgagcgcctggctgaccctgaccgaggagagaatccagaagatggagacctgccccctggacgacgacgtgaagagcctgcagaagctgctggaggagcacaagagcctgcagagcgacctggaggccgagcaggtgaaggtgaacagcctgacccacatggtggtgatcgtggacgagaacagcggcgagagcgccaccgccatcctggaggaccagctgcagaagctgggcgagagatggaccgccgtgtgcagatggaccgaggagagatggaacagactgcaggagatcaacatcctgtggcaggagctgctggaggagcagtgcctgctgaaggcctggctgaccgagaaggaggaggccctgaacaaggtgcagaccagcaacttcaaggaccagaaggagctgagcgtgagcgtgagaagactggccatcctgaaggaggacatggagatgaagagacagaccctggaccagctgagcgagatcggccaggacgtgggccagctgctggacaacagcaaggccagcaagaagatcaacagcgacagcgaggagctgacccagagatgggacagcctggtgcagagactggaggacagcagcaaccaggtgacccaggccgtggccaagctgggcatgagccagatcccccagaaggacctgctggagaccgtgagagtgagagagcaggccatcaccaagaagagcaagcaggagctgccccccccccccccccccaagaagagacagatccacgtggacatcgaggccaagaagaagttcgacgccatcagcgccgagctgctgaactggatcctgaagtggaagaccgccatccagaccaccgagatcaaggagtacatgaagatgcaggacaccagcgagatgaagaagaagctgaaggccctggagaaggagcagagagagagaatccccagagccgacgagctgaaccagaccggccagatcctggtggagcagatgggcaaggagggcctgcccaccgaggagatcaagaacgtgctggagaaggtgagcagcgagtggaagaacgtgagccagcacctggaggacctggagagaaagatccagctgcaggaggacatcaacgcctacttcaagcagctggacgagctggagaaggtgatcaagaccaaggaggagtgggtgaagcacaccagcatcagcgagagcagcagacagagcctgcccagcctgaaggacagctgccagagagagctgaccaacctgctgggcctgcaccccaagatcgagatggccagagccagctgcagcgccctgatgagccagcccagcgcccccgacttcgtgcagagaggcttcgacagcttcctgggcagataccaggccgtgcaggaggccgtggaggacagacagcagcacctggagaacgagctgaagggccagcccggccacgcctacctggagaccctgaagaccctgaaggacgtgctgaacgacagcgagaacaaggcccaggtgagcctgaacgtgctgaacgacctggccaaggtggagaaggccctgcaggagaagaagaccctggacgagatcctggagaaccagaagcccgccctgcacaagctggccgaggagaccaaggccctggagaagaacgtgcaccccgacgtggagaagctgtacaagcaggagttcgacgacgtgcagggcaagtggaacaagctgaaggtgctggtgagcaaggacctgcacctgctggaggagatcgccctgaccctgagagccttcgagtag

SEQ ID NO: 104837 - DNA, 10302 bp, synthetic construct
  misc_feature 1..10302: note = Description of Artificial Sequence: Synthetic coding sequence
  source 1..10302: mol_type = other DNA
atggccaagtacggcgagcacgaggccagccccgacaacggccagaacgagttcagcgacatcatcaagagcagaagcgacgagcacaacgacgtgcagaagaagaccttcaccaagtggatcaacgccagattcagcaagagcggcaagccccccatcaacgacatgttcaccgacctgaaggacggcagaaagctgctggacctgctggagggcctgaccggcaccagcctgcccaaggagagaggcagcaccagagtgcacgccctgaacaacgtgaacagagtgctgcaggtgctgcaccagaacaacgtggagctggtgaacatcggcggcaccgacatcgtggacggcaaccacaagctgaccctgggcctgctgtggagcatcatcctgcactggcaggtgaaggacgtgatgaaggacgtgatgagcgacctgcagcagaccaacagcgagaagatcctgctgagctgggtgagacagaccaccagaccctacagccaggtgaacgtgctgaacttcaccaccagctggaccgacggcctggccttcaacgccgtgctgcacagacacaagcccgacctgttcagctgggacaaggtggtgaagatgagccccatcgagagactggagcacgccttcagcaaggcccagacctacctgggcatcgagaagctgctggaccccgaggacgtggccgtgcagctgcccgacaagaagagcatcatcatgtacctgaccagcctgttcgaggtgctgccccagcaggtgaccatcgacgccatcagagaggtggagaccctgcccagaaagtacaagaaggagtgcgaggaggaggccatcaacatccagagcaccgcccccgaggaggagcacgagagccccagagccgagacccccagcaccgtgaccgaggtggacatggacctggacagctaccagatcgccctggaggaggtgctgacctggctgctgagcgccgaggacaccttccaggagcaggacgacatcagcgacgacgtggaggaggtgaaggaccagttcgccacccacgaggccttcatgatggagctgaccgcccaccagagcagcgtgggcagcgtgctgcaggccggcaaccagctgatcacccagggcaccctgagcgacgaggaggagttcgagatccaggagcagatgaccctgctgaacgccagatgggaggccctgagagtggagagcatggacagacagagcagactgcacgacgtgctgatggagctgcagaagaagcagctgcagcagctgagcgcctggctgaccctgaccgaggagagaatccagaagatggagacctgccccctggacgacgacgtgaagagcctgcagaagctgctggaggagcacaagagcctgcagagcgacctggaggccgagcaggtgaaggtgaacagcctgacccacatggtggtgatcgtggacgagaacagcggcgagagcgccaccgccatcctggaggaccagctgcagaagctgggcgagagatggaccgccgtgtgcagatggaccgaggagagatggaacagactgcaggagatcaacatcctgtggcaggagctgctggaggagcagtgcctgctgaaggcctggctgaccgagaaggaggaggccctgaacaaggtgcagaccagcaacttcaaggaccagaaggagctgagcgtgagcgtgagaagactggccatcctgaaggaggacatggagatgaagagacagaccctggaccagctgagcgagatcggccaggacgtgggccagctgctggacaacagcaaggccagcaagaagatcaacagcgacagcgaggagctgacccagagatgggacagcctggtgcagagactggaggacagcagcaaccaggtgacccaggccgtggccaagctgggcatgagccagatcccccagaaggacctgctggagaccgtgagagtgagagagcaggccatcaccaagaagagcaagcaggagctgccccccccccccccccccaagaagagacagatccacgtggacatcgaggccaagaagaagttcgacgccatcagcgccgagctgctgaactggatcctgaagtggaagaccgccatccagaccaccgagatcaaggagtacatgaagatgcaggacaccagcgagatgaagaagaagctgaaggccctggagaaggagcagagagagagaatccccagagccgacgagctgaaccagaccggccagatcctggtggagcagatgggcaaggagggcctgcccaccgaggagatcaagaacgtgctggagaaggtgagcagcgagtggaagaacgtgagccagcacctggaggacctggagagaaagatccagctgcaggaggacatcaacgcctacttcaagcagctggacgagctggagaaggtgatcaagaccaaggaggagtgggtgaagcacaccagcatcagcgagagcagcagacagagcctgcccagcctgaaggacagctgccagagagagctgaccaacctgctgggcctgcaccccaagatcgagatggccagagccagctgcagcgccctgatgagccagcccagcgcccccgacttcgtgcagagaggcttcgacagcttcctgggcagataccaggccgtgcaggaggccgtggaggacagacagcagcacctggagaacgagctgaagggccagcccggccacgcctacctggagaccctgaagaccctgaaggacgtgctgaacgacagcgagaacaaggcccaggtgagcctgaacgtgctgaacgacctggccaaggtggagaaggccctgcaggagaagaagaccctggacgagatcctggagaaccagaagcccgccctgcacaagctggccgaggagaccaaggccctggagaagaacgtgcaccccgacgtggagaagctgtacaagcaggagttcgacgacgtgcagggcaagtggaacaagctgaaggtgctggtgagcaaggacctgcacctgctggaggagatcgccctgaccctgagagccttcgaggccgacagcaccgtgatcgagaagtggatggacggcgtgaaggacttcctgatgaagcagcaggccgcccagggcgacgacgccggcctgcagagacagctggaccagtgcagcgccttcgtgaacgagatcgagaccatcgagagcagcctgaagaacatgaaggagatcgagaccaacctgagaagcggccccgtggccggcatcaagacctgggtgcagaccagactgggcgactaccagacccagctggagaagctgagcaaggagatcgccacccagaagagcagactgagcgagagccaggagaaggccgccaacctgaagaaggacctggccgagatgcaggagtggatgacccaggccgaggaggagtacctggagagagacttcgagtacaagagccccgaggagctggagagcgccgtggaggagatgaagagagccaaggaggacgtgctgcagaaggaggtgagagtgaagatcctgaaggacaacatcaagctgctggccgccaaggtgcccagcggcggccaggagctgaccagcgagctgaacgtggtgctggagaactaccagctgctgtgcaacagaatcagaggcaagtgccacaccctggaggaggtgtggagctgctggatcgagctgctgcactacctggacctggagaccacctggctgaacaccctggaggagagaatgaagagcaccgaggtgctgcccgagaagaccgacgccgtgaacgaggccctggagagcctggagagcgtgctgagacaccccgccgacaacagaacccagatcagagagctgggccagaccctgatcgacggcggcatcctggacgacatcatcagcgagaagctggaggccttcaacagcagatacgaggacctgagccacctggccgagagcaagcagatcagcctggagaagcagctgcaggtgctgagagagaccgaccagatgctgcaggtgctgcaggagagcctgggcgagctggacaagcagctgaccacctacctgaccgacagaatcgacgccttccaggtgccccaggaggcccagaagatccaggccgagatcagcgcccacgagctgaccctggaggagctgagaagaaacatgagaagccagcccctgaccagccccgagagcagaaccgccagaggcggcagccagatggacgtgctgcagagaaagctgagagaggtgagcaccaagttccagctgttccagaagcccgccaacttcgagcagagaatgctggactgcaagagagtgctggacggcgtgaaggccgagctgcacgtgctggacgtgaaggacgtggaccccgacgtgatccagacccacctggacaagtgcatgaagctgtacaagaccctgagcgaggtgaagctggaggtggagaccgtgatcaagaccggcagacacatcgtgcagaagcagcagaccgacaaccccaagggcatggacgagcagctgaccagcctgaaggtgctgtacaacgacctgggcgcccaggtgaccgagggcaagcaggacctggagagagccagccagctggccagaaagatgaagaaggaggccgccagcctgagcgagtggctgagcgccaccgagaccgagctggtgcagaagagcaccagcgagggcctgctgggcgacctggacaccgagatcagctgggccaagaacgtgctgaaggacctggagaagagaaaggccgacctgaacaccatcaccgagagcagcgccgccctgcagaacctgatcgagggcagcgagcccatcctggaggagagactgtgcgtgctgaacgccggctggagcagagtgagaacctggaccgaggactggtgcaacaccctgatgaaccaccagaaccagctggagatcttcgacggcaacgtggcccacatcagcacctggctgtaccaggccgaggccctgctggacgagatcgagaagaagcccaccagcaagcaggaggagatcgtgaagagactggtgagcgagctggacgacgccaacctgcaggtggagaacgtgagagaccaggccctgatcctgatgaacgccagaggcagcagcagcagagagctggtggagcccaagctggccgagctgaacagaaacttcgagaaggtgagccagcacatcaagagcgccaagctgctgatcgcccaggagcccctgtaccagtgcctggtgaccaccgagaccttcgagaccggcgtgcccttcagcgacctggagaagctggagaacgacatcgagaacatgctgaagttcgtggagaagcacctggagagcagcgacgaggacgagaagatggacgaggagagcgcccagatcgaggaggtgctgcagagaggcgaggagatgctgcaccagcccatggaggacaacaagaaggagaagatcagactgcagctgctgctgctgcacaccagatacaacaagatcaaggccatccccatccagcagagaaagatgggccagctggccagcggcatcagaagcagcctgctgcccaccgactacctggtggagatcaacaagatcctgctgtgcatggacgacgtggagctgagcctgaacgtgcccgagctgaacaccgccatctacgaggacttcagcttccaggaggacagcctgaagaacatcaaggaccagctggacaagctgggcgagcagatcgccgtgatccacgagaagcagcccgacgtgatcctggaggccagcggccccgaggccatccagatcagagacaccctgacccagctgaacgccaagtgggacagaatcaacagaatgtacagcgacagaaagggctgcttcgacagagccatggaggagtggagacagttccactgcgacctgaacgacctgacccagtggatcaccgaggccgaggagctgctggtggacacctgcgcccccggcggcagcctggacctggagaaggccagaatccaccagcaggagctggaggtgggcatcagcagccaccagcccagcttcgccgccctgaacagaaccggcgacggcatcgtgcagaagctgagccaggccgacggcagcttcctgaaggagaagctggccggcctgaaccagagatgggacgccatcgtggccgaggtgaaggacagacagcccagactgaagggcgagagcaagcaggtgatgaagtacagacaccagctggacgagatcatctgctggctgaccaaggccgagcacgccatgcagaagagaagcaccaccgagctgggcgagaacctgcaggagctgagagacctgacccaggagatggaggtgcacgccgagaagctgaagtggctgaacagaaccgagctggagatgctgagcgacaagagcctgagcctgcccgagagagacaagatcagcgagagcctgagaaccgtgaacatgacctggaacaagatctgcagagaggtgcccaccaccctgaaggagtgcatccaggagcccagcagcgtgagccagaccagaatcgccgcccaccccaacgtgcagaaggtggtgctggtgagcagcgccagcgacatccccgtgcagagccacagaaccagcgagatcagcatccccgccgacctggacaagaccatcaccgagctggccgactggctggtgctgatcgaccagatgctgaagagcaacatcgtgaccgtgggcgacgtggaggagatcaacaagaccgtgagcagaatgaagatcaccaaggccgacctggagcagagacacccccagctggactacgtgttcaccctggcccagaacctgaagaacaaggccagcagcagcgacatgagaaccgccatcaccgagaagctggagagagtgaagaaccagtgggacggcacccagcacggcgtggagctgagacagcagcagctggaggacatgatcatcgacagcctgcagtgggacgaccacagagaggagaccgaggagctgatgagaaagtacgaggccagactgtacatcctgcagcaggccagaagagaccccctgaccaagcagatcagcgacaaccagatcctgctgcaggagctgggccccggcgacggcatcgtgatggccttcgacaacgtgctgcagaagctgctggaggagtacggcagcgacgacaccagaaacgtgaaggagaccaccgagtacctgaagaccagctggatcaacctgaagcagagcatcgccgacagacagaacgccctggaggccgagtggagaaccgtgcaggccagcagaagagacctggagaacttcctgaagtggatccaggaggccgagaccaccgtgaacgtgctggtggacgccagccacagagagaacgccctgcaggacagcatcctggccagagagctgaagcagcagatgcaggacatccaggccgagatcgacgcccacaacgacatcttcaagagcatcgacggcaacagacagaagatggtgaaggccctgggcaacagcgaggaggccaccatgctgcagcacagactggacgacatgaaccagagatggaacgacctgaaggccaagagcgccagcatcagagcccacctggaggccagcgccgagaagtggaacagactgctgatgagcctggaggagctgatcaagtggctgaacatgaaggacgaggagctgaagaagcagatgcccatcggcggcgacgtgcccgccctgcagctgcagtacgaccactgcaaggccctgagaagagagctgaaggagaaggagtacagcgtgctgaacgccgtggaccaggccagagtgttcctggccgaccagcccatcgaggcccccgaggagcccagaagaaacctgcagagcaagaccgagctgacccccgaggagagagcccagaagatcgccaaggccatgagaaagcagagcagcgaggtgaaggagaagtgggagagcctgaacgccgtgaccagcaactggcagaagcaggtggacaaggccctggagaagctgagagacctgcagggcgccatggacgacctggacgccgacatgaaggaggccgagagcgtgagaaacggctggaagcccgtgggcgacctgctgatcgacagcctgcaggaccacatcgagaagatcatggccttcagagaggagatcgcccccatcaacttcaaggtgaagaccgtgaacgacctgagcagccagctgagccccctggacctgcaccccagcctgaagatgagcagacagctggacgacctgaacatgagatggaagctgctgcaggtgagcgtggacgacagactgaagcagctgcaggaggcccacagagacttcggccccagcagccagcacttcctgagcaccagcgtgcagctgccctggcagagaagcatcagccacaacaaggtgccctactacatcaaccaccagacccagaccacctgctgggaccaccccaagatgaccgagctgttccagagcctggccgacctgaacaacgtgagattcagcgcctacagaaccgccatcaagatcagaagactgcagaaggccctgtgcctggacctgctggagctgagcaccaccaacgagatcttcaagcagcacaagctgaaccagaacgaccagctgctgagcgtgcccgacgtgatcaactgcctgaccaccacctacgacggcctggagcagatgcacaaggacctggtgaacgtgcccctgtgcgtggacatgtgcctgaactggctgctgaacgtgtacgacaccggcagaaccggcaagatcagagtgcagagcctgaagatcggcctgatgagcctgagcaagggcctgctggaggagaagtacagatacctgttcaaggaggtggccggccccaccgagatgtgcgaccagagacagctgggcctgctgctgcacgacgccatccagatccccagacagctgggcgaggtggccgccttcggcggcagcaacatcgagcccagcgtgagaagctgcttccagcagaacaacaacaagcccgagatcagcgtgaaggagttcatcgactggatgcacctggagccccagagcatggtgtggctgcccgtgctgcacagagtggccgccgccgagaccgccaagcaccaggccaagtgcaacatctgcaaggagtgccccatcgtgggcttcagatacagaagcctgaagcacttcaactacgacgtgtgccagagctgcttcttcagcggcagaaccgccaagggccacaagctgcactaccccatggtggagtactgcatccccaccaccagcggcgaggacgtgagagacttcaccaaggtgctgaagaacaagttcagaagcaagaagtacttcgccaagcaccccagactgggctacctgcccgtgcagaccgtgctggagggcgacaacctggagacccccatcaccctgatcagcatgtggcccgagcactacgaccccagccagagcccccagctgttccacgacgacacccacagcagaatcgagcagtacgccaccagactggcccagatggagagaaccaacggcagcttcctgaccgacagcagcagcaccaccggcagcgtggaggacgagcacgccctgatccagcagtactgccagaccctgggcggcgagagccccgtgagccagccccagagccccgcccagatcctgaagagcgtggagagagaggagagaggcgagctggagagaatcatcgccgacctggaggaggagcagagaaacctgcaggtggagtacgagcagctgaaggaccagcacctgagaagaggcctgcccgtgggcagcccccccgagagcatcatcagcccccaccacaccagcgaggacagcgagctgatcgccgaggccaagctgctgagacagcacaagggcagactggaggccagaatgcagatcctggaggaccacaacaagcagctggagagccagctgcacagactgagacagctgctggagcagcccgagagcgacagcagaatcaacggcgtgagcccctgggccagcccccagcacagcgccctgagctacagcctggaccccgacgccagcggcccccagttccaccaggccgccggcgaggacctgctggcccccccccacgacaccagcaccgacctgaccgaggtgatggagcagatccacagcaccttccccagctgctgccccaacgtgcccagcagaccccaggccatgtag

SEQ ID NO: 104838 - DNA, 555 bp, synthetic construct
  misc_feature 1..555: note = Description of Artificial Sequence: Synthetic coding sequence
  source 1..555: mol_type = other DNA
atgcacctggagccccagagcatggtgtggctgcccgtgctgcacagagtggccgccgccgagaccgccaagcaccaggccaagtgcaacatctgcaaggagtgccccatcgtgggcttcagatacagaagcctgaagcacttcaactacgacgtgtgccagagctgcttcttcagcggcagaaccgccaagggccacaagctgcactaccccatggtggagtactgcatccccaccaccagcggcgaggacgtgagagacttcaccaaggtgctgaagaacaagttcagaagcaagaagtacttcgccaagcaccccagactgggctacctgcccgtgcagaccgtgctggagggcgacaacctggagacccccagccagagcccccagctgttccacgacgacacccacagcagaatcgagcagtacgccaccagactggcccagatggagagaaccaacggcagcttcctgaccgacagcagcagcaccaccggcagcgtggaggacgagcacgccctgatccagcagtactgccagaccctgggcggctag

SEQ ID NO: 104839 - DNA, 462 bp, synthetic construct
  misc_feature 1..462: note = Description of Artificial Sequence: Synthetic coding sequence
  source 1..462: mol_type = other DNA
atgagcggcctggccgccaccaccttccactggaagaagtgcagactggacctgcccggccacgtggccctgcaggcctgcaagagactgcccgacgagcacaacgacgtgcagaagaagaccttcaccaagtggatcaacgccagattcagcaagagcggcaagccccccatcaacgacatgttcaccgacctgaaggacggcagaaagctgctggacctgctggagggcctgaccggcaccagcctgcccaaggagagaggcagcaccagagtgcacgccctgaacaacgtgaacagagtgctgcaggtgctgcaccagaacaacgtggagctggtgaacatcggcggcaccgacatcgtggacggcaaccacaagctgaccctgggcctgctgtggagcatcatcctgcactggcaggtggacgtgatgaaggacgtgatgagcgacctgcagcagtag

SEQ ID NO: 104840 - DNA, 546 bp, synthetic construct
  misc_feature 1..546: note = Description of Artificial Sequence: Synthetic coding sequence
  source 1..546: mol_type = other DNA
atgcacctggagccccagagcatggtgtggctgcccgtgctgcacagagtggccgccgccgagaccgccaagcaccaggccaagtgcaacatctgcaaggagtgccccatcgtgggcttcagatacagaagcctgaagcacttcaactacgacgtgtgccagagctgcttcttcagcggcagaaccgccaagggccacaagctgcactaccccatggtggagtactgcatccccaccaccagcggcgaggacgtgagagacttcaccaaggtgctgaagaacaagttcagaagcaagaagtacttcgccaagcaccccagactgggctacctgcccgtgcagaccgtgctggagggcgacaacctggagacccccatcaccctgatcagcatgtggcccgagcactacgaccccagccagagcccccagctgttccacgacgacacccacagcagaatcgagcagtacgccaccagactggcccagatggagagaaccaacggcagcttcctgaccgacagcagcagcaccaccggcagcgtgtag

SEQ ID NO: 104841 - DNA, 144 bp, synthetic construct
  misc_feature 1..144: note = Description of Artificial Sequence: Synthetic coding sequence
  source 1..144: mol_type = other DNA
atggccaagtacggcgagcacgaggccagccccgacaacggccagaacgagttcagcgacatcatcaagagcagaagcgacgagcacaacgacgtgcagaagaagaccttcaccaagtggatcaacgccagattcagcaagtag

SEQ ID NO: 104842 - DNA, 561 bp, synthetic construct
  misc_feature 1..561: note = Description of Artificial Sequence: Synthetic coding sequence
  source 1..561: mol_type = other DNA
atgctggaggaggaggagtggtacagaagcctgaagcacttcaactacgacgtgtgccagagctgcttcttcagcggcagaaccgccaagggccacaagctgcactaccccatggtggagtactgcatccccaccaccagcggcgaggacgtgagagacttcaccaaggtgctgaagaacaagttcagaagcaagaagtacttcgccaagcaccccagactgggctacctgcccgtgcagaccgtgctggagggcgacaacctggagacccccagccagagcccccagctgttccacgacgacacccacagcagaatcgagcagtacgccaccagactggcccagatggagagaaccaacggcagcttcctgaccgacagcagcagcaccaccggcagcgtggaggacgagcacgccctgatccagcagtactgccagaccctgggcggcgagagccccgtgagccagccccagagccccgcccagatcctgaagagcgtggagagagaggagagaggcgagctggagagaatcatcgccgacctggaggaggagcagtag

SEQ ID NO: 104843 - DNA, 201 bp, synthetic construct; identical to SEQ ID NO: 104834
  misc_feature 1..201: note = Description of Artificial Sequence: Synthetic coding sequence
  source 1..201: mol_type = other DNA

SEQ ID NO: 104844 - DNA, 555 bp, synthetic construct; identical to SEQ ID NO: 104838
  misc_feature 1..555: note = Description of Artificial Sequence: Synthetic coding sequence
  source 1..555: mol_type = other DNA

SEQ ID NO: 104845 - DNA, 2100 bp, synthetic construct
  misc_feature 1..2100: note = Description of Artificial Sequence: Synthetic coding sequence
  source 1..2100: mol_type = other DNA
atgagcgccagcgccagcgtgggcggccccgtgccccagcccccccccggccccgccgccgccctgccccccggcagcgccgccagagccctgcacgtggagctgcccagccagcagagaagactgagacacctgagaaacatcgccgccagaaacatcgtgaacagaaacggccaccagctgctggacacctacttcaccctgcacctgtgcagcaccgagaagatctacaaggagttctacagaagcgaggtgatcaagaacagcctgaaccccacctggagaagcctggacttcggcatcatgcccgacagactggacaccagcgtgagctgcttcgtggtgaagatctggggcggcaaggagaacatctaccagctgctgatcgagtggaaggtgtgcctggacggcctgaagtacctgggccagcagatccacgccagaaaccagaacgagatcatcttcggcctgaacgacggctactacggcgcccccttcgagcacaagggctacagcaacgcccagaagaccatcctgctgcaggtggaccagaactgcgtgagaaacagctacgacgtgttcagcctgctgagactgcacagagcccagtgcgccatcaagcagacccaggtgaccgtgcagaagatcggcaaggagatcgaggagaagctgagactgaccagcaccagcaacgagctgaagaagaagagcgagtgcctgcagctgaagatcctggtgctgcagaacgagctggagagacagaagaaggccctgggcagagaggtggccctgctgcacaagcagcagatcgccctgcaggacaagggcagcgccttcagcgccgagcacctgaagctgcagctgcagaaggagagcctgaacgagctgagaaaggagtgcaccgccaagagagagctgttcctgaagaccaacgcccagctgaccatcagatgcagacagctgctgagcgagctgagctacatctaccccatcgacctgaacgagcacaaggactacttcgtgtgcggcgtgaagctgcccaacagcgaggacttccaggccaaggacgacggcagcatcgccgtggccctgggctacaccgcccacctggtgagcatgatcagcttcttcctgcaggtgcccctgagataccccatcatccacaagggcagcagaagcaccatcaaggacaacatcaacgacaagctgaccgagaaggagagagagttccccctgtaccccaagggcggcgagaagctgcagttcgactacggcgtgtacctgctgaacaagaacatcgcccagctgagataccagcacggcctgggcacccccgacctgagacagaccctgcccaacctgaagaacttcatggagcacggcctgatggtgagatgcgacagacaccacaccagcagcgccatccccgtgcccaagagacagagcagcatcttcggcggcgccgacgtgggcttcagcggcggcatccccagccccgacaagggccacagaaagagagccagcagcgagaacgagagactgcagtacaagacccccccccccagctacaacagcgccctggcccagcccgtgaccaccgtgcccagcatgggcgagaccgagagaaagatcaccagcctgagcagcagcctggacaccagcctggacttcagcaaggagaacaagaagaagggcgaggacctggtgggcagcctgaacggcggccacgccaacgtgcaccccagccaggagcagggcgaggccctgagcggccacagagccaccgtgaacggcaccctgctgcccagcgagcaggccggcagcgccagcgtgcagctgcccggcgagttccaccccgtgagcgaggccgagctgtgctgcaccgtggagcaggccgaggagatcatcggcctggaggccaccggcttcgccagcggcgaccagctggaggccttcaactgcatccccgtggacagcgccgtggccgtggagtgcgacgagcaggtgctgggcgagttcgaggagttcagcagaagaatctacgccctgaacgagaacgtgagcagcttcagaagacccagaagaagcagcgacaagtag

SEQ ID NO: 104846 - DNA, 768 bp, synthetic construct
  misc_feature 1..768: note = Description of Artificial Sequence: Synthetic coding sequence
  source 1..768: mol_type = other DNA
atgttcatcagcgtggcccagagacagagagagaacgccttcagctgcagcaccttcctgagatgcgacagacaccacaccagcagcgccatccccgtgcccaagagacagagcagcatcttcggcggcgccgacgtgggcttcagcggcggcatccccagccccgacaagggccacagaaagagagccagcagcgagaacgagagactgcagtacaagacccccccccccagctacaacagcgccctggcccagcccgtgaccaccgtgcccagcatgggcgagaccgagagaaagatcaccagcctgagcagcagcctggacaccagcctggacttcagcaaggagaacaagaagaagggcgaggacctggtgggcagcctgaacggcggccacgccaacgtgcaccccagccaggagcagggcgaggccctgagcggccacagagccaccgtgaacggcaccctgctgcccagcgagcaggccggcagcgccagcgtgcagctgcccggcgagttccaccccgtgagcgaggccgagctgtgctgcaccgtggagcaggccgaggagatcatcggcctggaggccaccggcttcgccagcggcgaccagctggaggccttcaactgcatccccgtggacagcgccgtggccgtggagtgcgacgagcaggtgctgggcgagttcgaggagttcagcagaagaatctacgccctgaacgagaacgtgagcagcttcagaagacccagaagaagcagcgacaagtag

SEQ ID NO: 104847 - DNA, 984 bp, synthetic construct
  misc_feature 1..984: note = Description of Artificial Sequence: Synthetic coding sequence
  source 1..984: mol_type = other DNA
atgatcagcttcttcctgcaggtgcccctgagataccccatcatccacaagggcagcagaagcaccatcaaggacaacatcaacgacaagctgaccgagaaggagagagagttccccctgtaccccaagggcggcgagaagctgcagttcgactacggcgtgtacctgctgaacaagaacatcgcccagctgagataccagcacggcctgggcacccccgacctgagacagaccctgcccaacctgaagaacttcatggagcacggcctgatggtgagatgcgacagacaccacaccagcagcgccatccccgtgcccaagagacagagcagcatcttcggcggcgccgacgtgggcttcagcggcggcatccccagccccgacaagggccacagaaagagagccagcagcgagaacgagagactgcagtacaagacccccccccccagctacaacagcgccctggcccagcccgtgaccaccgtgcccagcatgggcgagaccgagagaaagatcaccagcctgagcagcagcctggacaccagcctggacttcagcaaggagaacaagaagaagggcgaggacctggtgggcagcctgaacggcggccacgccaacgtgcaccccagccaggagcagggcgaggccctgagcggccacagagccaccgtgaacggcaccctgctgcccagcgagcaggccggcagcgccagcgtgcagctgcccggcgagttccaccccgtgagcgaggccgagctgtgctgcaccgtggagcaggccgaggagatcatcggcctggaggccaccggcttcgccagcggcgaccagctggaggccttcaactgcatccccgtggacagcgccgtggccgtggagtgcgacgagcaggtgctgggcgagttcgaggagttcagcagaagaatctacgccctgaacgagaacgtgagcagcttcagaagacccagaagaagcagcgacaagtag

SEQ ID NO: 104848 - DNA, 4251 bp, synthetic construct
  misc_feature 1..4251: note = Description of Artificial Sequence: Synthetic coding sequence
  source 1..4251: mol_type = other DNA
atgaagagcctgaagagcagactgagaagacaggacgtgcccggccccgccagcagcggcgccgccgccgccagcgcccacgccgccgactggaacaagtacgacgacagactgatgaaggccgccgagagaggcgacgtggagaaggtgaccagcatcctggccaagaagggcgtgaaccccggcaagctggacgtggagggcagaagcgtgttccacgtggtgaccagcaagggcaacctggagtgcctgaacgccatcctgatccacggcgtggacatcaccaccagcgacaccgccggcagaaacgccctgcacctggccgccaagtacggccacgccctgtgcctgcagaagctgctgcagtacaactgccccaccgagcacgccgacctgcagggcagaaccgccctgcacgacgccgccatggccgactgccccagcagcatccagctgctgtgcgaccacggcgccagcgtgaacgccaaggacgtggacggcagaacccccctggtgctggccacccagatgagcagacccaccatctgccagctgctgatcgacagaggcgccgacgtgaacagcagagacaagcagaacagaaccgccctgatgctgggctgcgagtacggctgcagagacgccgtggaggtgctgatcaagaacggcgccgacatcagcctgctggacgccctgggccacgacagcagctactacgccagaatcggcgacaacctggacatcctgaccctgctgaagaccgccagcgagaacaccaacaagggcagagagctgtggaagaagggccccagcctgcagcagagaaacctgacccacatgcaggacgaggtgaacgtgaagagccaccagagagagcaccagaacatccaggacctggagatcgagaacgaggacctgaaggagagactgagaaagatccagcaggagcagagaatcctgctggacaaggtgaacggcctgcagctgcagctgaacgaggaggtgatggtggccgacgacctggagagcgagagagagaagctgaagagcctgctggccgccaaggagaagcagcacgaggagagcctgagaaccatcgaggccctgaagaacagattcaagtacttcgagagcgaccacctgggcagcggcagccacttcagcaacagaaaggaggacatgctgctgaagcagggccagatgtacatggccgacagccagtgcaccagccccggcatccccgcccacatgcagagcagaagcatgctgagacccctggagctgagcctgcccagccagaccagctacagcgagaacgagatcctgaagaaggagctggaggccatgagaaccttctgcgagagcgccaagcaggacagactgaagctgcagaacgagctggcccacaaggtggccgagtgcaaggccctggccctggagtgcgagagagtgaaggaggacagcgacgagcagatcaagcagctggaggacgccctgaaggacgtgcagaagagaatgtacgagagcgagggcaaggtgaagcagatgcagacccacttcctggccctgaaggagcacctgaccagcgaggccgccagcggcaaccacagactgaccgaggagctgaaggaccagctgaaggacctgaaggtgaagtacgagggcgccagcgccgaggtgggcaagctgagaaaccagatcaagcagaacgagatgatcgtggaggagttcaagagagacgagggcaagctgatcgaggagaacaagagactgcagaaggagctgagcatgtgcgagatggagagagagaagaagggcagaaaggtgaccgagatggagggccaggccaaggagctgagcgccaagctggccctgagcatccccgccgagaagttcgagaacatgaagagcagcctgagcaacgaggtgaacgagaaggccaagaagctggtggagatggagagagagcacgagaagagcctgagcgagatcagacagctgaagagagagctggagaacgtgaaggccaagctggcccagcacgtgaagcccgaggagcacgagcaggtgaagagcagactggagcagaagagcggcgagctgggcaagaagatcaccgagctgaccctgaagaaccagaccctgcagaaggagatcgagaaggtgtacctggacaacaagctgctgaaggagcaggcccacaacctgaccatcgagatgaagaaccactacgtgcccctgaaggtgagcgaggacatgaagaagagccacgacgccatcatcgacgacctgaacagaaagctgctggacgtgacccagaagtacaccgagaagaagctggagatggagaagctgctgctggagaacgacagcctgagcaaggacgtgagcagactggagaccgtgttcgtgccccccgagaagcacgagaaggagatcatcgccctgaagagcaacatcgtggagctgaagaagcagctgagcgagctgaagaagaagtgcggcgaggaccaggagaagatccacgccctgaccagcgagaacaccaacctgaagaagatgatgagcaaccagtacgtgcccgtgaagacccacgaggaggtgaagatgaccctgaacgacaccctggccaagaccaacagagagctgctggacgtgaagaagaagttcgaggacatcaaccaggagttcgtgaagatcaaggacaagaacgagatcctgaagagaaacctggagaacacccagaaccagatcaaggccgagtacatcagcctggccgagcacgaggccaagatgagcagcctgagccagagcatgagaaaggtgcaggacagcaacgccgagatcctggccaactacagaaagggccaggaggagatcgtgaccctgcacgccgagatcaaggcccagaagaaggagctggacaccatccaggagtgcatcaaggtgaagtacgcccccatcgtgagcttcgaggagtgcgagagaaagttcaaggccaccgagaaggagctgaaggaccagctgagcgagcagacccagaagtacagcgtgagcgaggaggaggtgaagaagaacaagcaggagaacgacaagctgaagaaggagatcttcaccctgcagaaggacctgagagacaagaccgtgctgatcgagaagagccacgagatggagagagccctgagcagaaagaccgacgagctgaacaagcagctgaaggacctgagccagaagtacaccgaggtgaagaacgtgaaggagaagctggtggaggagaacgccaagcagaccagcgagatcctggccgtgcagaacctgctgcagaagcagcacgtgcccctggagcaggtggaggccctgaagaagagcctgaacggcaccatcgagaacctgaaggaggagctgaagagcatgcagagatgctacgagaaggagcagcagaccgtgaccaagctgcaccagctgctggagaaccagaagaacagcagcgtgcccctggccgagcacctgcagatcaaggaggccttcgagaaggaggtgggcatcatcaaggccagcctgagagagaaggaggaggagagccagaacaagatggaggaggtgagcaagctgcagagcgaggtgcagaacaccaagcaggccctgaagaagctggagaccagagaggtggtggacctgagcaagtacaaggccaccaagagcgacctggagacccagatcagcagcctgaacgagaagctggccaacctgaacagaaagtacgaggaggtgtgcgaggaggtgctgcacgccaagaagaaggagatcagcgccaaggacgagaaggagctgctgcacttcagcatcgagcaggagatcaaggaccagaaggagagatgcgacaagagcctgaccaccatcaccgagctgcagagaagaatccaggagagcgccaagcagatcgaggccaaggacaacaagatcaccgagctgctgaacgacgtggagagactgaagcaggccctgaacggcctgagccagctgacctacaccagcggcaaccccaccaagagacagagccagctgatcgacaccctgcagcaccaggtgaagagcctggagcagcagctggccgacgccgacagacagcaccaggaggtgatcgccatctacagaacccacctgctgagcgccgcccagggccacatggacgaggacgtgcaggaggccctgctgcagatcatccagatgagacagggcctggtgtgctag

SEQ ID NO: 104849 - DNA, 4212 bp, synthetic construct
  misc_feature 1..4212: note = Description of Artificial Sequence: Synthetic coding sequence
  source 1..4212: mol_type = other DNA
atgatgaactgctggttcagctgcacccccaagaacagacacgccgccgactggaacaagtacgacgacagactgatgaaggccgccgagagaggcgacgtggagaaggtgaccagcatcctggccaagaagggcgtgaaccccggcaagctggacgtggagggcagaagcgtgttccacgtggtgaccagcaagggcaacctggagtgcctgaacgccatcctgatccacggcgtggacatcaccaccagcgacaccgccggcagaaacgccctgcacctggccgccaagtacggccacgccctgtgcctgcagaagctgctgcagtacaactgccccaccgagcacgccgacctgcagggcagaaccgccctgcacgacgccgccatggccgactgccccagcagcatccagctgctgtgcgaccacggcgccagcgtgaacgccaaggacgtggacggcagaacccccctggtgctggccacccagatgagcagacccaccatctgccagctgctgatcgacagaggcgccgacgtgaacagcagagacaagcagaacagaaccgccctgatgctgggctgcgagtacggctgcagagacgccgtggaggtgctgatcaagaacggcgccgacatcagcctgctggacgccctgggccacgacagcagctactacgccagaatcggcgacaacctggacatcctgaccctgctgaagaccgccagcgagaacaccaacaagggcagagagctgtggaagaagggccccagcctgcagcagagaaacctgacccacatgcaggacgaggtgaacgtgaagagccaccagagagagcaccagaacatccaggacctggagatcgagaacgaggacctgaaggagagactgagaaagatccagcaggagcagagaatcctgctggacaaggtgaacggcctgcagctgcagctgaacgaggaggtgatggtggccgacgacctggagagcgagagagagaagctgaagagcctgctggccgccaaggagaagcagcacgaggagagcctgagaaccatcgaggccctgaagaacagattcaagtacttcgagagcgaccacctgggcagcggcagccacttcagcaacagaaaggaggacatgctgctgaagcagggccagatgtacatggccgacagccagtgcaccagccccggcatccccgcccacatgcagagcagaagcatgctgagacccctggagctgagcctgcccagccagaccagctacagcgagaacgagatcctgaagaaggagctggaggccatgagaaccttctgcgagagcgccaagcaggacagactgaagctgcagaacgagctggcccacaaggtggccgagtgcaaggccctggccctggagtgcgagagagtgaaggaggacagcgacgagcagatcaagcagctggaggacgccctgaaggacgtgcagaagagaatgtacgagagcgagggcaaggtgaagcagatgcagacccacttcctggccctgaaggagcacctgaccagcgaggccgccagcggcaaccacagactgaccgaggagctgaaggaccagctgaaggacctgaaggtgaagtacgagggcgccagcgccgaggtgggcaagctgagaaaccagatcaagcagaacgagatgatcgtggaggagttcaagagagacgagggcaagctgatcgaggagaacaagagactgcagaaggagctgagcatgtgcgagatggagagagagaagaagggcagaaaggtgaccgagatggagggccaggccaaggagctgagcgccaagctggccctgagcatccccgccgagaagttcgagaacatgaagagcagcctgagcaacgaggtgaacgagaaggccaagaagctggtggagatggagagagagcacgagaagagcctgagcgagatcagacagctgaagagagagctggagaacgtgaaggccaagctggcccagcacgtgaagcccgaggagcacgagcaggtgaagagcagactggagcagaagagcggcgagctgggcaagaagatcaccgagctgaccctgaagaaccagaccctgcagaaggagatcgagaaggtgtacctggacaacaagctgctgaaggagcaggcccacaacctgaccatcgagatgaagaaccactacgtgcccctgaaggtgagcgaggacatgaagaagagccacgacgccatcatcgacgacctgaacagaaagctgctggacgtgacccagaagtacaccgagaagaagctggagatggagaagctgctgctggagaacgacagcctgagcaaggacgtgagcagactggagaccgtgttcgtgccccccgagaagcacgagaaggagatcatcgccctgaagagcaacatcgtggagctgaagaagcagctgagcgagctgaagaagaagtgcggcgaggaccaggagaagatccacgccctgaccagcgagaacaccaacctgaagaagatgatgagcaaccagtacgtgcccgtgaagacccacgaggaggtgaagatgaccctgaacgacaccctggccaagaccaacagagagctgctggacgtgaagaagaagttcgaggacatcaaccaggagttcgtgaagatcaaggacaagaacgagatcctgaagagaaacctggagaacacccagaaccagatcaaggccgagtacatcagcctggccgagcacgaggccaagatgagcagcctgagccagagcatgagaaaggtgcaggacagcaacgccgagatcctggccaactacagaaagggccaggaggagatcgtgaccctgcacgccgagatcaaggcccagaagaaggagctggacaccatccaggagtgcatcaaggtgaagtacgcccccatcgtgagcttcgaggagtgcgagagaaagttcaaggccaccgagaaggagctgaaggaccagctgagcgagcagacccagaagtacagcgtgagcgaggaggaggtgaagaagaacaagcaggagaacgacaagctgaagaaggagatcttcaccctgcagaaggacctgagagacaagaccgtgctgatcgagaagagccacgagatggagagagccctgagcagaaagaccgacgagctgaacaagcagctgaaggacctgagccagaagtacaccgaggtgaagaacgtgaaggagaagctggtggaggagaacgccaagcagaccagcgagatcctggccgtgcagaacctgctgcagaagcagcacgtgcccctggagcaggtggaggccctgaagaagagcctgaacggcaccatcgagaacctgaaggaggagctgaagagcatgcagagatgctacgagaaggagcagcagaccgtgaccaagctgcaccagctgctggagaaccagaagaacagcagcgtgcccctggccgagcacctgcagatcaaggaggccttcgagaaggaggtgggcatcatcaaggccagcctgagagagaaggaggaggagagccagaacaagatggaggaggtgagcaagctgcagagcgaggtgcagaacaccaagcaggccctgaagaagctggagaccagagaggtggtggacctgagcaagtacaaggccaccaagagcgacctggagacccagatcagcagcctgaacgagaagctggccaacctgaacagaaagtacgaggaggtgtgcgaggaggtgctgcacgccaagaagaaggagatcagcgccaaggacgagaaggagctgctgcacttcagcatcgagcaggagatcaaggaccagaaggagagatgcgacaagagcctgaccaccatcaccgagctgcagagaagaatccaggagagcgccaagcagatcgaggccaaggacaacaagatcaccgagctgctgaacgacgtggagagactgaagcaggccctgaacggcctgagccagctgacctacaccagcggcaaccccaccaagagacagagccagctgatcgacaccctgcagcaccaggtgaagagcctggagcagcagctggccgacgccgacagacagcaccaggaggtgatcgccatctacagaacccacctgctgagcgccgcccagggccacatggacgaggacgtgcaggaggccctgctgcagatcatccagatgagacagggcctggtgtgctag

SEQ ID NO: 104850 - DNA, 1686 bp, synthetic construct
  misc_feature 1..1686: note = Description of Artificial Sequence: Synthetic coding sequence
  source 1..1686: mol_type = other DNA
atgatgaactgctggttcagctgcacccccaagaacagacacgccgccgactggaacaagtacgacgacagactgatgaaggccgccgagagaggcgacgtggagaaggtgaccagcatcctggccaagaagggcgtgaaccccggcaagctggacgtggagggcagaagcgtgttccacgtggtgaccagcaagggcaacctggagtgcctgaacgccatcctgatccacggcgtggacatcaccaccagcgacaccgccggcagaaacgccctgcacctggccgccaagtacggccacgccctgtgcctgcagaagctgctgcagtacaactgccccaccgagcacgccgacctgcagggcagaaccgccctgcacgacgccgccatggccgactgccccagcagcatccagctgctgtgcgaccacggcgccagcgtgaacgccaaggacgtggacggcagaacccccctggtgctggccacccagatgagcagacccaccatctgccagctgctgatcgacagaggcgccgacgtgaacagcagagacaagcagaacagaaccgccctgatgctgggctgcgagtacggctgcagagacgccgtggaggtgctgatcaagaacggcgccgacatcagcctgctggacgccctgggccacgacagcagctactacgccagaatcggcgacaacctggacatcctgaccctgctgaagaccgccagcgagaacaccaacaagggcagagagctgtggaagaagggccccagcctgcagcagagaaacctgacccacatgcaggacgaggtgaacgtgaagagccaccagagagagcaccagaacatccaggacctggagatcgagaacgaggacctgaaggagagactgagaaagatccagcaggagcagagaatcctgctggacaaggtgaacggcctgcagctgcagctgaacgagagagagaagctgaagagcctgctggccgccaaggagaagcagcacgaggagagcctgagaaccatcgaggccctgaagaacagattcaagtacttcgagagcgaccacctgggcagcggcagccacttcagcaacagaaaggaggacatgctgctgaagcagggccagatgtacatggccgacagccagtgcaccagccccggcatccccgcccacatgcagagcagaagcatgctgagacccctggagctgagcctgcccagccagaccagctacagcgagaacgagatcctgaagaaggagctggaggccatgagaaccttctgcgagagcgccaagcaggacagactgaagctgcagaacgagctggcccacaaggtggccgagtgcaaggccctggccctggagtgcgagagagtgaaggaggacagcgacgagcagatcaagcagctggaggacgccctgaaggacgtgcagaagagaatgtacgagagcgagggcaaggtgaagcagatgcagacccacttcctggccctgaaggagcacctgaccagcgaggccgccagcggcaaccacagactgaccgaggagctgaaggaccagctgaaggacctgaaggtgaagtacgagggcgccagcgccgaggtgggcaagctgagaaaccagatcaagcagaacgagatgatcgtggaggagttcaagagagacgagggcaagctgatctag

SEQ ID NO: 104851 - DNA, 4206 bp, synthetic construct
  misc_feature 1..4206: note = Description of Artificial Sequence: Synthetic coding sequence
  source 1..4206: mol_type = other DNA
atgatgaactgctggttcagctgcacccccaagaacagacacgccgccgactggaacaagtacgacgacagactgatgaaggccgccgagagaggcgacgtggagaaggtgaccagcatcctggccaagaagggcgtgaaccccggcaagctggacgtggagggcagaagcgtgttccacgtggtgaccagcaagggcaacctggagtgcctgaacgccatcctgatccacggcgtggacatcaccaccagcgacaccgccggcagaaacgccctgcacctggccgccaagtacggccacgccctgtgcctgcagaagctgctgcagtacaactgccccaccgagcacgccgacctgcagggcagaaccgccctgcacgacgccgccatggccgactgccccagcagcatccagctgctgtgcgaccacggcgccagcgtgaacgccaaggacgtggacggcagaacccccctggtgctggccacccagatgagcagacccaccatctgccagctgctgatcgacagaggcgccgacgtgaacagcagagacaagcagaacagaaccgccctgatgctgggctgcgagtacggctgcagagacgccgtggaggtgctgatcaagaacggcgccgacatcagcctgctggacgccctgggccacgacagcagctactacgccagaatcggcgacaacctggacatcctgaccctgctgaagaccgccagcgagaacaccaacaagggcagagagctgtggaagaagggccccagcctgcagcagagaaacctgacccacatgcaggacgaggtgaacgtgaagagccaccagagagagcaccagaacatccaggacctggagatcgagaacgaggacctgaaggagagactgagaaagatccagcaggagcagagaatcctgctggacaaggtgaacggcctgcagctgcagctgaacgaggaggtgatggtggccgacgacctggagagcgagagagagaagctgaagagcctgctggccgccaaggagaagcagcacgaggagagcctgagaaccatcgaggccctgaagaacagattcaagtacttcgagagcgaccacctgggcagcggcagccacttcagaaaggaggacatgctgctgaagcagggccagatgtacatggccgacagccagtgcaccagccccggcatccccgcccacatgcagagcagaagcatgctgagacccctggagctgagcctgcccagccagaccagctacagcgagaacgagatcctgaagaaggagctggaggccatgagaaccttctgcgagagcgccaagcaggacagactgaagctgcagaacgagctggcccacaaggtggccgagtgcaaggccctggccctggagtgcgagagagtgaaggaggacagcgacgagcagatcaagcagctggaggacgccctgaaggacgtgcagaagagaatgtacgagagcgagggcaaggtgaagcagatgcagacccacttcctggccctgaaggagcacctgaccagcgaggccgccagcggcaaccacagactgaccgaggagctgaaggaccagctgaaggacctgaaggtgaagtacgagggcgccagcgccgaggtgggcaagctgagaaaccagatcaagcagaacgagatgatcgtggaggagttcaagagagacgagggcaagctgatcgaggagaacaagagactgcagaaggagctgagcatgtgcgagatggagagagagaagaagggcagaaaggtgaccgagatggagggccaggccaaggagctgagcgccaagctggccctgagcatccccgccgagaagttcgagaacatgaagagcagcctgagcaacgaggtgaacgagaaggccaagaagctggtggagatggagagagagcacgagaagagcctgagcgagatcagacagctgaagagagagctggagaacgtgaaggccaagctggcccagcacgtgaagcccgaggagcacgagcaggtgaagagcagactggagcagaagagcggcgagctgggcaagaagatcaccgagctgaccctgaagaaccagaccctgcagaaggagatcgagaaggtgtacctggacaacaagctgctgaaggagcaggcccacaacctgaccatcgagatgaagaaccactacgtgcccctgaaggtgagcgaggacatgaagaagagccacgacgccatcatcgacgacctgaacagaaagctgctggacgtgacccagaagtacaccgagaagaagctggagatggagaagctgctgctggagaacgacagcctgagcaaggacgtgagcagactggagaccgtgttcgtgccccccgagaagcacgagaaggagatcatcgccctgaagagcaacatcgtggagctgaagaagcagctgagcgagctgaagaagaagtgcggcgaggaccaggagaagatccacgccctgaccagcgagaacaccaacctgaagaagatgatgagcaaccagtacgtgcccgtgaagacccacgaggaggtgaagatgaccctgaacgacaccctggccaagaccaacagagagctgctggacgtgaagaagaagttcgaggacatcaaccaggagttcgtgaagatcaaggacaagaacgagatcctgaagagaaacctggagaacacccagaaccagatcaaggccgagtacatcagcctggccgagcacgaggccaagatgagcagcctgagccagagcatgagaaaggtgcaggacagcaacgccgagatcctggccaactacagaaagggccaggaggagatcgtgaccctgcacgccgagatcaaggcccagaagaaggagctggacaccatccaggagtgcatcaaggtgaagtacgcccccatcgtgagcttcgaggagtgcgagagaaagttcaaggccaccgagaaggagctgaaggaccagctgagcgagcagacccagaagtacagcgtgagcgaggaggaggtgaagaagaacaagcaggagaacgacaagctgaagaaggagatcttcaccctgcagaaggacctgagagacaagaccgtgctgatcgagaagagccacgagatggagagagccctgagcagaaagaccgacgagctgaacaagcagctgaaggacctgagccagaagtacaccgaggtgaagaacgtgaaggagaagctggtggaggagaacgccaagcagaccagcgagatcctggccgtgcagaacctgctgcagaagcagcacgtgcccctggagcaggtggaggccctgaagaagagcctgaacggcaccatcgagaacctgaaggaggagctgaagagcatgcagagatgctacgagaaggagcagcagaccgtgaccaagctgcaccagctgctggagaaccagaagaacagcagcgtgcccctggccgagcacctgcagatcaaggaggccttcgagaaggaggtgggcatcatcaaggccagcctgagagagaaggaggaggagagccagaacaagatggaggaggtgagcaagctgcagagcgaggtgcagaacaccaagcaggccctgaagaagctggagaccagagaggtggtggacctgagcaagtacaaggccaccaagagcgacctggagacccagatcagcagcctgaacgagaagctggccaacctgaacagaaagtacgaggaggtgtgcgaggaggtgctgcacgccaagaagaaggagatcagcgccaaggacgagaaggagctgctgcacttcagcatcgagcaggagatcaaggaccagaaggagagatgcgacaagagcctgaccaccatcaccgagctgcagagaagaatccaggagagcgccaagcagatcgaggccaaggacaacaagatcaccgagctgctgaacgacgtggagagactgaagcaggccctgaacggcctgagccagctgacctacaccagcggcaaccccaccaagagacagagccagctgatcgacaccctgcagcaccaggtgaagagcctggagcagcagctggccgacgccgacagacagcaccaggaggtgatcgccatctacagaacccacctgctgagcgccgcccagggccacatggacgaggacgtgcaggaggccctgctgcagatcatccagatgagacagggcctggtgtgctag

SEQ ID NO: 104852 - DNA, 3195 bp, synthetic construct
  misc_feature 1..3195: note = Description of Artificial Sequence: Synthetic coding sequence
  source 1..3195: mol_type = other DNA
atggtgctgggcaccgtgctgctgccccccaacagctacggcagagaccaggacaccagcctgtgctgcctgtgcaccgaggccagcgagagcgccctgcccgacctgaccgaccacttcgccagctgcgtggaggacggcttcgagggcgacaagaccggcggcagcagccccgaggccctgcacagaccctacggctgcgacgtggagccccaggccctgaacgaggccatcagatggagcagcaaggagaacctgctgggcgccaccgagagcgaccccaacctgttcgtggccctgtacgacttcgtggccagcggcgacaacaccctgagcatcaccaagggcgagaagctgagagtgctgggctacaaccagaacggcgagtggagcgaggtgagaagcaagaacggccagggctgggtgcccagcaactacatcacccccgtgaacagcctggagaagcacagctggtaccacggccccgtgagcagaagcgccgccgagtacctgctgagcagcctgatcaacggcagcttcctggtgagagagagcgagagcagccccggccagctgagcatcagcctgagatacgagggcagagtgtaccactacagaatcaacaccaccgccgacggcaaggtgtacgtgaccgccgagagcagattcagcaccctggccgagctggtgcaccaccacagcaccgtggccgacggcctggtgaccaccctgcactaccccgcccccaagtgcaacaagcccaccgtgtacggcgtgagccccatccacgacaagtgggagatggagagaaccgacatcaccatgaagcacaagctgggcggcggccagtacggcgaggtgtacgtgggcgtgtggaagaagtacagcctgaccgtggccgtgaagaccctgaaggaggacaccatggaggtggaggagttcctgaaggaggccgccgtgatgaaggagatcaagcaccccaacctggtgcagctgctgggcgtgtgcaccctggagccccccttctacatcgtgaccgagtacatgccctacggcaacctgctggactacctgagagagtgcaacagagaggaggtgaccgccgtggtgctgctgtacatggccacccagatcagcagcgccatggagtacctggagaagaagaacttcatccacagagacctggccgccagaaactgcctggtgggcgagaaccacgtggtgaaggtggccgacttcggcctgagcagactgatgaccggcgacacctacaccgcccacgccggcgccaagttccccatcaagtggaccgcccccgagagcctggcctacaacaccttcagcatcaagagcgacgtgtgggccttcggcgtgctgctgtgggagatcgccacctacggcatgagcccctaccccggcatcgacctgagccaggtgtacgacctgctggagaagggctacagaatggagcagcccgagggctgcccccccaaggtgtacgagctgatgagagcctgctggaagtggagccccgccgacagacccagcttcgccgagacccaccaggccttcgagaccatgttccacgacagcagcatcagcgaggaggtggccgaggagctgggcagagccgccagcagcagcagcgtggtgccctacctgcccagactgcccatcctgcccagcaagaccagaaccctgaagaagcaggtggagaacaaggagaacatcgagggcgcccaggacgccaccgagaacagcgccagcagcctggcccccggcttcatcagaggcgcccaggccagcagcggcagccccgccctgcccagaaagcagagagacaagagccccagcagcctgctggaggacgccaaggagacctgcttcaccagagacagaaagggcggcttcttcagcagcttcatgaagaagagaaacgcccccaccccccccaagagaagcagcagcttcagagagatggagaaccagccccacaagaagtacgagctgaccggcctgcccgagcaggacagaatggccatgaccctgcccagaaactgccagagaagcaagctgcagctggagagaaccgtgagcaccagcagccagcccgaggagaacgtggacagagccaacgacatgctgcccaagaagagcgaggagagcgccgcccccagcagagagagacccaaggccaagctgctgcccagaggcgccaccgccctgcccctgagaacccccagcggcgacctggccatcaccgagaaggacccccccggcgtgggcgtggccggcgtggccgccgcccccaagggcaaggagaagaacggcggcgccagactgggcatggccggcgtgcccgaggacggcgagcagcccggctggcccagccccgccaaggccgcccccgtgctgcccaccacccacaaccacaaggtgcccgtgctgatcagccccaccctgaagcacacccccgccgacgtgcagctgatcggcaccgacagccagggcaacaagttcaagctgctgagcgagcaccaggtgaccagcagcggcgacaaggacagacccagaagagtgaagcccaagtgcgcccccccccccccccccgtgatgagactgctgcagcaccccagcatctgcagcgaccccaccgaggagcccaccgccctgaccgccggccagagcaccagcgagacccaggagggcggcaagaaggccgccctgggcgccgtgcccatcagcggcaaggccggcagacccgtgatgccccccccccaggtgcccctgcccaccagcagcatcagccccgccaagatggccaacggcaccgccggcaccaaggtggccctgagaaagaccaagcaggccgccgagaagatcagcgccgacaagatcagcaaggaggccctgctggagtgcgccgacctgctgagcagcgccctgaccgagcccgtgcccaacagccagctggtggacaccggccaccagctgctggactactgcagcggctacgtggactgcatcccccagaccagaaacaagttcgccttcagagaggccgtgagcaagctggagctgagcctgcaggagctgcaggtgagcagcgccgccgccggcgtgcccggcaccaaccccgtgctgaacaacctgctgagctgcgtgcaggagatcagcgacgtggtgcagagatag

SEQ ID NO: 104853 - DNA, 1629 bp, synthetic construct
  misc_feature 1..1629: note = Description of Artificial Sequence: Synthetic coding sequence
  source 1..1629: mol_type = other DNA
atgggccagcaggtgggcagagtgggcgaggcccccggcctgcagcagccccagcccagaggcatcagaggcagcagcgccgccagacccagcggcagaagaagagaccccgccggcagaaccaccgagaccggcttcaacatcttcacccagcacgaggccctgcacagaccctacggctgcgacgtggagccccaggccctgaacgaggccatcagatggagcagcaaggagaacctgctgggcgccaccgagagcgaccccaacctgttcgtggccctgtacgacttcgtggccagcggcgacaacaccctgagcatcaccaagggcgagaagctgagagtgctgggctacaaccagaacggcgagtggagcgaggtgagaagcaagaacggccagggctgggtgcccagcaactacatcacccccgtgaacagcctggagaagcacagctggtaccacggccccgtgagcagaagcgccgccgagtacctgctgagcagcctgatcaacggcagcttcctggtgagagagagcgagagcagccccggccagctgagcatcagcctgagatacgagggcagagtgtaccactacagaatcaacaccaccgccgacggcaaggtgtacgtgaccgccgagagcagattcagcaccctggccgagctggtgcaccaccacagcaccgtggccgacggcctggtgaccaccctgcactaccccgcccccaagtgcaacaagcccaccgtgtacggcgtgagccccatccacgacaagtgggagatggagagaaccgacatcaccatgaagcacaagctgggcggcggccagtacggcgaggtgtacgtgggcgtgtggaagaagtacagcctgaccgtggccgtgaagaccctgaaggaggacaccatggaggtggaggagttcctgaaggaggccgccgtgatgaaggagatcaagcaccccaacctggtgcagctgctgggcgtgtgcaccctggagccccccttctacatcgtgaccgagtacatgccctacggcaacctgctggactacctgagagagtgcaacagagaggaggtgaccgccgtggtgctgctgtacatggccacccagatcagcagcgccatggagtacctggagaagaagaacttcatccacagagacctggccgccagaaactgcctggtgggcgagaaccacgtggtgaaggtggccgacttcggcctgagcagactgatgaccggcgacacctacaccgcccacgccggcgccaagttccccatcaagtggaccgcccccgagagcctggcctacaacaccttcagcatcaagagcgacgtgtgggccttcggcgtgctgctgtgggagatcgccacctacggcatgagcccctaccccggcatcgacctgagccaggtgtacgacctgctggagaagggctacagaatggagcagcccgagggctgcccccccaaggtgtacgagctgatgagagcctgctggaagtggagccccgccgacagacccagcttcgccgagacccaccaggccttcgagaccatgttccacgacagcagcatcagcgaggtgctgctgcactgcgccaaccagacctgcatcaccctgtag

SEQ ID NO: 104854 - DNA, 3441 bp, synthetic construct
  misc_feature 1..3441: note = Description of Artificial Sequence: Synthetic coding sequence
  source 1..3441: mol_type = other DNA
atggtgctgggcaccgtgctgctgccccccaacagctacggcagagaccaggacaccagcctgtgctgcctgtgcaccgaggccagcgagagcgccctgcccgacctgaccgaggccctgcacagaccctacggctgcgacgtggagccccaggccctgaacgaggccatcagatggagcagcaaggagaacctgctgggcgccaccgagagcgaccccaacctgttcgtggccctgtacgacttcgtggccagcggcgacaacaccctgagcatcaccaagggcgagaagctgagagtgctgggctacaaccagaacggcgagtggagcgaggtgagaagcaagaacggccagggctgggtgcccagcaactacatcacccccgtgaacagcctggagaagcacagctggtaccacggccccgtgagcagaagcgccgccgagtacctgctgagcagcctgatcaacggcagcttcctggtgagagagagcgagagcagccccggccagctgagcatcagcctgagatacgagggcagagtgtaccactacagaatcaacaccaccgccgacggcaaggtgtacgtgaccgccgagagcagattcagcaccctggccgagctggtgcaccaccacagcaccgtggccgacggcctggtgaccaccctgcactaccccgcccccaagtgcaacaagcccaccgtgtacggcgtgagccccatccacgacaagtgggagatggagagaaccgacatcaccatgaagcacaagctgggcggcggccagtacggcgaggtgtacgtgggcgtgtggaagaagtacagcctgaccgtggccgtgaagaccctgaaggaggacaccatggaggtggaggagttcctgaaggaggccgccgtgatgaaggagatcaagcaccccaacctggtgcagctgctgggcgtgtgcaccctggagccccccttctacatcgtgaccgagtacatgccctacggcaacctgctggactacctgagagagtgcaacagagaggaggtgaccgccgtggtgctgctgtacatggccacccagatcagcagcgccatggagtacctggagaagaagaacttcatccacagagacctggccgccagaaactgcctggtgggcgagaaccacgtggtgaaggtggccgacttcggcctgagcagactgatgaccggcgacacctacaccgcccacgccggcgccaagttccccatcaagtggaccgcccccgagagcctggcctacaacaccttcagcatcaagagcgacgtgtgggccttcggcgtgctgctgtgggagatcgccacctacggcatgagcccctaccccggcatcgacctgagccaggtgtacgacctgctggagaagggctacagaatggagcagcccgagggctgcccccccaaggtgtacgagctgatgagagcctgctggaagtggagccccgccgacagacccagcttcgccgagacccaccaggccttcgagaccatgttccacgacagcagcatcagcgaggaggtggccgaggagctgggcagagccgccagcagcagcagcgtggtgccctacctgcccagactgcccatcctgcccagcaagaccagaaccctgaagaagcaggtggagaacaaggagaacatcgagggcgcccaggacgccaccgagaacagcgccagcagcctggcccccggcttcatcagaggcgcccaggccagcagcggcagccccgccctgcccagaaagcagagagacaagagccccagcagcctgctggaggacgccaaggagacctgcttcaccagagacagaaagggcggcttcttcagcagcttcatgaagaagagaaacgcccccaccccccccaagagaagcagcagcttcagagagatggagaaccagccccacaagaagtacgagctgaccggcaacttcagcagcgtggccagcctgcagcacgccgacggcttcagcttcacccccgcccagcaggaggccaacctggtgccccccaagtgctacggcggcagcttcgcccagagaaacctgtgcaacgacgacggcggcggcggcggcggcagcggcaccgccggcggcggctggagcggcatcaccggcttcttcacccccagactgatcaagaagaccctgggcctgagagccggcaagcccaccgccagcgacgacaccagcaagcccttccccagaagcaacagcaccagcagcatgagcagcggcctgcccgagcaggacagaatggccatgaccctgcccagaaactgccagagaagcaagctgcagctggagagaaccgtgagcaccagcagccagcccgaggagaacgtggacagagccaacgacatgctgcccaagaagagcgaggagagcgccgcccccagcagagagagacccaaggccaagctgctgcccagaggcgccaccgccctgcccctgagaacccccagcggcgacctggccatcaccgagaaggacccccccggcgtgggcgtggccggcgtggccgccgcccccaagggcaaggagaagaacggcggcgccagactgggcatggccggcgtgcccgaggacggcgagcagcccggctggcccagccccgccaaggccgcccccgtgctgcccaccacccacaaccacaaggtgcccgtgctgatcagccccaccctgaagcacacccccgccgacgtgcagctgatcggcaccgacagccagggcaacaagttcaagctgctgagcgagcaccaggtgaccagcagcggcgacaaggacagacccagaagagtgaagcccaagtgcgcccccccccccccccccgtgatgagactgctgcagcaccccagcatctgcagcgaccccaccgaggagcccaccgccctgaccgccggccagagcaccagcgagacccaggagggcggcaagaaggccgccctgggcgccgtgcccatcagcggcaaggccggcagacccgtgatgccccccccccaggtgcccctgcccaccagcagcatcagccccgccaagatggccaacggcaccgccggcaccaaggtggccctgagaaagaccaagcaggccgccgagaagatcagcgccgacaagatcagcaaggaggccctgctggagtgcgccgacctgctgagcagcgccctgaccgagcccgtgcccaacagccagctggtggacaccggccaccagctgctggactactgcagcggctacgtggactgcatcccccagaccagaaacaagttcgccttcagagaggccgtgagcaagctggagctgagcctgcaggagctgcaggtgagcagcgccgccgccggcgtgcccggcaccaaccccgtgctgaacaacctgctgagctgcgtgcaggagatcagcgacgtggtgcagagatag

SEQ ID NO: 104855 - DNA, 3549 bp, synthetic construct
  misc_feature 1..3549: note = Description of Artificial Sequence: Synthetic coding sequence
  source 1..3549: mol_type = other DNA
atgggccagcaggtgggcagagtgggcgaggcccccggcctgcagcagccccagcccagaggcatcagaggcagcagcgccgccagacccagcggcagaagaagagaccccgccggcagaaccaccgagaccggcttcaacatcttcacccagcacgaccacttcgccagctgcgtggaggacggcttcgagggcgacaagaccggcggcagcagccccgaggccctgcacagaccctacggctgcgacgtggagccccaggccctgaacgaggccatcagatggagcagcaaggagaacctgctgggcgccaccgagagcgaccccaacctgttcgtggccctgtacgacttcgtggccagcggcgacaacaccctgagcatcaccaagggcgagaagctgagagtgctgggctacaaccagaacggcgagtggagcgaggtgagaagcaagaacggccagggctgggtgcccagcaactacatcacccccgtgaacagcctggagaagcacagctggtaccacggccccgtgagcagaagcgccgccgagtacctgctgagcagcctgatcaacggcagcttcctggtgagagagagcgagagcagccccggccagctgagcatcagcctgagatacgagggcagagtgtaccactacagaatcaacaccaccgccgacggcaaggtgtacgtgaccgccgagagcagattcagcaccctggccgagctggtgcaccaccacagcaccgtggccgacggcctggtgaccaccctgcactaccccgcccccaagtgcaacaagcccaccgtgtacggcgtgagccccatccacgacaagtgggagatggagagaaccgacatcaccatgaagcacaagctgggcggcggccagtacggcgaggtgtacgtgggcgtgtggaagaagtacagcctgaccgtggccgtgaagaccctgaaggaggacaccatggaggtggaggagttcctgaaggaggccgccgtgatgaaggagatcaagcaccccaacctggtgcagctgctgggcgtgtgcaccctggagccccccttctacatcgtgaccgagtacatgccctacggcaacctgctggactacctgagagagtgcaacagagaggaggtgaccgccgtggtgctgctgtacatggccacccagatcagcagcgccatggagtacctggagaagaagaacttcatccacagagacctggccgccagaaactgcctggtgggcgagaaccacgtggtgaaggtggccgacttcggcctgagcagactgatgaccggcgacacctacaccgcccacgccggcgccaagttccccatcaagtggaccgcccccgagagcctggcctacaacaccttcagcatcaagagcgacgtgtgggccttcggcgtgctgctgtgggagatcgccacctacggcatgagcccctaccccggcatcgacctgagccaggtgtacgacctgctggagaagggctacagaatggagcagcccgagggctgcccccccaaggtgtacgagctgatgagagcctgctggaagtggagccccgccgacagacccagcttcgccgagacccaccaggccttcgagaccatgttccacgacagcagcatcagcgaggaggtggccgaggagctgggcagagccgccagcagcagcagcgtggtgccctacctgcccagactgcccatcctgcccagcaagaccagaaccctgaagaagcaggtggagaacaaggagaacatcgagggcgcccaggacgccaccgagaacagcgccagcagcctggcccccggcttcatcagaggcgcccaggccagcagcggcagccccgccctgcccagaaagcagagagacaagagccccagcagcctgctggaggacgccaaggagacctgcttcaccagagacagaaagggcggcttcttcagcagcttcatgaagaagagaaacgcccccaccccccccaagagaagcagcagcttcagagagatggagaaccagccccacaagaagtacgagctgaccggcaacttcagcagcgtggccagcctgcagcacgccgacggcttcagcttcacccccgcccagcaggaggccaacctggtgccccccaagtgctacggcggcagcttcgcccagagaaacctgtgcaacgacgacggcggcggcggcggcggcagcggcaccgccggcggcggctggagcggcatcaccggcttcttcacccccagactgatcaagaagaccctgggcctgagagccggcaagcccaccgccagcgacgacaccagcaagcccttccccagaagcaacagcaccagcagcatgagcagcggcctgcccgagcaggacagaatggccatgaccctgcccagaaactgccagagaagcaagctgcagctggagagaaccgtgagcaccagcagccagcccgaggagaacgtggacagagccaacgacatgctgcccaagaagagcgaggagagcgccgcccccagcagagagagacccaaggccaagctgctgcccagaggcgccaccgccctgcccctgagaacccccagcggcgacctggccatcaccgagaaggacccccccggcgtgggcgtggccggcgtggccgccgcccccaagggcaaggagaagaacggcggcgccagactgggcatggccggcgtgcccgaggacggcgagcagcccggctggcccagccccgccaaggccgcccccgtgctgcccaccacccacaaccacaaggtgcccgtgctgatcagccccaccctgaagcacacccccgccgacgtgcagctgatcggcaccgacagccagggcaacaagttcaagctgctgagcgagcaccaggtgaccagcagcggcgacaaggacagacccagaagagtgaagcccaagtgcgcccccccccccccccccgtgatgagactgctgcagcaccccagcatctgcagcgaccccaccgaggagcccaccgccctgaccgccggccagagcaccagcgagacccaggagggcggcaagaaggccgccctgggcgccgtgcccatcagcggcaaggccggcagacccgtgatgccccccccccaggtgcccctgcccaccagcagcatcagccccgccaagatggccaacggcaccgccggcaccaaggtggccctgagaaagaccaagcaggccgccgagaagatcagcgccgacaagatcagcaaggaggccctgctggagtgcgccgacctgctgagcagcgccctgaccgagcccgtgcccaacagccagctggtggacaccggccaccagctgctggactactgcagcggctacgtggactgcatcccccagaccagaaacaagttcgccttcagagaggccgtgagcaagctggagctgagcctgcaggagctgcaggtgagcagcgccgccgccggcgtgcccggcaccaaccccgtgctgaacaacctgctgagctgcgtgcaggagatcagcgacgtggtgcagagatag

SEQ ID NO: 104856 - DNA, 3132 bp, synthetic construct
  misc_feature 1..3132: note = Description of Artificial Sequence: Synthetic coding sequence
  source 1..3132: mol_type = other DNA
atggtgctgggcaccgtgctgctgccccccaacagctacggcagagaccaggacaccagcctgtgctgcctgtgcaccgaggccagcgagagcgccctgcccgacctgaccgaggccctgcacagaccctacggctgcgacgtggagccccaggccctgaacgaggccatcagatggagcagcaaggagaacctgctgggcgccaccgagagcgaccccaacctgttcgtggccctgtacgacttcgtggccagcggcgacaacaccctgagcatcaccaagggcgagaagctgagagtgctgggctacaaccagaacggcgagtggagcgaggtgagaagcaagaacggccagggctgggtgcccagcaactacatcacccccgtgaacagcctggagaagcacagctggtaccacggccccgtgagcagaagcgccgccgagtacctgctgagcagcctgatcaacggcagcttcctggtgagagagagcgagagcagccccggccagctgagcatcagcctgagatacgagggcagagtgtaccactacagaatcaacaccaccgccgacggcaaggtgtacgtgaccgccgagagcagattcagcaccctggccgagctggtgcaccaccacagcaccgtggccgacggcctggtgaccaccctgcactaccccgcccccaagtgcaacaagcccaccgtgtacggcgtgagccccatccacgacaagtgggagatggagagaaccgacatcaccatgaagcacaagctgggcggcggccagtacggcgaggtgtacgtgggcgtgtggaagaagtacagcctgaccgtggccgtgaagaccctgaaggaggacaccatggaggtggaggagttcctgaaggaggccgccgtgatgaaggagatcaagcaccccaacctggtgcagctgctgggcgtgtgcaccctggagccccccttctacatcgtgaccgagtacatgccctacggcaacctgctggactacctgagagagtgcaacagagaggaggtgaccgccgtggtgctgctgtacatggccacccagatcagcagcgccatggagtacctggagaagaagaacttcatccacagagacctggccgccagaaactgcctggtgggcgagaaccacgtggtgaaggtggccgacttcggcctgagcagactgatgaccggcgacacctacaccgcccacgccggcgccaagttccccatcaagtggaccgcccccgagagcctggcctacaacaccttcagcatcaagagcgacgtgtgggccttcggcgtgctgctgtgggagatcgccacctacggcatgagcccctaccccggcatcgacctgagccaggtgtacgacctgctggagaagggctacagaatggagcagcccgagggctgcccccccaaggtgtacgagctgatgagagcctgctggaagtggagccccgccgacagacccagcttcgccgagacccaccaggccttcgagaccatgttccacgacagcagcatcagcgaggaggtggccgaggagctgggcagagccgccagcagcagcagcgtggtgccctacctgcccagactgcccatcctgcccagcaagaccagaaccctgaagaagcaggtggagaacaaggagaacatcgagggcgcccaggacgccaccgagaacagcgccagcagcctggcccccggcttcatcagaggcgcccaggccagcagcggcagccccgccctgcccagaaagcagagagacaagagccccagcagcctgctggaggacgccaaggagacctgcttcaccagagacagaaagggcggcttcttcagcagcttcatgaagaagagaaacgcccccaccccccccaagagaagcagcagcttcagagagatggagaaccagccccacaagaagtacgagctgaccggcctgcccgagcaggacagaatggccatgaccctgcccagaaactgccagagaagcaagctgcagctggagagaaccgtgagcaccagcagccagcccgaggagaacgtggacagagccaacgacatgctgcccaagaagagcgaggagagcgccgcccccagcagagagagacccaaggccaagctgctgcccagaggcgccaccgccctgcccctgagaacccccagcggcgacctggccatcaccgagaaggacccccccggcgtgggcgtggccggcgtggccgccgcccccaagggcaaggagaagaacggcggcgccagactgggcatggccggcgtgcccgaggacggcgagcagcccggctggcccagccccgccaaggccgcccccgtgctgcccaccacccacaaccacaaggtgcccgtgctgatcagccccaccctgaagcacacccccgccgacgtgcagctgatcggcaccgacagccagggcaacaagttcaagctgctgagcgagcaccaggtgaccagcagcggcgacaaggacagacccagaagagtgaagcccaagtgcgcccccccccccccccccgtgatgagactgctgcagcaccccagcatctgcagcgaccccaccgaggagcccaccgccctgaccgccggccagagcaccagcgagacccaggagggcggcaagaaggccgccctgggcgccgtgcccatcagcggcaaggccggcagacccgtgatgccccccccccaggtgcccctgcccaccagcagcatcagccccgccaagatggccaacggcaccgccggcaccaaggtggccctgagaaagaccaagcaggccgccgagaagatcagcgccgacaagatcagcaaggaggccctgctggagtgcgccgacctgctgagcagcgccctgaccgagcccgtgcccaacagccagctggtggacaccggccaccagctgctggactactgcagcggctacgtggactgcatcccccagaccagaaacaagttcgccttcagagaggccgtgagcaagctggagctgagcctgcaggagctgcaggtgagcagcgccgccgccggcgtgcccggcaccaaccccgtgctgaacaacctgctgagctgcgtgcaggagatcagcgacgtggtgcagagatag

SEQ ID NO: 104857 - DNA, 3504 bp, synthetic construct
  misc_feature 1..3504: note = Description of Artificial Sequence: Synthetic coding sequence
  source 1..3504: mol_type = other DNA
atggtgctgggcaccgtgctgctgccccccaacagctacggcagagaccaggacaccagcctgtgctgcctgtgcaccgaggccagcgagagcgccctgcccgacctgaccgaccacttcgccagctgcgtggaggacggcttcgagggcgacaagaccggcggcagcagccccgaggccctgcacagaccctacggctgcgacgtggagccccaggccctgaacgaggccatcagatggagcagcaaggagaacctgctgggcgccaccgagagcgaccccaacctgttcgtggccctgtacgacttcgtggccagcggcgacaacaccctgagcatcaccaagggcgagaagctgagagtgctgggctacaaccagaacggcgagtggagcgaggtgagaagcaagaacggccagggctgggtgcccagcaactacatcacccccgtgaacagcctggagaagcacagctggtaccacggccccgtgagcagaagcgccgccgagtacctgctgagcagcctgatcaacggcagcttcctggtgagagagagcgagagcagccccggccagctgagcatcagcctgagatacgagggcagagtgtaccactacagaatcaacaccaccgccgacggcaaggtgtacgtgaccgccgagagcagattcagcaccctggccgagctggtgcaccaccacagcaccgtggccgacggcctggtgaccaccctgcactaccccgcccccaagtgcaacaagcccaccgtgtacggcgtgagccccatccacgacaagtgggagatggagagaaccgacatcaccatgaagcacaagctgggcggcggccagtacggcgaggtgtacgtgggcgtgtggaagaagtacagcctgaccgtggccgtgaagaccctgaaggaggacaccatggaggtggaggagttcctgaaggaggccgccgtgatgaaggagatcaagcaccccaacctggtgcagctgctgggcgtgtgcaccctggagccccccttctacatcgtgaccgagtacatgccctacggcaacctgctggactacctgagagagtgcaacagagaggaggtgaccgccgtggtgctgctgtacatggccacccagatcagcagcgccatggagtacctggagaagaagaacttcatccacagagacctggccgccagaaactgcctggtgggcgagaaccacgtggtgaaggtggccgacttcggcctgagcagactgatgaccggcgacacctacaccgcccacgccggcgccaagttccccatcaagtggaccgcccccgagagcctggcctacaacaccttcagcatcaagagcgacgtgtgggccttcggcgtgctgctgtgggagatcgccacctacggcatgagcccctaccccggcatcgacctgagccaggtgtacgacctgctggagaagggctacagaatggagcagcccgagggctgcccccccaaggtgtacgagctgatgagagcctgctggaagtggagccccgccgacagacccagcttcgccgagacccaccaggccttcgagaccatgttccacgacagcagcatcagcgaggaggtggccgaggagctgggcagagccgccagcagcagcagcgtggtgccctacctgcccagactgcccatcctgcccagcaagaccagaaccctgaagaagcaggtggagaacaaggagaacatcgagggcgcccaggacgccaccgagaacagcgccagcagcctggcccccggcttcatcagaggcgcccaggccagcagcggcagccccgccctgcccagaaagcagagagacaagagccccagcagcctgctggaggacgccaaggagacctgcttcaccagagacagaaagggcggcttcttcagcagcttcatgaagaagagaaacgcccccaccccccccaagagaagcagcagcttcagagagatggagaaccagccccacaagaagtacgagctgaccggcaacttcagcagcgtggccagcctgcagcacgccgacggcttcagcttcacccccgcccagcaggaggccaacctggtgccccccaagtgctacggcggcagcttcgcccagagaaacctgtgcaacgacgacggcggcggcggcggcggcagcggcaccgccggcggcggctggagcggcatcaccggcttcttcacccccagactgatcaagaagaccctgggcctgagagccggcaagcccaccgccagcgacgacaccagcaagcccttccccagaagcaacagcaccagcagcatgagcagcggcctgcccgagcaggacagaatggccatgaccctgcccagaaactgccagagaagcaagctgcagctggagagaaccgtgagcaccagcagccagcccgaggagaacgtggacagagccaacgacatgctgcccaagaagagcgaggagagcgccgcccccagcagagagagacccaaggccaagctgctgcccagaggcgccaccgccctgcccctgagaacccccagcggcgacctggccatcaccgagaaggacccccccggcgtgggcgtggccggcgtggccgccgcccccaagggcaaggagaagaacggcggcgccagactgggcatggccggcgtgcccgaggacggcgagcagcccggctggcccagccccgccaaggccgcccccgtgctgcccaccacccacaaccacaaggtgcccgtgctgatcagccccaccctgaagcacacccccgccgacgtgcagctgatcggcaccgacagccagggcaacaagttcaagctgctgagcgagcaccaggtgaccagcagcggcgacaaggacagacccagaagagtgaagcccaagtgcgcccccccccccccccccgtgatgagactgctgcagcaccccagcatctgcagcgaccccaccgaggagcccaccgccctgaccgccggccagagcaccagcgagacccaggagggcggcaagaaggccgccctgggcgccgtgcccatcagcggcaaggccggcagacccgtgatgccccccccccaggtgcccctgcccaccagcagcatcagccccgccaagatggccaacggcaccgccggcaccaaggtggccctgagaaagaccaagcaggccgccgagaagatcagcgccgacaagatcagcaaggaggccctgctggagtgcgccgacctgctgagcagcgccctgaccgagcccgtgcccaacagccagctggtggacaccggccaccagctgctggactactgcagcggctacgtggactgcatcccccagaccagaaacaagttcgccttcagagaggccgtgagcaagctggagctgagcctgcaggagctgcaggtgagcagcgccgccgccggcgtgcccggcaccaaccccgtgctgaacaacctgctgagctgcgtgcaggagatcagcgacgtggtgcagagatag

SEQ ID NO: 104858 - DNA, 3486 bp, synthetic construct
  misc_feature 1..3486: note = Description of Artificial Sequence: Synthetic coding sequence
  source 1..3486: mol_type = other DNA
atgggccagcaggtgggcagagtgggcgaggcccccggcctgcagcagccccagcccagaggcatcagaggcagcagcgccgccagacccagcggcagaagaagagaccccgccggcagaaccaccgagaccggcttcaacatcttcacccagcacgaggccctgcacagaccctacggctgcgacgtggagccccaggccctgaacgaggccatcagatggagcagcaaggagaacctgctgggcgccaccgagagcgaccccaacctgttcgtggccctgtacgacttcgtggccagcggcgacaacaccctgagcatcaccaagggcgagaagctgagagtgctgggctacaaccagaacggcgagtggagcgaggtgagaagcaagaacggccagggctgggtgcccagcaactacatcacccccgtgaacagcctggagaagcacagctggtaccacggccccgtgagcagaagcgccgccgagtacctgctgagcagcctgatcaacggcagcttcctggtgagagagagcgagagcagccccggccagctgagcatcagcctgagatacgagggcagagtgtaccactacagaatcaacaccaccgccgacggcaaggtgtacgtgaccgccgagagcagattcagcaccctggccgagctggtgcaccaccacagcaccgtggccgacggcctggtgaccaccctgcactaccccgcccccaagtgcaacaagcccaccgtgtacggcgtgagccccatccacgacaagtgggagatggagagaaccgacatcaccatgaagcacaagctgggcggcggccagtacggcgaggtgtacgtgggcgtgtggaagaagtacagcctgaccgtggccgtgaagaccctgaaggaggacaccatggaggtggaggagttcctgaaggaggccgccgtgatgaaggagatcaagcaccccaacctggtgcagctgctgggcgtgtgcaccctggagccccccttctacatcgtgaccgagtacatgccctacggcaacctgctggactacctgagagagtgcaacagagaggaggtgaccgccgtggtgctgctgtacatggccacccagatcagcagcgccatggagtacctggagaagaagaacttcatccacagagacctggccgccagaaactgcctggtgggcgagaaccacgtggtgaaggtggccgacttcggcctgagcagactgatgaccggcgacacctacaccgcccacgccggcgccaagttccccatcaagtggaccgcccccgagagcctggcctacaacaccttcagcatcaagagcgacgtgtgggccttcggcgtgctgctgtgggagatcgccacctacggcatgagcccctaccccggcatcgacctgagccaggtgtacgacctgctggagaagggctacagaatggagcagcccgagggctgcccccccaaggtgtacgagctgatgagagcctgctggaagtggagccccgccgacagacccagcttcgccgagacccaccaggccttcgagaccatgttccacgacagcagcatcagcgaggaggtggccgaggagctgggcagagccgccagcagcagcagcgtggtgccctacctgcccagactgcccatcctgcccagcaagaccagaaccctgaagaagcaggtggagaacaaggagaacatcgagggcgcccaggacgccaccgagaacagcgccagcagcctggcccccggcttcatcagaggcgcccaggccagcagcggcagccccgccctgcccagaaagcagagagacaagagccccagcagcctgctggaggacgccaaggagacctgcttcaccagagacagaaagggcggcttcttcagcagcttcatgaagaagagaaacgcccccaccccccccaagagaagcagcagcttcagagagatggagaaccagccccacaagaagtacgagctgaccggcaacttcagcagcgtggccagcctgcagcacgccgacggcttcagcttcacccccgcccagcaggaggccaacctggtgccccccaagtgctacggcggcagcttcgcccagagaaacctgtgcaacgacgacggcggcggcggcggcggcagcggcaccgccggcggcggctggagcggcatcaccggcttcttcacccccagactgatcaagaagaccctgggcctgagagccggcaagcccaccgccagcgacgacaccagcaagcccttccccagaagcaacagcaccagcagcatgagcagcggcctgcccgagcaggacagaatggccatgaccctgcccagaaactgccagagaagcaagctgcagctggagagaaccgtgagcaccagcagccagcccgaggagaacgtggacagagccaacgacatgctgcccaagaagagcgaggagagcgccgcccccagcagagagagacccaaggccaagctgctgcccagaggcgccaccgccctgcccctgagaacccccagcggcgacctggccatcaccgagaaggacccccccggcgtgggcgtggccggcgtggccgccgcccccaagggcaaggagaagaacggcggcgccagactgggcatggccggcgtgcccgaggacggcgagcagcccggctggcccagccccgccaaggccgcccccgtgctgcccaccacccacaaccacaaggtgcccgtgctgatcagccccaccctgaagcacacccccgccgacgtgcagctgatcggcaccgacagccagggcaacaagttcaagctgctgagcgagcaccaggtgaccagcagcggcgacaaggacagacccagaagagtgaagcccaagtgcgcccccccccccccccccgtgatgagactgctgcagcaccccagcatctgcagcgaccccaccgaggagcccaccgccctgaccgccggccagagcaccagcgagacccaggagggcggcaagaaggccgccctgggcgccgtgcccatcagcggcaaggccggcagacccgtgatgccccccccccaggtgcccctgcccaccagcagcatcagccccgccaagatggccaacggcaccgccggcaccaaggtggccctgagaaagaccaagcaggccgccgagaagatcagcgccgacaagatcagcaaggaggccctgctggagtgcgccgacctgctgagcagcgccctgaccgagcccgtgcccaacagccagctggtggacaccggccaccagctgctggactactgcagcggctacgtggactgcatcccccagaccagaaacaagttcgccttcagagaggccgtgagcaagctggagctgagcctgcaggagctgcaggtgagcagcgccgccgccggcgtgcccggcaccaaccccgtgctgaacaacctgctgagctgcgtgcaggagatcagcgacgtggtgcagagatag

SEQ ID NO: 104859 - DNA, 3177 bp, synthetic construct
  misc_feature 1..3177: note = Description of Artificial Sequence: Synthetic coding sequence
  source 1..3177: mol_type = other DNA
atgggccagcaggtgggcagagtgggcgaggcccccggcctgcagcagccccagcccagaggcatcagaggcagcagcgccgccagacccagcggcagaagaagagaccccgccggcagaaccaccgagaccggcttcaacatcttcacccagcacgaggccctgcacagaccctacggctgcgacgtggagccccaggccctgaacgaggccatcagatggagcagcaaggagaacctgctgggcgccaccgagagcgaccccaacctgttcgtggccctgtacgacttcgtggccagcggcgacaacaccctgagcatcaccaagggcgagaagctgagagtgctgggctacaaccagaacggcgagtggagcgaggtgagaagcaagaacggccagggctgggtgcccagcaactacatcacccccgtgaacagcctggagaagcacagctggtaccacggccccgtgagcagaagcgccgccgagtacctgctgagcagcctgatcaacggcagcttcctggtgagagagagcgagagcagccccggccagctgagcatcagcctgagatacgagggcagagtgtaccactacagaatcaacaccaccgccgacggcaaggtgtacgtgaccgccgagagcagattcagcaccctggccgagctggtgcaccaccacagcaccgtggccgacggcctggtgaccaccctgcactaccccgcccccaagtgcaacaagcccaccgtgtacggcgtgagccccatccacgacaagtgggagatggagagaaccgacatcaccatgaagcacaagctgggcggcggccagtacggcgaggtgtacgtgggcgtgtggaagaagtacagcctgaccgtggccgtgaagaccctgaaggaggacaccatggaggtggaggagttcctgaaggaggccgccgtgatgaaggagatcaagcaccccaacctggtgcagctgctgggcgtgtgcaccctggagccccccttctacatcgtgaccgagtacatgccctacggcaacctgctggactacctgagagagtgcaacagagaggaggtgaccgccgtggtgctgctgtacatggccacccagatcagcagcgccatggagtacctggagaagaagaacttcatccacagagacctggccgccagaaactgcctggtgggcgagaaccacgtggtgaaggtggccgacttcggcctgagcagactgatgaccggcgacacctacaccgcccacgccggcgccaagttccccatcaagtggaccgcccccgagagcctggcctacaacaccttcagcatcaagagcgacgtgtgggccttcggcgtgctgctgtgggagatcgccacctacggcatgagcccctaccccggcatcgacctgagccaggtgtacgacctgctggagaagggctacagaatggagcagcccgagggctgcccccccaaggtgtacgagctgatgagagcctgctggaagtggagccccgccgacagacccagcttcgccgagacccaccaggccttcgagaccatgttccacgacagcagcatcagcgaggaggtggccgaggagctgggcagagccgccagcagcagcagcgtggtgccctacctgcccagactgcccatcctgcccagcaagaccagaaccctgaagaagcaggtggagaacaaggagaacatcgagggcgcccaggacgccaccgagaacagcgccagcagcctggcccccggcttcatcagaggcgcccaggccagcagcggcagccccgccctgcccagaaagcagagagacaagagccccagcagcctgctggaggacgccaaggagacctgcttcaccagagacagaaagggcggcttcttcagcagcttcatgaagaagagaaacgcccccaccccccccaagagaagcagcagcttcagagagatggagaaccagccccacaagaagtacgagctgaccggcctgcccgagcaggacagaatggccatgaccctgcccagaaactgccagagaagcaagctgcagctggagagaaccgtgagcaccagcagccagcccgaggagaacgtggacagagccaacgacatgctgcccaagaagagcgaggagagcgccgcccccagcagagagagacccaaggccaagctgctgcccagaggcgccaccgccctgcccctgagaacccccagcggcgacctggccatcaccgagaaggacccccccggcgtgggcgtggccggcgtggccgccgcccccaagggcaaggagaagaacggcggcgccagactgggcatggccggcgtgcccgaggacggcgagcagcccggctggcccagccccgccaaggccgcccccgtgctgcccaccacccacaaccacaaggtgcccgtgctgatcagccccaccctgaagcacacccccgccgacgtgcagctgatcggcaccgacagccagggcaacaagttcaagctgctgagcgagcaccaggtgaccagcagcggcgacaaggacagacccagaagagtgaagcccaagtgcgcccccccccccccccccgtgatgagactgctgcagcaccccagcatctgcagcgaccccaccgaggagcccaccgccctgaccgccggccagagcaccagcgagacccaggagggcggcaagaaggccgccctgggcgccgtgcccatcagcggcaaggccggcagacccgtgatgccccccccccaggtgcccctgcccaccagcagcatcagccccgccaagatggccaacggcaccgccggcaccaaggtggccctgagaaagaccaagcaggccgccgagaagatcagcgccgacaagatcagcaaggaggccctgctggagtgcgccgacctgctgagcagcgccctgaccgagcccgtgcccaacagccagctggtggacaccggccaccagctgctggactactgcagcggctacgtggactgcatcccccagaccagaaacaagttcgccttcagagaggccgtgagcaagctggagctgagcctgcaggagctgcaggtgagcagcgccgccgccggcgtgcccggcaccaaccccgtgctgaacaacctgctgagctgcgtgcaggagatcagcgacgtggtgcagagatag

SEQ ID NO: 104860 - DNA, 3240 bp, synthetic construct
  misc_feature 1..3240: note = Description of Artificial Sequence: Synthetic coding sequence
  source 1..3240: mol_type = other DNA
atgggccagcaggtgggcagagtgggcgaggcccccggcctgcagcagccccagcccagaggcatcagaggcagcagcgccgccagacccagcggcagaagaagagaccccgccggcagaaccaccgagaccggcttcaacatcttcacccagcacgaccacttcgccagctgcgtggaggacggcttcgagggcgacaagaccggcggcagcagccccgaggccctgcacagaccctacggctgcgacgtggagccccaggccctgaacgaggccatcagatggagcagcaaggagaacctgctgggcgccaccgagagcgaccccaacctgttcgtggccctgtacgacttcgtggccagcggcgacaacaccctgagcatcaccaagggcgagaagctgagagtgctgggctacaaccagaacggcgagtggagcgaggtgagaagcaagaacggccagggctgggtgcccagcaactacatcacccccgtgaacagcctggagaagcacagctggtaccacggccccgtgagcagaagcgccgccgagtacctgctgagcagcctgatcaacggcagcttcctggtgagagagagcgagagcagccccggccagctgagcatcagcctgagatacgagggcagagtgtaccactacagaatcaacaccaccgccgacggcaaggtgtacgtgaccgccgagagcagattcagcaccctggccgagctggtgcaccaccacagcaccgtggccgacggcctggtgaccaccctgcactaccccgcccccaagtgcaacaagcccaccgtgtacggcgtgagccccatccacgacaagtgggagatggagagaaccgacatcaccatgaagcacaagctgggcggcggccagtacggcgaggtgtacgtgggcgtgtggaagaagtacagcctgaccgtggccgtgaagaccctgaaggaggacaccatggaggtggaggagttcctgaaggaggccgccgtgatgaaggagatcaagcaccccaacctggtgcagctgctgggcgtgtgcaccctggagccccccttctacatcgtgaccgagtacatgccctacggcaacctgctggactacctgagagagtgcaacagagaggaggtgaccgccgtggtgctgctgtacatggccacccagatcagcagcgccatggagtacctggagaagaagaacttcatccacagagacctggccgccagaaactgcctggtgggcgagaaccacgtggtgaaggtggccgacttcggcctgagcagactgatgaccggcgacacctacaccgcccacgccggcgccaagttccccatcaagtggaccgcccccgagagcctggcctacaacaccttcagcatcaagagcgacgtgtgggccttcggcgtgctgctgtgggagatcgccacctacggcatgagcccctaccccggcatcgacctgagccaggtgtacgacctgctggagaagggctacagaatggagcagcccgagggctgcccccccaaggtgtacgagctgatgagagcctgctggaagtggagccccgccgacagacccagcttcgccgagacccaccaggccttcgagaccatgttccacgacagcagcatcagcgaggaggtggccgaggagctgggcagagccgccagcagcagcagcgtggtgccctacctgcccagactgcccatcctgcccagcaagaccagaaccctgaagaagcaggtggagaacaaggagaacatcgagggcgcccaggacgccaccgagaacagcgccagcagcctggcccccggcttcatcagaggcgcccaggccagcagcggcagccccgccctgcccagaaagcagagagacaagagccccagcagcctgctggaggacgccaaggagacctgcttcaccagagacagaaagggcggcttcttcagcagcttcatgaagaagagaaacgcccccaccccccccaagagaagcagcagcttcagagagatggagaaccagccccacaagaagtacgagctgaccggcctgcccgagcaggacagaatggccatgaccctgcccagaaactgccagagaagcaagctgcagctggagagaaccgtgagcaccagcagccagcccgaggagaacgtggacagagccaacgacatgctgcccaagaagagcgaggagagcgccgcccccagcagagagagacccaaggccaagctgctgcccagaggcgccaccgccctgcccctgagaacccccagcggcgacctggccatcaccgagaaggacccccccggcgtgggcgtggccggcgtggccgccgcccccaagggcaaggagaagaacggcggcgccagactgggcatggccggcgtgcccgaggacggcgagcagcccggctggcccagccccgccaaggccgcccccgtgctgcccaccacccacaaccacaaggtgcccgtgctgatcagccccaccctgaagcacacccccgccgacgtgcagctgatcggcaccgacagccagggcaacaagttcaagctgctgagcgagcaccaggtgaccagcagcggcgacaaggacagacccagaagagtgaagcccaagtgcgcccccccccccccccccgtgatgagactgctgcagcaccccagcatctgcagcgaccccaccgaggagcccaccgccctgaccgccggccagagcaccagcgagacccaggagggcggcaagaaggccgccctgggcgccgtgcccatcagcggcaaggccggcagacccgtgatgccccccccccaggtgcccctgcccaccagcagcatcagccccgccaagatggccaacggcaccgccggcaccaaggtggccctgagaaagaccaagcaggccgccgagaagatcagcgccgacaagatcagcaaggaggccctgctggagtgcgccgacctgctgagcagcgccctgaccgagcccgtgcccaacagccagctggtggacaccggccaccagctgctggactactgcagcggctacgtggactgcatcccccagaccagaaacaagttcgccttcagagaggccgtgagcaagctggagctgagcctgcaggagctgcaggtgagcagcgccgccgccggcgtgcccggcaccaaccccgtgctgaacaacctgctgagctgcgtgcaggagatcagcgacgtggtgcagagatag

SEQ ID NO: 104861 - DNA, 2349 bp, synthetic construct
  misc_feature 1..2349: note = Description of Artificial Sequence: Synthetic coding sequence
  source 1..2349: mol_type = other DNA
atgaaccccgagaaggacttcgcccccctgacccccaacatcgtgagagccctgaacgacaagctgtacgagaagagaaaggtggccgccctggagatcgagaagctggtgagagagttcgtggcccagaacaacaccgtgcagatcaagcacgtgatccagaccctgagccaggagttcgccctgagccagcacccccacagcagaaagggcggcctgatcggcctggccgcctgcagcatcgccctgggcaaggacagcggcctgtacctgaaggagctgatcgagcccgtgctgacctgcttcaacgacgccgacagcagactgagatactacgcctgcgaggccctgtacaacatcgtgaaggtggccagaggcgccgtgctgccccacttcaacgtgctgttcgacggcctgagcaagctggccgccgaccccgaccccaacgtgaagagcggcagcgagctgctggacagactgctgaaggacatcgtgaccgagagcaacaagttcgacctggtgagcttcatccccctgctgagagagagaatctacagcaacaaccagtacgccagacagttcatcatcagctggatcctggtgctggagagcgtgcccgacatcaacctgctggactacctgcccgagatcctggacggcctgttccagatcctgggcgacaacggcaaggagatcagaaagatgtgcgaggtggtgctgggcgagttcctgaaggagatcaagaagaaccccagcagcgtgaagttcgccgagatggccaacatcctggtgatccactgccagaccaccgacgacctgatccagctgaccgccatgtgctggatgagagagttcatccagctggccggcagagtgatgctgccctacagcagcggcatcctgaccgccgtgctgccctgcctggcctacgacgacagaaagaagagcatcaaggaggtggccaacgtgtgcaaccagagcctgatgaagctggtgacccccgaggacgacgagctggacgagctgagacccggccagagacaggccgagcccacccccgacgacgccctgcccaagcaggagggcaccgccagcggcggccccgacggcagctgcgacagcagcttcagcagcggcatcagcgtgttcaccgccgccagcaccgagagagcccccgtgaccctgcacctggacggcatcgtgcaggtgctgaactgccacctgagcgacaccgccatcggcatgatgaccagaatcgccgtgctgaagtggctgtaccacctgtacatcaagacccccagaaagatgttcagacacaccgacagcctgttccccatcctgctgcagaccctgagcgacgagagcgacgaggtgatcctgaaggacctggaggtgctggccgagatcgccagcagccccgccggccagaccgacgaccccggccccctggacggccccgacctgcaggccagccacagcgagctgcaggtgcccacccccggcagagccggcctgctgaacaccagcggcaccaagggcctggagtgcagccccagcacccccaccatgaacagctacttctacaagttcatgatcaacctgctgaagagattcagcagcgagagaaagctgctggaggtgagaggccccttcatcatcagacagctgtgcctgctgctgaacgccgagaacatcttccacagcatggccgacatcctgctgagagaggaggacctgaagttcgccagcaccatggtgcacgccctgaacaccatcctgctgaccagcaccgagctgttccagctgagaaaccagctgaaggacctgaagaccctggagagccagaacctgttctgctgcctgtacagaagctggtgccacaaccccgtgaccaccgtgagcctgtgcttcctgacccagaactacagacacgcctacgacctgatccagaagttcggcgacctggaggtgaccgtggacttcctggccgaggtggacaagctggtgcagctgatcgagtgccccatcttcacctacctgagactgcagctgctggacgtgaagaacaacccctacctgatcaaggccctgtacggcctgctgatgctgctgccccagagcagcgccttccagctgctgagccacagactgcagtgcgtgcccaaccccgagctgctgcagaccgaggacagcctgaaggccgcccccaagagccagaaggccgacagccccagcatcgactacgccgagctgctgcagcacttcgagaaggtgcagaacaagcacctggaggtgagacaccagagaagcggcagaggcgaccacctggacagaagagtggtgctgtag

SEQ ID NO: 104862 - DNA, 645 bp, synthetic construct
  misc_feature 1..645: note = Description of Artificial Sequence: Synthetic coding sequence
  source 1..645: mol_type = other DNA
atggccgacatcctgctgagagaggaggacctgaagttcgccagcaccatggtgcacgccctgaacaccatcctgctgaccagcaccgagctgttccagctgagaaaccagctgaaggacctgaagaccctggagagccagaacctgttctgctgcctgtacagaagctggtgccacaaccccgtgaccaccgtgagcctgtgcttcctgacccagaactacagacacgcctacgacctgatccagaagttcggcgacctggaggtgaccgtggacttcctggccgaggtggacaagctggtgcagctgatcgagtgccccatcttcacctacctgagactgcagctgctggacgtgaagaacaacccctacctgatcaaggccctgtacggcctgctgatgctgctgccccagagcagcgccttccagctgctgagccacagactgcagtgcgtgcccaaccccgagctgctgcagaccgaggacagcctgaaggccgcccccaagagccagaaggccgacagccccagcatcgactacgccgagctgctgcagcacttcgagaaggtgcagaacaagcacctggaggtgagacaccagagaagcggcagaggcgaccacctggacagaagagtggtgctgtag

SEQ ID NO: 104863 - DNA, 1062 bp, synthetic construct
  misc_feature 1..1062: note = Description of Artificial Sequence: Synthetic coding sequence
  source 1..1062: mol_type = other DNA
atggccagcagctggccccccctggagctgcagagcagcaaccagagccagctgttcccccagaacgccaccgcctgcgacaacgcccccgaggcctgggacctgctgcacagagtgctgcccaccttcatcatcagcatctgcttcttcggcctgctgggcaacctgttcgtgctgctggtgttcctgctgcccagaagacagctgaacgtggccgagatctacctggccaacctggccgccagcgacctggtgttcgtgctgggcctgcccttctgggccgagaacatctggaaccagttcaactggcccttcggcgccctgctgtgcagagtgatcaacggcgtgatcaaggccaacctgttcatcagcatcttcctggtggtggccatcagccaggacagatacagagtgctggtgcaccccatggccagcagaagacagcagagaagaagacaggccagagtgacctgcgtgctgatctgggtggtgggcggcctgctgagcatccccaccttcctgctgagaagcatccaggccgtgcccgacctgaacatcaccgcctgcatcctgctgctgccccacgaggcctggcacttcgccagaatcgtggagctgaacatcctgggcttcctgctgcccctggccgccatcgtgttcttcaactaccacatcctggccagcctgagaaccagagaggaggtgagcagaaccagatgcggcggcagaaaggacagcaagaccaccgccctgatcctgaccctggtggtggccttcctggtgtgctgggccccctaccacttcttcgccttcctggagttcctgttccaggtgcaggccgtgagaggctgcttctgggaggacttcatcgacctgggcctgcagctggccaacttcttcgccttcaccaacagcagcctgaaccccgtgatctacgtgttcgtgggcagactgttcagaaccaaggtgtgggagctgtacaagcagtgcacccccaagagcctggcccccatcagcagcagccacagaaaggagatcttccagctgttctggagaaactag

SEQ ID NO: 104864 - DNA, 1527 bp, synthetic construct
  misc_feature 1..1527: note = Description of Artificial Sequence: Synthetic coding sequence
  source 1..1527: mol_type = other DNA
atgccccccaagagaaacgagaagtacaagctgcccatccccttccccgagggcaaggtgctggacgacatggagggcaaccagtgggtgctgggcaagaagatcggcagcggcggcttcggcctgatctacctggccttccccaccaacaagcccgagaaggacgccagacacgtggtgaaggtggagtaccaggagaacggccccctgttcagcgagctgaagttctaccagagagtggccaagaaggactgcatcaagaagtggatcgagagaaagcagctggactacctgggcatccccctgttctacggcagcggcctgaccgagttcaagggcagaagctacagattcatggtgatggagagactgggcatcgacctgcagaagatcagcggccagaacggcaccttcaagaagagcaccgtgctgcagctgggcatcagaatgctggacgtgctggagtacatccacgagaacgagtacgtgcacggcgacatcaaggccgccaacctgctgctgggctacaagaaccccgaccaggtgtacctggccgactacggcctgagctacagatactgccccaacggcaaccacaagcagtaccaggagaaccccagaaagggccacaacggcaccatcgagttcaccagcctggacgcccacaagggcgtggccctgagcagaagaagcgacgtggagatcctgggctactgcatgctgagatggctgtgcggcaagctgccctgggagcagaacctgaaggaccccgtggccgtgcagaccgccaagaccaacctgctggacgagctgccccagagcgtgctgaagtgggcccccagcggcagcagctgctgcgagatcgcccagttcctggtgtgcgcccacagcctggcctacgacgagaagcccaactaccaggccctgaagaagatcctgaacccccacggcatccccctgggccccctggacttcagcaccaagggccagagcatcaacgtgcacacccccaacagccagaaggtggacagccagaaggccgccaccaagcaggtgaacaaggcccacaacagactgatcgagaagaaggtgcacagcgagagaagcgccgagagctgcgccacctggaaggtgcagaaggaggagaagctgatcggcctgatgaacaacgaggccgcccaggagagcaccagaagaagacagaagtaccaggagagccaggagcccctgaacgaggtgaacagcttcccccagaagatcagctacacccagttccccaacagcttctacgagccccaccaggacttcaccagccccgacatcttcaagaagagcagaagccccagctggtacaagtacaccagcaccgtgagcaccggcatcaccgacctggagagcagcaccggcctgtggcccaccatcagccagttcaccctgagcgaggagaccaacgccgacgtgtactactacagaatcatcatccccgtgctgctgatgctggtgttcctggccctgttcttcctgtag

SEQ ID NO: 104865 - DNA, 1203 bp, synthetic construct
  misc_feature 1..1203: note = Description of Artificial Sequence: Synthetic coding sequence
  source 1..1203: mol_type = other DNA
atgccccccaagagaaacgagaagtacaagctgcccatccccttccccgagggcaaggtgctggacgacatggagggcaaccagtgggtgctgggcaagaagatcggcagcggcggcttcggcctgatctacctggccttccccaccaacaagcccgagaaggacgccagacacgtggtgaaggtggagtaccaggagaacggccccctgttcagcgagctgaagttctaccagagagtggccaagaaggactgcatcaagaagtggatcgagagaaagcagctggactacctgggcatccccctgttctacggcagcggcctgaccgagttcaagggcagaagctacagattcatggtgatggagagactgggcatcgacctgcagaagatcagcggccagaacggcaccttcaagaagagcaccgtgctgcagctgggcatcagaatgctggacgtgctggagtacatccacgagaacgagtacgtgcacggcgacatcaaggccgccaacctgctgctgggctacaagaaccccgaccaggtgtacctggccgactacggcctgagctacagatactgccccaacggcaaccacaagcagtaccaggagaaccccagaaagggccacaacggcaccatcgagttcaccagcctggacgcccacaagggcgtggccctgagcagaagaagcgacgtggagatcctgggctactgcatgctgagatggctgtgcggcaagctgccctgggagcagaacctgaaggaccccgtggccgtgcagaccgccaagaccaacctgctggacgagctgccccagagcgtgctgaagtgggcccccagcggcagcagctgctgcgagatcgcccagttcctggtgtgcgcccacagcctggcctacgacgagaagcccaactaccaggccctgaagaagatcctgaacccccacggcatccccctgggccccctggacttcagcaccaagggccagagcatcaacgtgcacacccccaacagccagaaggtggacagccagaaggccgccaccaagcaggtgaacaaggcccacaacagactgatcgagaagaaggtgcacagcgagagaagcgccgagagctgcgccacctggaaggtgcagaaggaggagaagctgatcggcctgatgaacaacgaggccgcccagatcagacagctgggctactag

SEQ ID NO: 104866 - DNA, 1191 bp, synthetic construct
  misc_feature 1..1191: note = Description of Artificial Sequence: Synthetic coding sequence
  source 1..1191: mol_type = other DNA
atgccccccaagagaaacgagaagtacaagctgcccatccccttccccgagggcaaggtgctggacgacatggagggcaaccagtgggtgctgggcaagaagatcggcagcggcggcttcggcctgatctacctggccttccccaccaacaagcccgagaaggacgccagacacgtggtgaaggtggagtaccaggagaacggccccctgttcagcgagctgaagttctaccagagagtggccaagaaggactgcatcaagaagtggatcgagagaaagcagctggactacctgggcatccccctgttctacggcagcggcctgaccgagttcaagggcagaagctacagattcatggtgatggagagactgggcatcgacctgcagaagatcagcggccagaacggcaccttcaagaagagcaccgtgctgcagctgggcatcagaatgctggacgtgctggagtacatccacgagaacgagtacgtgcacggcgacatcaaggccgccaacctgctgctgggctacaagaaccccgaccaggtgtacctggccgactacggcctgagctacagatactgccccaacggcaaccacaagcagtaccaggagaaccccagaaagggccacaacggcaccatcgagttcaccagcctggacgcccacaagggcgtggccctgagcagaagaagcgacgtggagatcctgggctactgcatgctgagatggctgtgcggcaagctgccctgggagcagaacctgaaggaccccgtggccgtgcagaccgccaagaccaacctgctggacgagctgccccagagcgtgctgaagtgggcccccagcggcagcagctgctgcgagatcgcccagttcctggtgtgcgcccacagcctggcctacgacgagaagcccaactaccaggccctgaagaagatcctgaacccccacggcatccccctgggccccctggacttcagcaccaagggccagagcatcaacgtgcacacccccaacagccagaaggtggacagccagaaggccgccaccaagcaggtgaacaaggcccacaacagactgatcgagaagaaggtgcacagcgagagaagcgccgagagctgcgccacctggaaggtgcagaaggaggagaagctgatcggcctgatgaacaacgaggccgcccagttcagatag

SEQ ID NO: 104867 - DNA, 876 bp, synthetic construct
  misc_feature 1..876: note = Description of Artificial Sequence: Synthetic coding sequence
  source 1..876: mol_type = other DNA
atgccccccaagagaaacgagaagtacaagctgcccatccccttccccgagggcaaggtgctggacgacatggagggcaaccagtgggtgctgggcaagaagatcggcagcggcggcttcggcctgatctacctggccttccccaccaacaagcccgagaaggacgccagacacgtggtgaaggtggagtaccaggagaacggccccctgttcagcgagctgaagttctaccagagagtggccaagaaggactgcatcgtgttcgtggtgaagaagtggatcgagagaaagcagctggactacctgggcatccccctgttctacggcagcggcctgaccgagttcaagggcagaagctacagattcatggtgatggagagactgggcatcgacctgcagaagatcagcggccagaacggcaccttcaagaagagcaccgtgctgcagctgggcatcagaatgctggacgtgctggagtacatccacgagaacgagtacgtgcacggcgacatcaaggccgccaacctgctgctgggctacaagaaccccgaccaggtgtacctggccgactacggcctgagctacagatactgccccaacggcaaccacaagcagtaccaggagaaccccagaaagggccacaacggcaccatcgagttcaccagcctggacgcccacaagggcgtggccctgagcagaagaagcgacgtggagatcctgggctactgcatgctgagatggctgtgcggcaagctgccctgggagcagaacctgaaggaccccgtggccgtgcagaccgccaagaccaagtacaagttcagcagcatcagcagctgcaccgcccccggcctgaagggctacatcaagggcagctag

SEQ ID NO: 104868 - DNA, 1527 bp, synthetic construct; identical to SEQ ID NO: 104864
  misc_feature 1..1527: note = Description of Artificial Sequence: Synthetic coding sequence
  source 1..1527: mol_type = other DNA

SEQ ID NO: 104869 - DNA, 1458 bp, synthetic construct
  misc_feature 1..1458: note = Description of Artificial Sequence: Synthetic coding sequence
  source 1..1458: mol_type = other DNA
atggagggcaaccagtgggtgctgggcaagaagatcggcagcggcggcttcggcctgatctacctggccttccccaccaacaagcccgagaaggacgccagacacgtggtgaaggtggagtaccaggagaacggccccctgttcagcgagctgaagttctaccagagagtggccaagaaggactgcatcaagaagtggatcgagagaaagcagctggactacctgggcatccccctgttctacggcagcggcctgaccgagttcaagggcagaagctacagattcatggtgatggagagactgggcatcgacctgcagaagatcagcggccagaacggcaccttcaagaagagcaccgtgctgcagctgggcatcagaatgctggacgtgctggagtacatccacgagaacgagtacgtgcacggcgacatcaaggccgccaacctgctgctgggctacaagaaccccgaccaggtgtacctggccgactacggcctgagctacagatactgccccaacggcaaccacaagcagtaccaggagaaccccagaaagggccacaacggcaccatcgagttcaccagcctggacgcccacaagggcgtggccctgagcagaagaagcgacgtggagatcctgggctactgcatgctgagatggctgtgcggcaagctgccctgggagcagaacctgaaggaccccgtggccgtgcagaccgccaagaccaacctgctggacgagctgccccagagcgtgctgaagtgggcccccagcggcagcagctgctgcgagatcgcccagttcctggtgtgcgcccacagcctggcctacgacgagaagcccaactaccaggccctgaagaagatcctgaacccccacggcatccccctgggccccctggacttcagcaccaagggccagagcatcaacgtgcacacccccaacagccagaaggtggacagccagaaggccgccaccaagcaggtgaacaaggcccacaacagactgatcgagaagaaggtgcacagcgagagaagcgccgagagctgcgccacctggaaggtgcagaaggaggagaagctgatcggcctgatgaacaacgaggccgcccaggagagcaccagaagaagacagaagtaccaggagagccaggagcccctgaacgaggtgaacagcttcccccagaagatcagctacacccagttccccaacagcttctacgagccccaccaggacttcaccagccccgacatcttcaagaagagcagaagccccagctggtacaagtacaccagcaccgtgagcaccggcatcaccgacctggagagcagcaccggcctgtggcccaccatcagccagttcaccctgagcgaggagaccaacgccgacgtgtactactacagaatcatcatccccgtgctgctgatgctggtgttcctggccctgttcttcctgtag

SEQ ID NO: 104870 - DNA, 531 bp, synthetic construct
  misc_feature 1..531: note = Description of Artificial Sequence: Synthetic coding sequence
  source 1..531: mol_type = other DNA
atggccatgagcttcgagtggccctggcagtacagattcccccccttcttcaccctgcagcccaacgtggacaccagacagaagcagctggccgcctggtgcagcctggtgctgagcttctgcagactgcacaagcagagcagcatgaccgtgatggaggcccaggagagccccctgttcaacaacgtgaagctgcagagaaagctgcccgtggagagcatccagatcgtgctggaggagctgagaaagaagggcaacctggagtggctggacaagagcaagagcagcttcctgatcatgtggagaagacccgaggagtggggcaagctgatctaccagtgggtgagcagaagcggccagaacaacagcgtgttcaccctgtacgagctgaccaacggcgaggacaccgaggacgaggagttccacggcctggacgaggccaccctgctgagagccctgcaggccctgcagcaggagcacaaggccgagatcatcaccgtgagcgacggcagaggcgtgaagttcttctag

SEQ ID NO: 104871 - DNA, 984 bp, synthetic construct
  misc_feature 1..984: note = Description of Artificial Sequence: Synthetic coding sequence
  source 1..984: mol_type = other DNA
atgagcttcctgggcggcttcttcggccccatctgcgagatcgacatcgtgctgaacgacggcgagaccagaaagatggccgagatgaagaccgaggacggcaaggtggagaagcactacctgttctacgacggcgagagcgtgagcggcaaggtgaacctggccttcaagcagcccggcaagagactggagcaccagggcatcagaatcgagttcgtgggccagatcgagctgttcaacgacaagagcaacacccacgagttcgtgaacctggtgaaggagctggccctgcccggcgagctgacccagagcagaagctacgacttcgagttcatgcaggtggagaagccctacgagagctacatcggcgccaacgtgagactgagatacttcctgaaggtgaccatcgtgagaagactgaccgacctggtgaaggagtacgacctgatcgtgcaccagctggccacctaccccgacgtgaacaacagcatcaagatggaggtgggcatcgaggactgcctgcacatcgagttcgagtacaacaagagcaagtaccacctgaaggacgtgatcgtgggcaagatctacttcctgctggtgagaatcaagatccagcacatggagctgcagctgatcaagaaggagatcaccggcatcggccccagcaccaccaccgagaccgagaccatcgccaagtacgagatcatggacggcgcccccgtgaagggcgagagcatccccatcagactgttcctggccggctacgaccccacccccaccatgagagacgtgaacaagaagttcagcgtgagatacttcctgaacctggtgctggtggacgaggaggacagaagatacttcaagcagcaggagatcatcctgtggagaaaggcccccgagaagctgagaaagcagagaaccaacttccaccagagattcgagagccccgagagccaggccagcgccgagcagcccgagatgtag

SEQ ID NO: 104872 - DNA, 984 bp, synthetic construct; identical to SEQ ID NO: 104871
  misc_feature 1..984: note = Description of Artificial Sequence: Synthetic coding sequence
  source 1..984: mol_type = other DNA

SEQ ID NO: 104873 - DNA, 756 bp, synthetic construct
  misc_feature 1..756: note = Description of Artificial Sequence: Synthetic coding sequence
  source 1..756: mol_type = other DNA
atgagcttcctgggcggcttcttcggccccatctgcgagatcgacatcgtgctgaacgacggcgagaccagaaagatggccgagatgaagaccgaggacggcaaggtggagaagcactacctgttctacgacggcgagagcgtgagcggcaaggtgaacctggccttcaagcagcccggcaagagactggagcaccagggcatcagaatcgagttcgtgggccagatcgagctgttcaacgacaagagcaacacccacgagttcgtgaacctggtgaaggagctggccctgcccggcgagctgacccagagcagaagctacgacttcgagttcatgcaggtggagaagccctacgagagctacatcggcgccaacgtgagactgagatacttcctgaaggtgaccatcgtgagaagactgaccgacctggtgaaggagtacgacctgatcgtgcaccagctggccacctaccccgacgtgaacaacagcatcaagatggaggtgggcatcgaggactgcctgcacatcgagttcgagtacaacaagagcaagtaccacctgaaggacgtgatcgtgggcaagatctacttcctgctggtgagaatcaagatccagcacatggagctgcagctgatcaagaaggagatcaccggcatcggccccagcaccaccaccgagaccgagaccatcgccaagtacgagatcatggacggcgcccccgtgaagggcgacaacttcatggagaagagcagctag

SEQ ID NO: 104874 - DNA, 651 bp, synthetic construct
  misc_feature 1..651: note = Description of Artificial Sequence: Synthetic coding sequence
  source 1..651: mol_type = other DNA
atgcaggtggagaagccctacgagagctacatcggcgccaacgtgagactgagatacttcctgaaggtgaccatcgtgagaagactgaccgacctggtgaaggagtacgacctgatcgtgcaccagctggccacctaccccgacgtgaacaacagcatcaagatggaggtgggcatcgaggactgcctgcacatcgagttcgagtacaacaagagcaagtaccacctgaaggacgtgatcgtgggcaagatctacttcctgctggtgagaatcaagatccagcacatggagctgcagctgatcaagaaggagatcaccggcatcggccccagcaccaccaccgagaccgagaccatcgccaagtacgagatcatggacggcgcccccgtgaagggcgagagcatccccatcagactgttcctggccggctacgaccccacccccaccatgagagacgtgaacaagaagttcagcgtgagatacttcctgaacctggtgctggtggacgaggaggacagaagatacttcaagcagcaggagatcatcctgtggagaaaggcccccgagaagctgagaaagcagagaaccaacttccaccagagattcgagagccccgagagccaggccagcgccgagcagcccgagatgtag

SEQ ID NO: 104875 - DNA, 933 bp, synthetic construct
  misc_feature 1..933: note = Description of Artificial Sequence: Synthetic coding sequence
  source 1..933: mol_type = other DNA
atgaccgagaaccccttccaggagagatacagcgtggaggacctgagcaccttcggcatgtgcctgtgcatggtgagatacgtgtacgacgccttctacaaggtgaacctggccttcaagcagcccggcaagagactggagcaccagggcatcagaatcgagttcgtgggccagatcgagctgttcaacgacaagagcaacacccacgagttcgtgaacctggtgaaggagctggccctgcccggcgagctgacccagagcagaagctacgacttcgagttcatgcaggtggagaagccctacgagagctacatcggcgccaacgtgagactgagatacttcctgaaggtgaccatcgtgagaagactgaccgacctggtgaaggagtacgacctgatcgtgcaccagctggccacctaccccgacgtgaacaacagcatcaagatggaggtgggcatcgaggactgcctgcacatcgagttcgagtacaacaagagcaagtaccacctgaaggacgtgatcgtgggcaagatctacttcctgctggtgagaatcaagatccagcacatggagctgcagctgatcaagaaggagatcaccggcatcggccccagcaccaccaccgagaccgagaccatcgccaagtacgagatcatggacggcgcccccgtgaagggcgagagcatccccatcagactgttcctggccggctacgaccccacccccaccatgagagacgtgaacaagaagttcagcgtgagatacttcctgaacctggtgctggtggacgaggaggacagaagatacttcaagcagcaggagatcatcctgtggagaaaggcccccgagaagctgagaaagcagagaaccaacttccaccagagattcgagagccccgagagccaggccagcgccgagcagcccgagatgtag

SEQ ID NO: 104876 - DNA, 1011 bp, synthetic construct
  misc_feature 1..1011: note = Description of Artificial Sequence: Synthetic coding sequence
  source 1..1011: mol_type = other DNA
atgagcttcttcggcttcggccagagcgtggaggtggagatcctgctgaacgacgccgagagcagaaagagagccgagcacaagaccgaggacggcaagaaggagaagtacttcctgttctacgacggcgagaccgtgagcggcaaggtgagcctggccctgaagaaccccaacaagagactggagcaccagggcatcaagatcgagttcatcggccagatcgagctgtactacgacagaggcaaccaccacgagttcgtgagcctggtgaaggacctggccagacccggcgagatcacccagagccaggccttcgacttcgagttcacccacgtggagaagccctacgagagctacaccggccagaacgtgaagctgagatacttcctgagagccaccatcagcagaagactgaacgacgtggtgaaggagatggacatcgtggtgcacaccctgagcacctaccccgagctgaacagcagcatcaagatggaggtgggcatcgaggactgcctgcacatcgagttcgagtacaacaagagcaagtaccacctgaaggacgtgatcgtgggcaagatctacttcctgctggtgagaatcaagatcaagcacatggagatcgacatcatcaagagagagaccaccggcaccggccccaacgtgtaccacgagaacgacaccatcgccaagtacgagatcatggacggcgcccccgtgagaggcgagagcatccccatcagactgttcctggccggctacgagctgacccccaccatgagagacatcaacaagaagttcagcgtgagatactacctgaacctggtgctgatcgacgaggaggagagaagatacttcaagcagcaggaggtggtgctgtggagaaagggcgacatcgtgagaaagagcatgagccaccaggccgccatcgccagccagagattcgagggcaccaccagcctgggcgaggtgagaacccccagccagctgagcgacaacaactgcagacagtag

SEQ ID NO: 104877 - DNA, 666 bp, synthetic construct
  misc_feature 1..666: note = Description of Artificial Sequence: Synthetic coding sequence
  source 1..666: mol_type = other DNA
atgttccacggcatccccgccacccccggcatcggcgcccccggcaacaagcccgagctgtacgaggaggtgaagctgtacaagaacgccagagagagagagaagtacgacaacatggccgagctgttcgccgtggtgaagaccatgcaggccctggagaaggcctacatcaaggactgcgtgagccccagcgagtacaccgccgcctgcagcagactgctggtgcagtacaaggccgccttcagacaggtgcagggcagcgagatcagcagcatcgacgagttctgcagaaagttcagactggactgccccctggccatggagagaatcaaggaggacagacccatcaccatcaaggacgacaagggcaacctgaacagatgcatcgccgacgtggtgagcctgttcatcaccgtgatggacaagctgagactggagatcagagccatggacgagatccagcccgacctgagagagctgatggagaccatgcacagaatgagccacctgccccccgacttcgagggcagacagaccgtgagccagtggctgcagaccctgagcggcatgagcgccagcgacgagctggacgacagccaggtgagacagatgctgttcgacctggagagcgcctacaacgccttcaacagattcctgcacgcctag

SEQ ID NO: 104878 - DNA, 702 bp, synthetic construct
  misc_feature 1..702: note = Description of Artificial Sequence: Synthetic coding sequence
  source 1..702: mol_type = other DNA
atgttccacggcatccccgccacccccggcatcggcgcccccggcaacaagcccgagctgtacgaggaggtgaagctgtacaagaacgccagagagagagagaagtacgacaacatggccgagctgttcgccgtggtgaagaccatgcaggccctggagaaggcctacatcaaggactgcgtgagccccagcgagtacaccgccgcctgcagcagactgctggtgcagtacaaggccgccttcagacaggtgcagggcagcgagatcagcagcatcgacgagttctgcagaaagttcagactggactgccccctggccatggagagaatcaaggaggacagacccatcaccatcaaggacgacaagggcaacctgaacagatgcatcgccgacgtggtgagcctgttcatcaccgtgatggacaagctgagactggagatcagagccatggacgagatccagcccgacctgagagagctgatggagaccatgcacagaatgagccacctgccccccgacttcgagggcagacagaccgtgagccagtggtgggtgagcctgcccgccagacagagccccgccgtgcccgagaccctgcccgccagaagaagccccgccgtgcccctgagacccagcgcccccacctgccccgtgctgcacagccaggccgccgaccccgagagacacgtgggcgtgagatag

SEQ ID NO: 104879 - DNA, 666 bp, synthetic construct; identical to SEQ ID NO: 104877
  misc_feature 1..666: note = Description of Artificial Sequence: Synthetic coding sequence
  source 1..666: mol_type = other DNA

SEQ ID NO: 104880 - DNA, 1791 bp, synthetic construct
  misc_feature 1..1791: note = Description of Artificial Sequence: Synthetic coding sequence
  source 1..1791: mol_type = other DNA
atggccgcccacctgagctacggcagagtgaacctgaacgtgctgagagaggccgtgagaagagagctgagagagttcctggacaagtgcgccggcagcaaggccatcgtgtgggacgagtacctgaccggccccttcggcctgatcgcccagtacagcctgctgaaggagcacgaggtggagaagatgttcaccctgaagggcaacagactgcccgccgccgacgtgaagaacatcatcttcttcgtgagacccagactggagctgatggacatcatcgccgagaacgtgctgagcgaggacagaagaggccccaccagagacttccacatcctgttcgtgcccagaagaagcctgctgtgcgagcagagactgaaggacctgggcgtgctgggcagcttcatccacagagaggagtacagcctggacctgatccccttcgacggcgacctgctgagcatggagagcgagggcgccttcaaggagtgctacctggagggcgaccagaccagcctgtaccacgccgccaagggcctgatgaccctgcaggccctgtacggcaccatcccccagatcttcggcaagggcgagtgcgccagacaggtggccaacatgatgatcagaatgaagagagagttcaccggcagccagaacagcatcttccccgtgttcgacaacctgctgctgctggacagaaacgtggacctgctgacccccctggccacccagctgacctacgagggcctgatcgacgagatctacggcatccagaacagctacgtgaagctgccccccgagaagttcgcccccaagaagcagggcgacggcggcaaggacctgcccaccgaggccaagaagctgcagctgaacagcgccgaggagctgtacgccgagatcagagacaagaacttcaacgccgtgggcagcgtgctgagcaagaaggccaagatcatcagcgccgccttcgaggagagacacaacgccaagaccgtgggcgagatcaagcagttcgtgagccagctgccccacatgcaggccgccagaggcagcctggccaaccacaccagcatcgccgagctgatcaaggacgtgaccaccagcgaggacttcttcgacaagctgaccgtggagcaggagttcatgagcggcatcgacaccgacaaggtgaacaactacatcgaggactgcatcgcccagaagcacagcctgatcaaggtgctgagactggtgtgcctgcagagcgtgtgcaacagcggcctgaagcagaaggtgctggactactacaagagagagatcctgcagacctacggctacgagcacatcctgaccctgcacaacctggagaaggccggcctgctgaagccccagaccggcggcagaaacaactaccccaccatcagaaagaccctgagactgtggatggacgacgtgaacgagcagaaccccaccgacatcagctacgtgtacagcggctacgcccccctgagcgtgagactggcccagctgctgagcagacccggctggagaagcatcgaggaggtgctgagaatcctgcccggcccccacttcgaggagagacagcccctgcccaccggcctgcagaagaagagacagcccggcgagaacagagtgaccctgatcttcttcctgggcggcgtgaccttcgccgagatcgccgccctgagattcctgagccagctggaggacggcggcaccgagtacgtgatcgccaccaccaagctgatgaacggcaccagctggatcgaggccctgatggagaagcccttctag

SEQ ID NO: 104881 - DNA, 1854 bp, synthetic construct
  misc_feature 1..1854: note = Description of Artificial Sequence: Synthetic coding sequence
  source 1..1854: mol_type = other DNA
atggccttcccccacagacccgacgcccccgagctgcccgacttcagcatgctgaagagactggccagagaccagctgatctacctgctggagcagctgcccggcaagaaggacctgttcatcgaggccgacctgatgagccccctggacagaatcgccaacgtgagcatcctgaagcagcacgaggtggacaagctgtacaaggtggagaacaagcccgccctgagcagcaacgagcagctgtgcttcctggtgagacccagaatcaagaacatgagatacatcgccagcctggtgaacgccgacaagctggccggcagaaccagaaagtacaaggtgatcttcagcccccagaagttctacgcctgcgagatggtgctggaggaggagggcatctacggcgacgtgagctgcgacgagtgggccttcagcctgctgcccctggacgtggacctgctgagcatggagctgcccgagttcttcagagactacttcctggagggcgaccagagatggatcaacaccgtggcccaggccctgcacctgctgagcaccctgtacggccccttccccaactgctacggcatcggcagatgcgccaagatggcctacgagctgtggagaaacctggaggaggaggaggacggcgagaccaagggcagaagacccgagatcggccacatcttcctgctggacagagacgtggacttcgtgaccgccctgtgcagccaggtggtgtacgagggcctggtggacgacaccttcagaatcaagtgcggcagcgtggacttcggccccgaggtgaccagcagcgacaagagcctgaaggtgctgctgaacgccgaggacaaggtgttcaacgagatcagaaacgagcacttcagcaacgtgttcggcttcctgagccagaaggccagaaacctgcaggcccagtacgacagaagaagaggcatggacatcaagcagatgaagaacttcgtgagccaggagctgaagggcctgaagcaggagcacagactgctgagcctgcacatcggcgcctgcgagagcatcatgaagaagaagaccaagcaggacttccaggagctgatcaagaccgagcacgccctgctggagggcttcaacatcagagagagcaccagctacatcgaggagcacatcgacagacaggtgagccccatcgagagcctgagactgatgtgcctgctgagcatcaccgagaacggcctgatccccaaggactacagaagcctgaagacccagtacctgcagagctacggccccgagcacctgctgaccttcagcaacctgagaagagccggcctgctgaccgagcaggcccccggcgacaccctgaccgccgtggagagcaaggtgagcaagctggtgaccgacaaggccgccggcaagatcaccgacgccttcagcagcctggccaagagaagcaacttcagagccatcagcaagaagctgaacctgatccccagagtggacggcgagtacgacctgaaggtgcccagagacatggcctacgtgttcggcggcgcctacgtgcccctgagctgcagaatcatcgagcaggtgctggagagaagaagctggcagggcctggacgaggtggtgagactgctgaactgcagcgacttcgccttcaccgacatgaccaaggaggacaaggccagcagcgagagcctgagactgatcctggtggtgttcctgggcggctgcaccttcagcgagatcagcgccctgagattcctgggcagagagaagggctacagattcatcttcctgaccaccgccgtgaccaacagcgccagactgatggaggccatgagcgaggtgaaggcctag

SEQ ID NO: 104882 - DNA, 1719 bp, synthetic construct
  misc_feature 1..1719: note = Description of Artificial Sequence: Synthetic coding sequence
  source 1..1719: mol_type = other DNA
atgagccccctggacagaatcgccaacgtgagcatcctgaagcagcacgaggtggacaagctgtacaaggtggagaacaagcccgccctgagcagcaacgagcagctgtgcttcctggtgagacccagaatcaagaacatgagatacatcgccagcctggtgaacgccgacaagctggccggcagaaccagaaagtacaaggtgatcttcagcccccagaagttctacgcctgcgagatggtgctggaggaggagggcatctacggcgacgtgagctgcgacgagtgggccttcagcctgctgcccctggacgtggacctgctgagcatggagctgcccgagttcttcagagactacttcctggagggcgaccagagatggatcaacaccgtggcccaggccctgcacctgctgagcaccctgtacggccccttccccaactgctacggcatcggcagatgcgccaagatggcctacgagctgtggagaaacctggaggaggaggaggacggcgagaccaagggcagaagacccgagatcggccacatcttcctgctggacagagacgtggacttcgtgaccgccctgtgcagccaggtggtgtacgagggcctggtggacgacaccttcagaatcaagtgcggcagcgtggacttcggccccgaggtgaccagcagcgacaagagcctgaaggtgctgctgaacgccgaggacaaggtgttcaacgagatcagaaacgagcacttcagcaacgtgttcggcttcctgagccagaaggccagaaacctgcaggcccagtacgacagaagaagaggcatggacatcaagcagatgaagaacttcgtgagccaggagctgaagggcctgaagcaggagcacagactgctgagcctgcacatcggcgcctgcgagagcatcatgaagaagaagaccaagcaggacttccaggagctgatcaagaccgagcacgccctgctggagggcttcaacatcagagagagcaccagctacatcgaggagcacatcgacagacaggtgagccccatcgagagcctgagactgatgtgcctgctgagcatcaccgagaacggcctgatccccaaggactacagaagcctgaagacccagtacctgcagagctacggccccgagcacctgctgaccttcagcaacctgagaagagccggcctgctgaccgagcaggcccccggcgacaccctgaccgccgtggagagcaaggtgagcaagctggtgaccgacaaggccgccggcaagatcaccgacgccttcagcagcctggccaagagaagcaacttcagagccatcagcaagaagctgaacctgatccccagagtggacggcgagtacgacctgaaggtgcccagagacatggcctacgtgttcggcggcgcctacgtgcccctgagctgcagaatcatcgagcaggtgctggagagaagaagctggcagggcctggacgaggtggtgagactgctgaactgcagcgacttcgccttcaccgacatgaccaaggaggacaaggccagcagcgagagcctgagactgatcctggtggtgttcctgggcggctgcaccttcagcgagatcagcgccctgagattcctgggcagagagaagggctacagattcatcttcctgaccaccgccgtgaccaacagcgccagactgatggaggccatgagcgaggtgaaggcctag

SEQ ID NO: 104883 - DNA, 2391 bp, synthetic construct
  misc_feature 1..2391: note = Description of Artificial Sequence: Synthetic coding sequence
  source 1..2391: mol_type = other DNA
atgcccaccacccagcagagcccccaggacgagcaggagaagctgctggacgaggccatccaggccgtgaaggtgcagagcttccagatgaagagatgcctggacaagaacaagctgatggacgccctgaagcacgccagcaacatgctgggcgagctgagaaccagcatgctgagccccaagagctactacgagctgtacatggccatcagcgacgagctgcactacctggaggtgtacctgaccgacgagttcgccaagggcagaaaggtggccgacctgtacgagctggtgcagtacgccggcaacatcatccccagactgtacctgctgatcaccgtgggcgtggtgtacgtgaagagcttcccccagagcagaaaggacatcctgaaggacctggtggagatgtgcagaggcgtgcagcaccccctgagaggcctgttcctgagaaactacctgctgcagtgcaccagaaacatcctgcccgacgagggcgagcccaccgacgaggagaccaccggcgacatcagcgacagcatggacttcgtgctgctgaacttcgccgagatgaacaagctgtgggtgagaatgcagcaccagggccacagcagagacagagagaagagagagagagagagacaggagctgagaatcctggtgggcaccaacctggtgagactgagccagctggagggcgtgaacgtggagagatacaagcagatcgtgctgaccggcatcctggagcaggtggtgaactgcagagacgccctggcccaggagtacctgatggagtgcatcatccaggtgttccccgacgagttccacctgcagaccctgaaccccttcctgagagcctgcgccgagctgcaccagaacgtgaacgtgaagaacatcatcatcgccctgatcgacagactggccctgttcgcccacagagaggacggccccggcatccccgccgacatcaagctgttcgacatcttcagccagcaggtggccaccgtgatccagagcagacaggacatgcccagcgaggacgtggtgagcctgcaggtgagcctgatcaacctggccatgaagtgctaccccgacagagtggactacgtggacaaggtgctggagaccaccgtggagatcttcaacaagctgaacctggagcacatcgccaccagcagcgccgtgagcaaggagctgaccagactgctgaagatccccgtggacacctacaacaacatcctgaccgtgctgaagctgaagcacttccaccccctgttcgagtacttcgactacgagagcagaaagagcatgagctgctacgtgctgagcaacgtgctggactacaacaccgagatcgtgagccaggaccaggtggacagcatcatgaacctggtgagcaccctgatccaggaccagcccgaccagcccgtggaggaccccgaccccgaggacttcgccgacgagcagagcctggtgggcagattcatccacctgctgagaagcgaggaccccgaccagcagtacctgatcctgaacaccgccagaaagcacttcggcgccggcggcaaccagagaatcagattcaccctgccccccctggtgttcgccgcctaccagctggccttcagatacaaggagaacagcaaggtggacgacaagtgggagaagaagtgccagaagatcttcagcttcgcccaccagaccatcagcgccctgatcaaggccgagctggccgagctgcccctgagactgttcctgcagggcgccctggccgccggcgagatcggcttcgagaaccacgagaccgtggcctacgagttcatgagccaggccttcagcctgtacgaggacgagatcagcgacagcaaggcccagctggccgccatcaccctgatcatcggcaccttcgagagaatgaagtgcttcagcgaggagaaccacgagcccctgagaacccagtgcgccctggccgccagcaagctgctgaagaagcccgaccagggcagagccgtgagcacctgcgcccacctgttctggagcggcagaaacaccgacaagaacggcgaggagctgcacggcggcaagagagtgatggagtgcctgaagaaggccctgaagatcgccaaccagtgcatggaccccagcctgcaggtgcagctgttcatcgagatcctgaacagatacatctacttctacgagaaggagaacgacgccgtgaccatccaggtgctgaaccagctgatccagaagatcagagaggacctgcccaacctggagagcagcgaggagaccgagcagatcaacaagcacttccacaacaccctggagcacctgagactgagaagagagagccccgagagcgagggccccatctacgagggcctgatcctgtag

SEQ ID NO: 104884 - DNA, 1989 bp, synthetic construct
  misc_feature 1..1989: note = Description of Artificial Sequence: Synthetic coding sequence
  source 1..1989: mol_type = other DNA
atgtgcagaggcgtgcagcaccccctgagaggcctgttcctgagaaactacctgctgcagtgcaccagaaacatcctgcccgacgagggcgagcccaccgacgaggagaccaccggcgacatcagcgacagcatggacttcgtgctgctgaacttcgccgagatgaacaagctgtgggtgagaatgcagcaccagggccacagcagagacagagagaagagagagagagagagacaggagctgagaatcctggtgggcaccaacctggtgagactgagccagctggagggcgtgaacgtggagagatacaagcagatcgtgctgaccggcatcctggagcaggtggtgaactgcagagacgccctggcccaggagtacctgatggagtgcatcatccaggtgttccccgacgagttccacctgcagaccctgaaccccttcctgagagcctgcgccgagctgcaccagaacgtgaacgtgaagaacatcatcatcgccctgatcgacagactggccctgttcgcccacagagaggacggccccggcatccccgccgacatcaagctgttcgacatcttcagccagcaggtggccaccgtgatccagagcagacaggacatgcccagcgaggacgtggtgagcctgcaggtgagcctgatcaacctggccatgaagtgctaccccgacagagtggactacgtggacaaggtgctggagaccaccgtggagatcttcaacaagctgaacctggagcacatcgccaccagcagcgccgtgagcaaggagctgaccagactgctgaagatccccgtggacacctacaacaacatcctgaccgtgctgaagctgaagcacttccaccccctgttcgagtacttcgactacgagagcagaaagagcatgagctgctacgtgctgagcaacgtgctggactacaacaccgagatcgtgagccaggaccaggtggacagcatcatgaacctggtgagcaccctgatccaggaccagcccgaccagcccgtggaggaccccgaccccgaggacttcgccgacgagcagagcctggtgggcagattcatccacctgctgagaagcgaggaccccgaccagcagtacctgatcctgaacaccgccagaaagcacttcggcgccggcggcaaccagagaatcagattcaccctgccccccctggtgttcgccgcctaccagctggccttcagatacaaggagaacagcaaggtggacgacaagtgggagaagaagtgccagaagatcttcagcttcgcccaccagaccatcagcgccctgatcaaggccgagctggccgagctgcccctgagactgttcctgcagggcgccctggccgccggcgagatcggcttcgagaaccacgagaccgtggcctacgagttcatgagccaggccttcagcctgtacgaggacgagatcagcgacagcaaggcccagctggccgccatcaccctgatcatcggcaccttcgagagaatgaagtgcttcagcgaggagaaccacgagcccctgagaacccagtgcgccctggccgccagcaagctgctgaagaagcccgaccagggcagagccgtgagcacctgcgcccacctgttctggagcggcagaaacaccgacaagaacggcgaggagctgcacggcggcaagagagtgatggagtgcctgaagaaggccctgaagatcgccaaccagtgcatggaccccagcctgcaggtgcagctgttcatcgagatcctgaacagatacatctacttctacgagaaggagaacgacgccatcgtgaccatccaggtgctgaaccagctgatccagaagatcagagaggacctgcccaacctggagagcagcgaggagaccgagcagatcaacaagcacttccacaacaccctggagcacctgagactgagaagagagagccccgagagcgagggccccatctacgagggcctgatcctgtag

SEQ ID NO: 104885 - DNA, 1161 bp, synthetic construct
  misc_feature 1..1161: note = Description of Artificial Sequence: Synthetic coding sequence
  source 1..1161: mol_type = other DNA
atggacagattcgtgtggaccagcggcctgctggagatcaacgagaccctggtgatccagcagagaggcgtgagaatctacgacggcgaggagaagatcaagttcgacgccggcaccctgctgctgagcacccacagactgatctggagagaccagaagaaccacgagtgctgcatggccatcctgctgagccagatcgtgttcatcgaggagcaggccgccggcatcggcaagagcgccaagatcgtggtgcacctgcaccccgccccccccaacaaggagcccggccccttccagagcagcaagaacagctacatcaagctgagcttcaaggagcacggccagatcgagttctacagaagactgagcgaggagatgacccagagaagatgggagaacatgcccgtgagccagagcctgcagaccaacagaggcccccagcccggcagaatcagagccgtgggcatcgtgggcatcgagagaaagctggaggagaagagaaaggagaccgacaagaacatcagcgaggccttcgaggacctgagcaagctgatgatcaaggccaaggagatggtggagctgagcaagagcatcgccaacaagatcaaggacaagcagggcgacatcaccgaggacgagaccatcagattcaagagctacctgctgagcatgggcatcgccaaccccgtgaccagagagacctacggcagcggcacccagtaccacatgcagctggccaagcagctggccggcatcctgcaggtgcccctggaggagagaggcggcatcatgagcctgaccgaggtgtactgcctggtgaacagagccagaggcatggagctgctgagccccgaggacctggtgaacgcctgcaagatgctggaggccctgaagctgcccctgagactgagagtgttcgacagcggcgtgatggtgatcgagctgcagagccacaaggaggaggagatggtggccagcgccctggagaccgtgagcgagaagggcagcctgaccagcgaggagttcgccaagctggtgggcatgagcgtgctgctggccaaggagagactgctgctggccgagaagatgggccacctgtgcagagacgacagcgtggagggcctgagattctaccccaacctgttcatgacccagagctag

SEQ ID NO: 104886 - DNA, 558 bp, synthetic construct
  misc_feature 1..558: note = Description of Artificial Sequence: Synthetic coding sequence
  source 1..558: mol_type = other DNA
atgagctggctgttccccctgaccaagagcgccagcagcagcgccgccggcagccccggcggcctgaccagcctgcagcagcagaagcagagactgatcgagagcctgagaaacagccacagcagcatcgccgagatccagaaggacgtggagtacagactgcccttcaccatcaacaacctgaccatcaacatcaacatcctgctgcccccccagttcccccaggagaagcccgtgatcagcgtgtacccccccatcagacaccacctgatggacaagcagggcgtgtacgtgaccagccccctggtgaacaacttcaccatgcacagcgacctgggcaagatcatccagagcctgctggacgagttctggaagaacccccccgtgctggcccccaccagcaccgccttcccctaccagctggagatcagatggcaccacccccactgcctggagatcagcctggccagaagcagcaacagcctgggcttcagcatcagcagcagcatcagcagcaccagaagcaagcaggagtaccacttcttcatctgctgctag

SEQ ID NO: 104887 - DNA, 1194 bp, synthetic construct
  misc_feature 1..1194: note = Description of Artificial Sequence: Synthetic coding sequence
  source 1..1194: mol_type = other DNA
atgagctggctgttccccctgaccaagagcgccagcagcagcgccgccggcagccccggcggcctgaccagcctgcagcagcagaagcagagactgatcgagagcctgagaaacagccacagcagcatcgccgagatccagaaggacgtggagtacagactgcccttcaccatcaacaacctgaccatcaacatcaacatcctgctgcccccccagttcccccaggagaagcccgtgatcagcgtgtacccccccatcagacaccacctgatggacaagcagggcgtgtacgtgaccagccccctggtgaacaacttcaccatgcacagcgacctgggcaagatcatccagagcctgctggacgagttctggaagaacccccccgtgctggcccccaccagcaccgccttcccctacctgtacagcaaccccagcggcatgagcccctacgccagccagggcttccccttcctgcccccctaccccccccaggaggccaacagaagcatcaccagcctgagcgtggccgacaccgtgagcagcagcaccaccagccacaccaccgccaagcccgccgcccccagcttcggcgtgctgagcaacctgcccctgcccatccccaccgtggacgccagcatccccaccagccagaacggcttcggctacaagatgcccgacgtgcccgacgccttccccgagctgagcgagctgagcgtgagccagctgaccgacatgaacgagcaggaggaggtgctgctggagcagttcctgaccctgccccagctgaagcagatcatcaccgacaaggacgacctggtgaagagcatcgaggagctggccagaaagaacctgctgctggagcccagcctggaggccaagagacagaccgtgctggacaagtacgagctgctgacccagatgaagagcaccttcgagaagaagatgcagagacagcacgagctgagcgagagctgcagcgccagcgccctgcaggccagactgaaggtggccgcccacgaggccgaggaggagagcgacaacatcgccgaggacttcctggagggcaagatggagatcgacgacttcctgagcagcttcatggagaagagaaccatctgccactgcagaagagccaaggaggagaagctgcagcaggccatcgccatgcacagccagttccacgcccccctgtag

SEQ ID NO: 104888 - DNA, 1119 bp, synthetic construct
  misc_feature 1..1119: note = Description of Artificial Sequence: Synthetic coding sequence
  source 1..1119: mol_type = other DNA
atgagctggctgttccccctgaccaagagcgccagcagcagcgccgccggcagccccggcggcctgaccagcctgcagcagcagaagcagagactgatcgagagcctgagaaacagccacagcagactgctgcccccccagttcccccaggagaagcccgtgatcagcgtgtacccccccatcagacaccacctgatggacaagcagggcgtgtacgtgaccagccccctggtgaacaacttcaccatgcacagcgacctgggcaagatcatccagagcctgctggacgagttctggaagaacccccccgtgctggcccccaccagcaccgccttcccctacctgtacagcaaccccagcggcatgagcccctacgccagccagggcttccccttcctgcccccctaccccccccaggaggccaacagaagcatcaccagcctgagcgtggccgacaccgtgagcagcagcaccaccagccacaccaccgccaagcccgccgcccccagcttcggcgtgctgagcaacctgcccctgcccatccccaccgtggacgccagcatccccaccagccagaacggcttcggctacaagatgcccgacgtgcccgacgccttccccgagctgagcgagctgagcgtgagccagctgaccgacatgaacgagcaggaggaggtgctgctggagcagttcctgaccctgccccagctgaagcagatcatcaccgacaaggacgacctggtgaagagcatcgaggagctggccagaaagaacctgctgctggagcccagcctggaggccaagagacagaccgtgctggacaagtacgagctgctgacccagatgaagagcaccttcgagaagaagatgcagagacagcacgagctgagcgagagctgcagcgccagcgccctgcaggccagactgaaggtggccgcccacgaggccgaggaggagagcgacaacatcgccgaggacttcctggagggcaagatggagatcgacgacttcctgagcagcttcatggagaagagaaccatctgccactgcagaagagccaaggaggagaagctgcagcaggccatcgccatgcacagccagttccacgcccccctgtag

SEQ ID NO: 104889 - DNA, 858 bp, synthetic construct
  misc_feature 1..858: note = Description of Artificial Sequence: Synthetic coding sequence
  source 1..858: mol_type = other DNA
atggccggcgccggcagcgaggccagattcgccggcctgagcctggtgcagctgaacgagctgctggaggacgagggccagctgaccgagatggtgcagaagatggaggagacccagaacgtgcagctgaacaaggagatgaccctggccagcaacagaagcctggccgagggcaacctgctgtaccagccccagctggacaccctgaaggccagactgacccagaagtaccaggagctgcaggtgctgttcgaggcctaccagatcaagaagaccaagctggacagacagagcagcagcgccagcctggagaccctgctggccctgctgcaggccgagggcgccaagatcgaggaggacaccgagaacatggccgagaagttcctggacggcgagctgcccctggacagcttcatcgacgtgtaccagagcaagagaaagctggcccacatgagaagagtgaagatcgagaagctgcaggagatggtgctgaagggccagagactgccccaggccctggcccccctgccccccagactgcccgagctggcccccaccgcccccctgccctaccccgcccccgaggccagcggcccccccgccgtggcccccagaagaatcccccccccccccccccccgtgcccgccggcagactggccacccccttcaccgccgccatgagcagcggccaggccgtgccctaccccggcctgcagtgcccccccctgccccccagagtgggcctgcccacccagcagggcttcagcagccagttcgtgagcccctaccccccccccctgccccagagacccccccccagactgcccccccaccagcccggcttcatcctgcagtag

SEQ ID NO: 104890 - DNA, 1068 bp, synthetic construct
  misc_feature 1..1068: note = Description of Artificial Sequence: Synthetic coding sequence
  source 1..1068: mol_type = other DNA
atggagaccctgaaggacaagaccctgcaggagctggaggagctgcagaacgacagcgaggccatcgaccagctggccctggagagccccgaggtgcaggacctgcagctggagagagagatggccctggccaccaacagaagcctggccgagagaaacctggagttccagggccccctggagatcagcagaagcaacctgagcgacagataccaggagctgagaaagctggtggagagatgccaggagcagaaggccaagctggagaagttcagcagcgccctgcagcccggcaccctgctggacctgctgcaggtggagggcatgaagatcgaggaggagagcgaggccatggccgagaagttcctggagggcgaggtgcccctggagaccttcctggagaacttcagcagcatgagaatgctgagccacctgagaagagtgagagtggagaagctgcaggaggtggtgagaaagcccagagccagccaggagctggccggcgacgcccccccccccagaccccccccccccgtgagacccgtgccccagggcaccccccccgtggtggaggagcagccccagccccccctggccatgcccccctaccccctgccctacagccccagccccagcctgcccgtgggccccaccgcccacggcgccctgccccccgcccccttccccgtggtgagccagcccagcttctacagcggccccctgggccccacctaccccgccgcccagctgggccccagaggcgccgccggctacagctggagcccccagagaagcatgccccccagacccggctaccccggcacccccatgggcgccagcggccccggctaccccctgagaggcggcagagcccccagccccggctacccccagcagagcccctaccccgccaccggcggcaagcccccctaccccatccagccccagctgcccagcttccccggccagccccagcccagcgtgcccctgcagcccccctacccccccggccccgcccccccctacggcttcccccccccccccggccccgcctggcccggctactag

SEQ ID NO: 104891 - DNA, 447 bp, synthetic construct
  misc_feature 1..447: note = Description of Artificial Sequence: Synthetic coding sequence
  source 1..447: mol_type = other DNA
atggagaccctgaaggacaagaccctgcaggagctggaggagctgcagaacgacagcgaggccatcgaccagctggccctggagagccccgaggtgcaggacctgcagctggagagagagatggccctggccaccaacagaagcctggccgagagaaacctggagttccagggccccctggagatcagcagaagcaacctgagcgacagataccaggagctgagaaagctggtggagagatgccaggagcagaaggccaagctggagaagttcagcagcgccctgcagcccggcaccctgctggacctgctgcaggtggagggcatgaagatcgaggaggagagcgaggccatggccgagaagttcctggagggcgaggtgcccctggagaccttcctggagaacttcagcagcatgagaatgctgagccacctgagaagagtgtag

SEQ ID NO: 104892 - DNA, 969 bp, synthetic construct
  misc_feature 1..969: note = Description of Artificial Sequence: Synthetic coding sequence
  source 1..969: mol_type = other DNA
atggagaccctgaaggacaagaccctgcaggagctggaggagctgcagaacgacagcgaggccatcgaccagctggccctggagagccccgaggtgcaggacctgcagctggagagagagatggccctggccaccaacagaagcctggccgagagaaacctggagttccagggccccctggagatcagcagaagcaacctgagcgacagataccaggagctgagaaagctggtggagagatgccaggagcagaaggccaagctggagaagttcagcagcgccctgcagcccggcaccctgctggacctgctgcaggtggagggcatgaagatcgaggaggagagcgaggccatggccgagaagttcctggagggcgaggtgcccctggagaccttcctggagaacttcagcagcatgagaatgctgagccacctgagaagagtgagagtggagaagctgcaggaggtggtgagaaagcccagagccagccaggagctggccggcgacgcccccccccccagaccccccccccccgtgagacccgtgccccagggcaccccccccgtggtggaggagcagccccagccccccctggccatgcccccctaccccctgccctacagccccagccccagcctgcccgtgggccccaccgcccacggcgccctgccccccgcccccttccccgtggtgagccagcccagcttctacagcggccccctgggccccacctaccccgccgcccagctgggccccagaggcgccgccggctacagctggagcccccagagaagcatgccccccagacccggctaccccggcacccccatgggcgccagcggccccggctaccccctgagaggcggcagagcccccagccccggctacccccagcagagcccctaccccgccaccggcggcaagcccccctaccccatccagccccagctgcccttcagcctgtgctag

SEQ ID NO: 104893 - DNA, 756 bp, synthetic construct
  misc_feature 1..756: note = Description of Artificial Sequence: Synthetic coding sequence
  source 1..756: mol_type = other DNA
atgtacagagccagagccgccagagccggccccgagcccggcagccccggcagattcggcatcctgagcaccggccagctgagagacctgctgcaggacgagcccaagctggacagaatcgtgagactgagcagaaagttccagggcctgcagctggagagagaggcctgcctggccagcaactacgccctggccaaggagaacctggccctgagacccagactggagatgggcagagccgccctggccatcaagtaccaggagctgagagaggtggccgagaactgcgccgacaagctgcagagactggaggagagcatgcacagatggagcccccactgcgccctgggctggctgcaggccgagctggaggaggccgagcaggaggccgaggagcagatggagcagctgctgctgggcgagcagagcctggaggccttcctgcccgccttccagagaggcagagccctggcccacctgagaagaacccaggccgagaagctgcaggagctgctgagaagaagagagagaagcgcccagcccgcccccaccagcgccgccgacccccccaagagcttccccgccgccgccgtgctgcccaccggcgccgccagaggcccccccgccgtgcccagaagcctgccccccctggacagcagacccgtgccccccctgaagggcagccccggctgccccctgggccccgcccccctgctgagccccagacccagccagcccgagcccccccacagatag

SEQ ID NO: 104894 - DNA, 2628 bp, synthetic construct
  misc_feature 1..2628: note = Description of Artificial Sequence: Synthetic coding sequence
  source 1..2628: mol_type = other DNA
atgcacgacgccttcgagcccgtgcccatcctggagaagctgcccctgcagatcgactgcctggccgcctgggaggagtggctgctggtgggcaccaagcagggccacctgctgctgtacagaatcagaaaggacgtgggctgcaacagattcgaggtgaccctggagaagagcaacaagaacttcagcaagaagatccagcagatccacgtggtgagccagttcaagatcctggtgagcctgctggagaacaacatctacgtgcacgacctgctgaccttccagcagatcaccaccgtgagcaaggccaagggcgccagcctgttcacctgcgacctgcagcacaccgagaccggcgaggaggtgctgagaatgtgcgtggccgtgaagaagaagctgcagctgtacttctggaaggacagagagttccacgagctgcagggcgacttcagcgtgcccgacgtgcccaagagcatggcctggtgcgagaacagcatctgcgtgggcttcaagagagactactacctgatcagagtggacggcaagggcagcatcaaggagctgttccccaccggcaagcagctggagcccctggtggcccccctggccgacggcaaggtggccgtgggccaggacgacctgaccgtggtgctgaacgaggagggcatctgcacccagaagtgcgccctgaactggaccgacatccccgtggccatggagcaccagcccccctacatcatcgccgtgctgcccagatacgtggagatcagaaccttcgagcccagactgctggtgcagagcatcgagctgcagagacccagattcatcaccagcggcggcagcaacatcatctacgtggccagcaaccacttcgtgtggagactgatccccgtgcccatggccacccagatccagcagctgctgcaggacaagcagttcgagctggccctgcagctggccgagatgaaggacgacagcgacagcgagaagcagcagcagatccaccacatcaagaacctgtacgccttcaacctgttctgccagaagagattcgacgagagcatgcaggtgttcgccaagctgggcaccgaccccacccacgtgatgggcctgtaccccgacctgctgcccaccgactacagaaagcagctgcagtaccccaaccccctgcccgtgctgagcggcgccgagctggagaaggcccacctggccctgatcgactacctgacccagaagagaagccagctggtgaagaagctgaacgacagcgaccaccagagcagcaccagccccctgatggagggcacccccaccatcaagagcaagaagaagctgctgcagatcatcgacaccaccctgctgaagtgctacctgcacaccaacgtggccctggtggcccccctgctgagactggagaacaaccactgccacatcgaggagagcgagcacgtgctgaagaaggcccacaagtacagcgagctgatcatcctgtacgagaagaagggcctgcacgagaaggccctgcaggtgctggtggaccagagcaagaaggccaacagccccctgaagggccacgagagaaccgtgcagtacctgcagcacctgggcaccgagaacctgcacctgatcttcagctacagcgtgtgggtgctgagagacttccccgaggacggcctgaagatcttcaccgaggacctgcccgaggtggagagcctgcccagagacagagtgctgggcttcctgatcgagaacttcaagggcctggccatcccctacctggagcacatcatccacgtgtgggaggagaccggcagcagattccacaactgcctgatccagctgtactgcgagaaggtgcagggcctgatgaaggagtacctgctgagcttccccgccggcaagacccccgtgcccgccggcgaggaggagggcgagctgggcgagtacagacagaagctgctgatgttcctggagatcagcagctactacgaccccggcagactgatctgcgacttccccttcgacggcctgctggaggagagagccctgctgctgggcagaatgggcaagcacgagcaggccctgttcatctacgtgcacatcctgaaggacaccagaatggccgaggagtactgccacaagcactacgacagaaacaaggacggcaacaaggacgtgtacctgagcctgctgagaatgtacctgagcccccccagcatccactgcctgggccccatcaagctggagctgctggagcccaaggccaacctgcaggccgccctgcaggtgctggagctgcaccacagcaagctggacaccaccaaggccctgaacctgctgcccgccaacacccagatcaacgacatcagaatcttcctggagaaggtgctggaggagaacgcccagaagaagagattcaaccaggtgctgaagaacctgctgcacgccgagttcctgagagtgcaggaggagagaatcctgcaccagcaggtgaagtgcatcatcaccgaggagaaggtgtgcatggtgtgcaagaagaagatcggcaacagcgccttcgccagataccccaacggcgtggtggtgcactacttctgcagcaaggaggtgaaccccgccgacacctag

SEQ ID NO: 104895 - DNA, 2661 bp, synthetic construct
  misc_feature 1..2661: note = Description of Artificial Sequence: Synthetic coding sequence
  source 1..2661: mol_type = other DNA
atgcacgacgccttcgagcccgtgcccatcctggagaagctgcccctgcagatcgactgcctggccgcctgggaggagtggctgctggtgggcaccaagcagggccacctgctgctgtacagaatcagaaaggacgtggtgcccgccgacgtggccagccccgagagcggcagctgcaacagattcgaggtgaccctggagaagagcaacaagaacttcagcaagaagatccagcagatccacgtggtgagccagttcaagatcctggtgagcctgctggagaacaacatctacgtgcacgacctgctgaccttccagcagatcaccaccgtgagcaaggccaagggcgccagcctgttcacctgcgacctgcagcacaccgagaccggcgaggaggtgctgagaatgtgcgtggccgtgaagaagaagctgcagctgtacttctggaaggacagagagttccacgagctgcagggcgacttcagcgtgcccgacgtgcccaagagcatggcctggtgcgagaacagcatctgcgtgggcttcaagagagactactacctgatcagagtggacggcaagggcagcatcaaggagctgttccccaccggcaagcagctggagcccctggtggcccccctggccgacggcaaggtggccgtgggccaggacgacctgaccgtggtgctgaacgaggagggcatctgcacccagaagtgcgccctgaactggaccgacatccccgtggccatggagcaccagcccccctacatcatcgccgtgctgcccagatacgtggagatcagaaccttcgagcccagactgctggtgcagagcatcgagctgcagagacccagattcatcaccagcggcggcagcaacatcatctacgtggccagcaaccacttcgtgtggagactgatccccgtgcccatggccacccagatccagcagctgctgcaggacaagcagttcgagctggccctgcagctggccgagatgaaggacgacagcgacagcgagaagcagcagcagatccaccacatcaagaacctgtacgccttcaacctgttctgccagaagagattcgacgagagcatgcaggtgttcgccaagctgggcaccgaccccacccacgtgatgggcctgtaccccgacctgctgcccaccgactacagaaagcagctgcagtaccccaaccccctgcccgtgctgagcggcgccgagctggagaaggcccacctggccctgatcgactacctgacccagaagagaagccagctggtgaagaagctgaacgacagcgaccaccagagcagcaccagccccctgatggagggcacccccaccatcaagagcaagaagaagctgctgcagatcatcgacaccaccctgctgaagtgctacctgcacaccaacgtggccctggtggcccccctgctgagactggagaacaaccactgccacatcgaggagagcgagcacgtgctgaagaaggcccacaagtacagcgagctgatcatcctgtacgagaagaagggcctgcacgagaaggccctgcaggtgctggtggaccagagcaagaaggccaacagccccctgaagggccacgagagaaccgtgcagtacctgcagcacctgggcaccgagaacctgcacctgatcttcagctacagcgtgtgggtgctgagagacttccccgaggacggcctgaagatcttcaccgaggacctgcccgaggtggagagcctgcccagagacagagtgctgggcttcctgatcgagaacttcaagggcctggccatcccctacctggagcacatcatccacgtgtgggaggagaccggcagcagattccacaactgcctgatccagctgtactgcgagaaggtgcagggcctgatgaaggagtacctgctgagcttccccgccggcaagacccccgtgcccgccggcgaggaggagggcgagctgggcgagtacagacagaagctgctgatgttcctggagatcagcagctactacgaccccggcagactgatctgcgacttccccttcgacggcctgctggaggagagagccctgctgctgggcagaatgggcaagcacgagcaggccctgttcatctacgtgcacatcctgaaggacaccagaatggccgaggagtactgccacaagcactacgacagaaacaaggacggcaacaaggacgtgtacctgagcctgctgagaatgtacctgagcccccccagcatccactgcctgggccccatcaagctggagctgctggagcccaaggccaacctgcaggccgccctgcaggtgctggagctgcaccacagcaagctggacaccaccaaggccctgaacctgctgcccgccaacacccagatcaacgacatcagaatcttcctggagaaggtgctggaggagaacgcccagaagaagagattcaaccaggtgctgaagaacctgctgcacgccgagttcctgagagtgcaggaggagagaatcctgcaccagcaggtgaagtgcatcatcaccgaggagaaggtgtgcatggtgtgcaagaagaagatcggcaacagcgccttcgccagataccccaacggcgtggtggtgcactacttctgcagcaaggaggtgaaccccgccgacacctag

SEQ ID NO: 104896 - DNA, 1314 bp, synthetic construct
  misc_feature 1..1314: note = Description of Artificial Sequence: Synthetic coding sequence
  source 1..1314: mol_type = other DNA
atgaccaccagcaccctgcagaaggccatcgacctggtgaccaaggccaccgaggaggacaaggccaagaactacgaggaggccctgagactgtaccagcacgccgtggagtacttcctgcacgccatcaagtacgaggcccacagcgacaaggccaaggagagcatcagagccaagtgcgtgcagtacctggacagagccgagaagctgaaggactacctgagaagcaaggagaagcacggcaagaagcccgtgaaggagaaccagagcgagggcaagggcagcgacagcgacagcgagggcgacaaccccgagaagaagaagctgcaggagcagctgatgggcgccgtggtgatggagaagcccaacatcagatggaacgacgtggccggcctggagggcgccaaggaggccctgaaggaggccgtgatcctgcccatcaagttcccccacctgttcaccggcaagagaaccccctggagaggcatcctgctgttcggcccccccggcaccggcaagagctacctggccaaggccgtggccaccgaggccaacaacagcaccttcttcagcgtgagcagcagcgacctgatgagcaagtggctgggcgagagcgagaagctggtgaagaacctgttcgagctggccagacagcacaagcccagcatcatcttcatcgacgaggtggacagcctgtgcggcagcagaaacgagaacgagagcgaggccgccagaagaatcaagaccgagttcctggtgcagatgcagggcgtgggcaacaacaacgacggcaccctggtgctgggcgccaccaacatcccctgggtgctggacagcgccatcagaagaagattcgagaagagaatctacatccccctgcccgaggaggccgccagagcccagatgttcagactgcacctgggcagcaccccccacaacctgaccgacgccaacatccacgagctggccagaaagaccgagggctacagcggcgccgacatcagcatcatcgtgagagacagcctgatgcagcccgtgagaaaggtgcagagcgccacccacttcaagaaggtgtgcggccccagcagaaccaaccccagcatgatgatcgacgacctgctgaccccctgcagccccggcgaccccggcgccatggagatgacctggatggacgtgcccggcgacaagctgctggagcccgtggtgtgcatgagcgacatgctgagaagcctggccaccaccagacccaccgtgaacgccgacgacctgctgaaggtgaagaagttcagcgaggacttcggccaggagagctag

SEQ ID NO: 104897 - DNA, 1335 bp, synthetic construct
  misc_feature 1..1335: note = Description of Artificial Sequence: Synthetic coding sequence
  source 1..1335: mol_type = other DNA
atgagcagcaccagccccaacctgcagaaggccatcgacctggccagcaaggccgcccaggaggacaaggccggcaactacgaggaggccctgcagctgtaccagcacgccgtgcagtacttcctgcacgtggtgaagtacgaggcccagggcgacaaggccaagcagagcatcagagccaagtgcaccgagtacctggacagagccgagaagctgaaggagtacctgaagaacaaggagaagaaggcccagaagcccgtgaaggagggccagcccagccccgccgacgagaagggcaacgacagcgacggcgagggcgagagcgacgaccccgagaagaagaagctgcagaaccagctgcagggcgccatcgtgatcgagagacccaacgtgaagtggagcgacgtggccggcctggagggcgccaaggaggccctgaaggaggccgtgatcctgcccatcaagttcccccacctgttcaccggcaagagaaccccctggagaggcatcctgctgttcggcccccccggcaccggcaagagctacctggccaaggccgtggccaccgaggccaacaacagcaccttcttcagcatcagcagcagcgacctggtgagcaagtggctgggcgagagcgagaagctggtgaagaacctgttccagctggccagagagaacaagcccagcatcatcttcatcgacgagatcgacagcctgtgcggcagcagaagcgagaacgagagcgaggccgccagaagaatcaagaccgagttcctggtgcagatgcagggcgtgggcgtggacaacgacggcatcctggtgctgggcgccaccaacatcccctgggtgctggacagcgccatcagaagaagattcgagaagagaatctacatccccctgcccgagccccacgccagagccgccatgttcaagctgcacctgggcaccacccagaacagcctgaccgaggccgacttcagagagctgggcagaaagaccgacggctacagcggcgccgacatcagcatcatcgtgagagacgccctgatgcagcccgtgagaaaggtgcagagcgccacccacttcaagaaggtgagaggccccagcagagccgaccccaaccacctggtggacgacctgctgaccccctgcagccccggcgaccccggcgccatcgagatgacctggatggacgtgcccggcgacaagctgctggagcccgtggtgagcatgagcgacatgctgagaagcctgagcaacaccaagcccaccgtgaacgagcacgacctgctgaagctgaagaagttcaccgaggacttcggccaggagggctag

SEQ ID NO: 104898 - DNA, 630 bp, synthetic construct
  misc_feature 1..630: note = Description of Artificial Sequence: Synthetic coding sequence
  source 1..630: mol_type = other DNA
atggccgaggccgaggagcaggagaccggcagcctggaggagagcaccgacgagagcgaggaggaggagagcgaggaggagcccaagctgaagtacgagagactgagcaacggcgtgaccgagatcctgcagaaggacgccgccagctgcatgaccgtgcacgacaagttcctggccctgggcacccactacggcaaggtgtacctgctggacgtgcagggcaacatcacccagaagttcgacgtgagccccgtgaagatcaaccagatcagcctggacgagagcggcgagcacatgggcgtgtgcagcgaggacggcaaggtgcaggtgttcggcctgtacagcggcgaggagttccacgagaccttcgactgccccatcaagatcatcgccgtgcacccccacttcgtgagaagcagctgcaagcagttcgtgaccggcggcaagaagctgctgctgttcgagagaagctggatgaacagatggaagagcgccgtgctgcacgagggcgagggcaacatcagaagcgtgaagtggagaggccacctgatcgcctgggccaacaacatgagcaagaagcccgaggcctggagagtggccaagaagatgaagagctacctgaacaactag

SEQ ID NO: 104899 - DNA, 2565 bp, synthetic construct
  misc_feature 1..2565: note = Description of Artificial Sequence: Synthetic coding sequence
  source 1..2565: mol_type = other DNA
atggccgaggccgaggagcaggagaccggcagcctggaggagagcaccgacgagagcgaggaggaggagagcgaggaggagcccaagctgaagtacgagagactgagcaacggcgtgaccgagatcctgcagaaggacgccgccagctgcatgaccgtgcacgacaagttcctggccctgggcacccactacggcaaggtgtacctgctggacgtgcagggcaacatcacccagaagttcgacgtgagccccgtgaagatcaaccagatcagcctggacgagagcggcgagcacatgggcgtgtgcagcgaggacggcaaggtgcaggtgttcggcctgtacagcggcgaggagttccacgagaccttcgactgccccatcaagatcatcgccgtgcacccccacttcgtgagaagcagctgcaagcagttcgtgaccggcggcaagaagctgctgctgttcgagagaagctggatgaacagatggaagagcgccgtgctgcacgagggcgagggcaacatcagaagcgtgaagtggagaggccacctgatcgcctgggccaacaacatgggcgtgaagatcttcgacatcatcagcaagcagagaatcaccaacgtgcccagagacgacatcagcctgagacccgacatgtacccctgcagcctgtgctggaaggacaacgtgaccctgatcatcggctggggcaccagcgtgaaggtgtgcagcgtgaaggagagacacgccagcgagatgagagacctgcccagcagatacgtggagatcgtgagccagttcgagaccgagttctacatcagcggcctggcccccctgtgcgaccagctggtggtgctgagctacgtgaaggagatcagcgagaagaccgagagagagtactgcgccagacccagactggacatcatccagcccctgagcgagacctgcgaggagatcagcagcgacgccctgaccgtgagaggcttccaggagaacgagtgcagagactaccacctggagtacagcgagggcgagagcctgttctacatcgtgagccccagagacgtggtggtggccaaggagagagaccaggacgaccacatcgactggctgctggagaagaagaagtacgaggaggccctgatggccgccgagatcagccagaagaacatcaagagacacaagatcctggacatcggcctggcctacatcaaccacctggtggagagaggcgactacgacatcgccgccagaaagtgccagaagatcctgggcaagaacgccgccctgtgggagtacgaggtgtacaagttcaaggagatcggccagctgaaggccatcagcccctacctgcccagaggcgaccccgtgctgaagcccctgatctacgagatgatcctgcacgagttcctggagagcgactacgagggcttcgccaccctgatcagagagtggcccggcgacctgtacaacaacagcgtgatcgtgcaggccgtgagagaccacctgaagaaggacagccagaacaagaccctgctgaagaccctggccgagctgtacacctacgacaagaactacggcaacgccctggagatctacctgaccctgagacacaaggacgtgttccagctgatccacaagcacaacctgttcagcagcatcaaggacaagatcgtgctgctgatggacttcgacagcgagaaggccgtggacatgctgctggacaacgaggacaagatcagcatcaagaaggtggtggaggagctggaggacagacccgagctgcagcacgtgtacctgcacaagctgttcaagagagaccaccacaagggccagagataccacgagaagcagatcagcctgtacgccgagtacgacagacccaacctgctgcccttcctgagagacagcacccactgccccctggagaaggccctggagatctgccagcagagaaacttcgtggaggagaccgtgtacctgctgagcagaatgggcaacagcagaagcgccctgaagatgatcatggaggagctgcacgacgtggacaaggccatcgagttcgccaaggagcaggacgacggcgagctgtgggaggacctgatcctgtacagcatcgacaagccccccttcatcaccggcctgctgaacaacatcggcacccacgtggaccccatcctgctgatccacagaatcaaggagggcatggagatccccaacctgagagacagcctggtgaagatcctgcaggactacaacctgcagatcctgctgagagagggctgcaagaagatcctggtggccgacagcctgagcctgctgaagaagatgcacagaacccagatgaagggcgtgctggtggacgaggagaacatctgcgagagctgcctgagccccatcctgcccagcgacgccgccaagcccttcagcgtggtggtgttccactgcagacacatgttccacaaggagtgcctgcccatgcccagcatgaacagcgccgcccagttctgcaacatctgcagcgccaagaacagaggccccggcagcgccatcctggagatgaagaagtag

SEQ ID NO: 104900 - DNA, 2490 bp, synthetic construct
  misc_feature 1..2490: note = Description of Artificial Sequence: Synthetic coding sequence
  source 1..2490: mol_type = other DNA
atggccgaggccgaggagcaggagaccggcagcctggaggagagcaccgacgagagcgaggaggaggagagcgaggaggagcccaagctgaagtacgagagactgagcaacggcgtgaccgagatcctgcagaaggacgccgccagctgcatgaccgtgcacgacaagttcctggccctgggcacccactacggcaaggtgtacctgctggacgtgcagggcaacatcacccagaagttcgacgtggtgcaggtgttcggcctgtacagcggcgaggagttccacgagaccttcgactgccccatcaagatcatcgccgtgcacccccacttcgtgagaagcagctgcaagcagttcgtgaccggcggcaagaagctgctgctgttcgagagaagctggatgaacagatggaagagcgccgtgctgcacgagggcgagggcaacatcagaagcgtgaagtggagaggccacctgatcgcctgggccaacaacatgggcgtgaagatcttcgacatcatcagcaagcagagaatcaccaacgtgcccagagacgacatcagcctgagacccgacatgtacccctgcagcctgtgctggaaggacaacgtgaccctgatcatcggctggggcaccagcgtgaaggtgtgcagcgtgaaggagagacacgccagcgagatgagagacctgcccagcagatacgtggagatcgtgagccagttcgagaccgagttctacatcagcggcctggcccccctgtgcgaccagctggtggtgctgagctacgtgaaggagatcagcgagaagaccgagagagagtactgcgccagacccagactggacatcatccagcccctgagcgagacctgcgaggagatcagcagcgacgccctgaccgtgagaggcttccaggagaacgagtgcagagactaccacctggagtacagcgagggcgagagcctgttctacatcgtgagccccagagacgtggtggtggccaaggagagagaccaggacgaccacatcgactggctgctggagaagaagaagtacgaggaggccctgatggccgccgagatcagccagaagaacatcaagagacacaagatcctggacatcggcctggcctacatcaaccacctggtggagagaggcgactacgacatcgccgccagaaagtgccagaagatcctgggcaagaacgccgccctgtgggagtacgaggtgtacaagttcaaggagatcggccagctgaaggccatcagcccctacctgcccagaggcgaccccgtgctgaagcccctgatctacgagatgatcctgcacgagttcctggagagcgactacgagggcttcgccaccctgatcagagagtggcccggcgacctgtacaacaacagcgtgatcgtgcaggccgtgagagaccacctgaagaaggacagccagaacaagaccctgctgaagaccctggccgagctgtacacctacgacaagaactacggcaacgccctggagatctacctgaccctgagacacaaggacgtgttccagctgatccacaagcacaacctgttcagcagcatcaaggacaagatcgtgctgctgatggacttcgacagcgagaaggccgtggacatgctgctggacaacgaggacaagatcagcatcaagaaggtggtggaggagctggaggacagacccgagctgcagcacgtgtacctgcacaagctgttcaagagagaccaccacaagggccagagataccacgagaagcagatcagcctgtacgccgagtacgacagacccaacctgctgcccttcctgagagacagcacccactgccccctggagaaggccctggagatctgccagcagagaaacttcgtggaggagaccgtgtacctgctgagcagaatgggcaacagcagaagcgccctgaagatgatcatggaggagctgcacgacgtggacaaggccatcgagttcgccaaggagcaggacgacggcgagctgtgggaggacctgatcctgtacagcatcgacaagccccccttcatcaccggcctgctgaacaacatcggcacccacgtggaccccatcctgctgatccacagaatcaaggagggcatggagatccccaacctgagagacagcctggtgaagatcctgcaggactacaacctgcagatcctgctgagagagggctgcaagaagatcctggtggccgacagcctgagcctgctgaagaagatgcacagaacccagatgaagggcgtgctggtggacgaggagaacatctgcgagagctgcctgagccccatcctgcccagcgacgccgccaagcccttcagcgtggtggtgttccactgcagacacatgttccacaaggagtgcctgcccatgcccagcatgaacagcgccgcccagttctgcaacatctgcagcgccaagaacagaggccccggcagcgccatcctggagatgaagaagtag

SEQ ID NO: 104901 - DNA, 1617 bp, synthetic construct
  misc_feature 1..1617: note = Description of Artificial Sequence: Synthetic coding sequence
  source 1..1617: mol_type = other DNA
atggtgtacacccagagcgagatcctgcagaaggaggtgtacctgttcgagagaatcgacagccagaacagagagatcatgaagcacctgaaggccatctgcttcctgagacccaccaaggagaacgtggactacatcatccaggagctgagaagacccaagtacaccatctacttcatctacttcagcaacgtgatcagcaagagcgacgtgaagagcctggccgaggccgacgagcaggaggtggtggccgaggtgcagcaggtgatcaccaaggagtacgagctgttcgagttcagaagaaccgaggtgccccccctgctgctgatcctggacagatgcgacgacgccatcacccccctgctgaaccagtggacctaccaggccatggtgcacgagctgctgggcatcaacaacaacagaatcgacctgagcagagtgcccggcatcagcaaggacctgagagaggtggtgctgagcgccgagaacgacgagttctacgccaacaacatgtacctgaacttcgccgagatcggcagcaacatcaagaacctgatggaggacttccagaagaagaagcccaaggagcagcagaagctggagagcatcgccgacatgaaggccttcgtggagaactacccccagttcaagaagatgagcggcaccgtgagcaagcacgtgaccgtggtgggcgagctgagcagactggtgagcgagagaaacctgctggaggtgagcgaggtggagcaggagctggcctgccagaacgaccacagcagcgccctgcagaacatcaagagactgctgcagaaccccaaggtgaccgagttcgacgccgccagactggtgatgctgtacgccctgcactacgagagacacagcagcaacagcctgcccggcctgatgatggacctgagaaacaagggcgtgagcgagaagtacagaaagctggtgagcgccgtggtggagtacggcggcaagagagtgagaggcagcgacctgttcagccccaaggacgccgtggccatcaccaagcagttcctgaagggcctgaagggcgtggagaacgtgtacacccagcaccagcccttcctgcacgagaccctggaccacctgatcaagggcagactgaaggagaacctgtacccctacctgggccccagcaccctgagagacagaccccaggacatcatcgtgttcgtgatcggcggcgccacctacgaggaggccctgaccgtgtacaacctgaacagaaccacccccggcgtgagaatcgtgctgggcggcaccaccgtgcacaacaccaagagagacggcgtgagcctgtgcagccccgcctggttcagaacccccggcctgaagagaagcaccagactgagcctgcccaagtgctgggactacagcttccccagaggcagcagcggcttctggaccgcccagcccaagcagggcgagctgagcagccacatcaaggtgagcgagcagaagatgaagagatggctgggcgagggccacagcttcctgagctgcccccactacagattcagcctgctgaacaagggcgtgggcgagcagctgtgggtgctgtgctggctgctggagctgatcagcagatag

SEQ ID NO: 104902 - DNA, 1713 bp, synthetic construct
  misc_feature 1..1713: note = Description of Artificial Sequence: Synthetic coding sequence
  source 1..1713: mol_type = other DNA
atgaacgtggtgttcgccgtgaagcagtacatcagcaagatgatcgaggacagcggccccggcatgaaggtgctgctgatggacaaggagaccaccggcatcgtgagcatggtgtacacccagagcgagatcctgcagaaggaggtgtacctgttcgagagaatcgacagccagaacagagagatcatgaagcacctgaaggccatctgcttcctgagacccaccaaggagaacgtggactacatcatccaggagctgagaagacccaagtacaccatctacttcatctacttcagcaacgtgatcagcaagagcgacgtgaagagcctggccgaggccgacgagcaggaggtggtggccgaggtgcaggagttctacggcgactacatcgccgtgaacccccacctgttcagcctgaacatcctgggctgctgccagggcagaaactgggaccccgcccagctgagcagaaccacccagggcctgaccgccctgctgctgagcctgaagaagtgccccatgatcagataccagctgagcagcgaggccgccaagagactggccgagtgcgtgaagcaggtgatcaccaaggagtacgagctgttcgagttcagaagaaccgaggtgccccccctgctgctgatcctggacagatgcgacgacgccatcacccccctgctgaaccagtggacctaccaggccatggtgcacgagctgctgggcatcaacaacaacagaatcgacctgagcagagtgcccggcatcagcaaggacctgagagaggtggtgctgagcgccgagaacgacgagttctacgccaacaacatgtacctgaacttcgccgagatcggcagcaacatcaagaacctgatggaggacttccagaagaagaagcccaaggagcagcagaagctggagagcatcgccgacatgaaggccttcgtggagaactacccccagttcaagaagatgagcggcaccgtgagcaagcacgtgaccgtggtgggcgagctgagcagactggtgagcgagagaaacctgctggaggtgagcgaggtggagcaggagctggcctgccagaacgaccacagcagcgccctgcagaacatcaagagactgctgcagaaccccaaggtgaccgagttcgacgccgccagactggtgatgctgtacgccctgcactacgagagacacagcagcaacagcctgcccggcctgatgatggacctgagaaacaagggcgtgagcgagaagtacagaaagctggtgagcgccgtggtggagtacggcggcaagagagtgagaggcagcgacctgttcagccccaaggacgccgtggccatcaccaagcagttcctgaagggcctgaagggcgtggagaacgtgtacacccagcaccagcccttcctgcacgagaccctggaccacctgatcaagggcagactgaaggagaacctgtacccctacctgggccccagcaccctgagagacagaccccaggacatcatcgtgttcgtgatcggcggcgccacctacgaggaggccctgaccgtgtacaacctgaacagaaccacccccggcgtgagaatcgtgctgggcggcaccaccgtgcacaacaccaagagcttcctggaggaggtgctggccagcggcctgcacagcagaagcaaggagagcagccaggtgaccagcagaagcgccagcagaagatag

SEQ ID NO: 104903 - DNA, 951 bp, synthetic construct
  misc_feature 1..951: note = Description of Artificial Sequence: Synthetic coding sequence
  source 1..951: mol_type = other DNA
atgaacgtggtgttcgccgtgaagcagtacatcagcaagatgatcgaggacagcggccccggcatgaaggtgctgctgatggacaaggagaccaccggcatcgtgagcatggtgtacacccagagcgagatcctgcagaaggaggtgtacctgttcgagagaatcgacagccagaacagagagatcatgaagcacctgaaggccatctgcttcctgagacccaccaaggagaacgtggactacatcatccaggagctgagaagacccaagtacaccatctacttcatctacttcagcaacgtgatcagcaagagcgacgtgaagagcctggccgaggccgacgagcaggaggtggtggccgaggtgcagcaggtgatcaccaaggagtacgagctgttcgagttcagaagaaccgaggtgccccccctgctgctgatcctggacagatgcgacgacgccatcacccccctgctgaaccagtggacctaccaggccatggtgcacgagctgctgggcatcaacaacaacagaatcgacctgagcagagtgcccggcatcagcaaggacctgagagaggtggtgctgagcgccgagaacgacgagttctacgccaacaacatgtacctgaacttcgccgagatcggcagcaacatcaagaacctgatggaggacttccagaagaagaagcccaaggagcagcagaagctggagagcatcgccgacatgaaggccttcgtggagaactacccccagttcaagaagatgagcggcaccgtgagcaagcacgtgaccgtggtgggcgagctgagcagactggtgagcgagagaaacctgctggaggtgagcgaggtggagcaggagctggcctgccagaacgaccacagcagcgccctgcagaacatcaagagactgctgcagaaccccaaggtgaccgagttcgacgccgcctag

SEQ ID NO: 104904 - DNA, 1305 bp, synthetic construct
  misc_feature 1..1305: note = Description of Artificial Sequence: Synthetic coding sequence
  source 1..1305: mol_type = other DNA
atgaacgtggtgttcgccgtgaagcagtacatcagcaagatgatcgaggacagcggccccggcatgaaggtgctgctgatggacaaggagaccaccggcatcgtgagcatggtgtacacccagagcgagatcctgcagaaggaggtgtacctgttcgagagaatcgacagccagaacagagagatcatgaagcacctgaaggccatctgcttcctgagacccaccaaggagaacgtggactacatcatccaggagctgagaagacccaagtacaccatctacttcatctacttcagcaacgtgatcagcaagagcgacgtgaagagcctggccgaggccgacgagcaggaggtggtggccgaggtgcagcaggtgatcaccaaggagtacgagctgttcgagttcagaagaaccgaggtgccccccctgctgctgatcctggacagatgcgacgacgccatcacccccctgctgaaccagtggacctaccaggccatggtgcacgagctgctgggcatcaacaacaacagaatcgacctgagcagagtgcccggcatcagcaaggacctgagagaggtggtgctgagcgccgagaacgacgagttctacgccaacaacatgtacctgaacttcgccgagatcggcagcaacatcaagaacctgatggaggacttccagaagaagaagcccaaggagcagcagaagctggagagcatcgccgacatgaaggccttcgtggagaactacccccagttcaagaagatgagcggcaccgtgagcaagcacgtgaccgtggtgggcgagctgagcagactggtgagcgagagaaacctgctggaggtgagcgaggtggagcaggagctggcctgccagaacgaccacagcagcgccctgcagaacatcaagagactgctgcagaaccccaaggtgaccgagttcgacgccgccagactggtgatgctgtacgccctgcactacgagagacacagcagcaacagcctgcccggcctgatgatggacctgagaaacaagggcgtgagcgagaagtacagaaagctggtgagcgccgtggtggagtacggcggcaagagagtgagaggcagcgacctgttcagccccaaggacgccgtggccatcaccaagcagttcctgaagggcctgaagggcgtggagaacgtgtacacccagcaccagcccttcctgcacgagaccctggaccacctgatcaagggcagactgaaggagaacctgtacccctacctgggccccagcaccctgagagacagaatcgccagctgcctgtag

SEQ ID NO: 104905 - DNA, 1338 bp, synthetic construct
  misc_feature 1..1338: note = Description of Artificial Sequence: Synthetic coding sequence
  source 1..1338: mol_type = other DNA
atgaacgtggtgttcgccgtgaacccccacctgttcagcctgaacatcctgggctgctgccagggcagaaactgggaccccgcccagctgagcagaaccacccagggcctgaccgccctgctgctgagcctgaagaagtgccccatgatcagataccagctgagcagcgaggccgccaagagactggccgagtgcgtgaagcaggtgatcaccaaggagtacgagctgttcgagttcagaagaaccgaggtgccccccctgctgctgatcctggacagatgcgacgacgccatcacccccctgctgaaccagtggacctaccaggccatggtgcacgagctgctgggcatcaacaacaacagaatcgacctgagcagagtgcccggcatcagcaaggacctgagagaggtggtgctgagcgccgagaacgacgagttctacgccaacaacatgtacctgaacttcgccgagatcggcagcaacatcaagaacctgatggaggacttccagaagaagaagcccaaggagcagcagaagctggagagcatcgccgacatgaaggccttcgtggagaactacccccagttcaagaagatgagcggcaccgtgagcaagcacgtgaccgtggtgggcgagctgagcagactggtgagcgagagaaacctgctggaggtgagcgaggtggagcaggagctggcctgccagaacgaccacagcagcgccctgcagaacatcaagagactgctgcagaaccccaaggtgaccgagttcgacgccgccagactggtgatgctgtacgccctgcactacgagagacacagcagcaacagcctgcccggcctgatgatggacctgagaaacaagggcgtgagcgagaagtacagaaagctggtgagcgccgtggtggagtacggcggcaagagagtgagaggcagcgacctgttcagccccaaggacgccgtggccatcaccaagcagttcctgaagggcctgaagggcgtggagaacgtgtacacccagcaccagcccttcctgcacgagaccctggaccacctgatcaagggcagactgaaggagaacctgtacccctacctgggccccagcaccctgagagacagaccccaggacatcatcgtgttcgtgatcggcggcgccacctacgaggaggccctgaccgtgtacaacctgaacagaaccacccccggcgtgagaatcgtgctgggcggcaccaccgtgcacaacaccaagagcttcctggaggaggtgctggccagcggcctgcacagcagaagcaaggagagcagccaggtgaccagcagaagcgccagcagaagatag

SEQ ID NO: 104906 - DNA, 1128 bp, synthetic construct
  misc_feature 1..1128: note = Description of Artificial Sequence: Synthetic coding sequence
  source 1..1128: mol_type = other DNA
atgagcctggccggcggcagagcccccagaaagaccgccggcaacagactgagcggcctgctggaggccgaggaggaggacgagttctaccagaccacctacggcggcttcaccgaggagagcggcgacgacgagtaccagggcgaccagagcgacaccgaggacgaggtggacagcgacttcgacatcgacgagggcgacgagcccagcagcgacggcgaggccgaggagcccagaagaaagagaagagtggtgaccaaggcctacaaggagcccctgaagagcctgagacccagaaaggtgaacacccccgccggcagcagccagaaggccagagaggagaaggccctgctgcccctggagctgcaggacgacggcagcgacagcagaaagagcatgagacagagcaccgccgagcacaccagacagaccttcctgagagtgcaggagagacagggccagagcagaagaagaaagggcccccactgcgagagacccctgacccaggaggagctgctgagagaggccaagatcaccgaggagctgaacctgagaagcctggagacctacgagagactggaggccgacaagaagaagcaggtgcacaagaagagaaagtgccccggccccatcatcacctaccacagcgtgaccgtgcccctggtgggcgagcccggccccaaggaggagaacgtggacatcgagggcagcctgtgcttcagcctgagcttcgtgctgagactggaccccgcccccagcgtgagcgccctgaccccccacgccggcaccggccccgtgaacccccccgccagatgcagcagaaccttcatcaccttcagcgacgacgccaccttcgaggagtggttcccccagggcagaccccccaaggtgcccgtgagagaggtgtgccccgtgacccacagacccgccctgtacagagaccccgtgaccgacatcccctacgccaccgccagagccttcaagatcatcagagaggcctacaagaagtacatcaccgcccacggcctgccccccaccgccagcgccctgggccccggcccccccccccccgagcccctgcccggcagcggccccagagccctgagacagaagatcgtgatcaagtag

SEQ ID NO: 104907 - DNA, 1095 bp, synthetic construct
  misc_feature 1..1095: note = Description of Artificial Sequence: Synthetic coding sequence
  source 1..1095: mol_type = other DNA
atgagcctggccggcggcagagcccccagaaagaccgccggcaacagactgagcggcctgctggaggccgaggaggaggacgagttctaccagaccacctacggcggcttcaccgaggagagcggcgacgacgagtaccagggcgaccagagcgacaccgaggacgaggtggacagcgacttcgacatcgacgagggcgacgagcccagcagcgacggcgaggccgaggagcccagaagaaagagaagagtggtgaccaaggcctacaaggagcccctgaagagcctgagacccagaaaggtgaacacccccgccggcagcagccagaaggccagagaggagaaggccctgctgcccctggagctgcaggacgacggcagcgacagcagaaagagcatgagacagagcaccgccgagcacaccagacagaccttcctgagagtgcaggagagacagggccagagcagaagaagaaagggcccccactgcgagagacccctgacccaggaggagctgctgagagaggccaagatcaccgaggagctgaacctgagaagcctggagacctacgagagactggaggccgacaagaagaagcaggtgcacaagaagagaaagtgccccggccccatcatcacctaccacagcgtgaccgtgcccctggtgggcgagcccggccccaaggaggagaacgtggacatcgagggcctggaccccgcccccagcgtgagcgccctgaccccccacgccggcaccggccccgtgaacccccccgccagatgcagcagaaccttcatcaccttcagcgacgacgccaccttcgaggagtggttcccccagggcagaccccccaaggtgcccgtgagagaggtgtgccccgtgacccacagacccgccctgtacagagaccccgtgaccgacatcccctacgccaccgccagagccttcaagatcatcagagaggcctacaagaagtacatcaccgcccacggcctgccccccaccgccagcgccctgggccccggcccccccccccccgagcccctgcccggcagcggccccagagccctgagacagaagatcgtgatcaagtag

SEQ ID NO: 104908 - DNA, 1221 bp, synthetic construct
  misc_feature 1..1221: note = Description of Artificial Sequence: Synthetic coding sequence
  source 1..1221: mol_type = other DNA
atggccgagaacggcaagaactgcgaccagagaagagtggccatgaacaaggagcaccacaacggcaacttcaccgaccccagcagcgtgaacgagaagaagagaagagagagagaggagagacagaacatcgtgctgtggagacagcccctgatcaccctgcagtacttcagcctggagatcctggtgatcctgaaggagtggaccagcaagctgtggcacagacagagcatcgtggtgagcttcctgctgctgctggccgtgctgatcgccacctactacgtggagggcgtgcaccagcagtacgtgcagagaatcgagaagcagttcctgctgtacgcctactggatcggcctgggcatcctgagcagcgtgggcctgggcaccggcctgcacaccttcctgctgtacctgggcccccacatcgccagcgtgaccctggccgcctacgagtgcaacagcgtgaacttccccgagcccccctaccccgaccagatcatctgccccgacgaggagggcaccgagggcaccatcagcctgtggagcatcatcagcaaggtgagaatcgaggcctgcatgtggggcatcggcaccgccatcggcgagctgcccccctacttcatggccagagccgccagactgagcggcgccgagcccgacgacgaggagtaccaggagttcgaggagatgctggagcacgccgagagcgcccaggacttcgccagcagagccaagctggccgtgcagaagctggtgcagaaggtgggcttcttcggcatcctggcctgcgccagcatccccaaccccctgttcgacctggccggcatcacctgcggccacttcctggtgcccttctggaccttcttcggcgccaccctgatcggcaaggccatcatcaagatgcacatccagaagatcttcgtgatcatcaccttcagcaagcacatcgtggagcagatggtggccttcatcggcgccgtgcccggcatcggccccagcctgcagaagcccttccaggagtacctggaggcccagagacagaagctgcaccacaagagcgagatgggcaccccccagggcgagaactggctgagctggatgttcgagaagctggtggtggtgatggtgtgctacttcatcctgagcatcatcaacagcatggcccagagctacgccaagagaatccagcagagactgaacagcgaggagaagaccaagtag

SEQ ID NO: 104909 - DNA, 930 bp, synthetic construct
  misc_feature 1..930: note = Description of Artificial Sequence: Synthetic coding sequence
  source 1..930: mol_type = other DNA
atggacctgaagtacgtgcagagaatcgagaagcagttcctgctgtacgcctactggatcggcctgggcatcctgagcagcgtgggcctgggcaccggcctgcacaccttcctgctgtacctgggcccccacatcgccagcgtgaccctggccgcctacgagtgcaacagcgtgaacttccccgagcccccctaccccgaccagatcatctgccccgacgaggagggcaccgagggcaccatcagcctgtggagcatcatcagcaaggtgagaatcgaggcctgcatgtggggcatcggcaccgccatcggcgagctgcccccctacttcatggccagagccgccagactgagcggcgccgagcccgacgacgaggagtaccaggagttcgaggagatgctggagcacgccgagagcgcccaggacttcgccagcagagccaagctggccgtgcagaagctggtgcagaaggtgggcttcttcggcatcctggcctgcgccagcatccccaaccccctgttcgacctggccggcatcacctgcggccacttcctggtgcccttctggaccttcttcggcgccaccctgatcggcaaggccatcatcaagatgcacatccagaagatcttcgtgatcatcaccttcagcaagcacatcgtggagcagatggtggccttcatcggcgccgtgcccggcatcggccccagcctgcagaagcccttccaggagtacctggaggcccagagacagaagctgcaccacaagagcgagatgggcaccccccagggcgagaactggctgagctggatgttcgagaagctggtggtggtgatggtgtgctacttcatcctgagcatcatcaacagcatggcccagagctacgccaagagaatccagcagagactgaacagcgaggagaagaccaagtag

SEQ ID NO: 104910 - DNA, 819 bp, synthetic construct
  misc_feature 1..819: note = Description of Artificial Sequence: Synthetic coding sequence
  source 1..819: mol_type = other DNA
atggacctgaagggcccccacatcgccagcgtgaccctggccgcctacgagtgcaacagcgtgaacttccccgagcccccctaccccgaccagatcatctgccccgacgaggagggcaccgagggcaccatcagcctgtggagcatcatcagcaaggtgagaatcgaggcctgcatgtggggcatcggcaccgccatcggcgagctgcccccctacttcatggccagagccgccagactgagcggcgccgagcccgacgacgaggagtaccaggagttcgaggagatgctggagcacgccgagagcgcccaggacttcgccagcagagccaagctggccgtgcagaagctggtgcagaaggtgggcttcttcggcatcctggcctgcgccagcatccccaaccccctgttcgacctggccggcatcacctgcggccacttcctggtgcccttctggaccttcttcggcgccaccctgatcggcaaggccatcatcaagatgcacatccagaagatcttcgtgatcatcaccttcagcaagcacatcgtggagcagatggtggccttcatcggcgccgtgcccggcatcggccccagcctgcagaagcccttccaggagtacctggaggcccagagacagaagctgcaccacaagagcgagatgggcaccccccagggcgagaactggctgagctggatgttcgagaagctggtggtggtgatggtgtgctacttcatcctgagcatcatcaacagcatggcccagagctacgccaagagaatccagcagagactgaacagcgaggagaagaccaagtag

SEQ ID NO: 104911 - DNA, 645 bp, synthetic construct
  misc_feature 1..645: note = Description of Artificial Sequence: Synthetic coding sequence
  source 1..645: mol_type = other DNA
atgtggggcatcggcaccgccatcggcgagctgcccccctacttcatggccagagccgccagactgagcggcgccgagcccgacgacgaggagtaccaggagttcgaggagatgctggagcacgccgagagcgcccaggacttcgccagcagagccaagctggccgtgcagaagctggtgcagaaggtgggcttcttcggcatcctggcctgcgccagcatccccaaccccctgttcgacctggccggcatcacctgcggccacttcctggtgcccttctggaccttcttcggcgccaccctgatcggcaaggccatcatcaagatgcacatccagaagatcttcgtgatcatcaccttcagcaagcacatcgtggagcagatggtggccttcatcggcgccgtgcccggcatcggccccagcctgcagaagcccttccaggagtacctggaggcccagagacagaagctgcaccacaagagcgagatgggcaccccccagggcgagaactggctgagctggatgttcgagaagctggtggtggtgatggtgtgctacttcatcctgagcatcatcaacagcatggcccagagctacgccaagagaatccagcagagactgaacagcgaggagaagaccaagtag

SEQ ID NO: 104912 - DNA, 1053 bp, synthetic construct
  misc_feature 1..1053: note = Description of Artificial Sequence: Synthetic coding sequence
  source 1..1053: mol_type = other DNA
atggccgagaacggcaagaactgcgaccagagaagagtggccatgaacaaggagcaccacaacggcaacttcaccgaccccagcagcgtgaacgagaagaagagaagagagagagaggagagacagaacatcgtgctgtggagacagcccctgatcaccctgcagtacttcagcctggagatcctggtgatcctgaaggagtggaccagcaagctgtggcacagacagagcatcgtggtgagcttcctgctgctgctggccgtgctgatcgccacctactacgtggagggcgtgcaccagcagtacgtgcagagaatcgagaagcagttcctgctgtacgcctactggatcggcctgggcatcctgagcagcgtgggcctgggcaccggcctgcacaccttcctgctgtacctgggcatcggcaccgccatcggcgagctgcccccctacttcatggccagagccgccagactgagcggcgccgagcccgacgacgaggagtaccaggagttcgaggagatgctggagcacgccgagagcgcccaggacttcgccagcagagccaagctggccgtgcagaagctggtgcagaaggtgggcttcttcggcatcctggcctgcgccagcatccccaaccccctgttcgacctggccggcatcacctgcggccacttcctggtgcccttctggaccttcttcggcgccaccctgatcggcaaggccatcatcaagatgcacatccagaagatcttcgtgatcatcaccttcagcaagcacatcgtggagcagatggtggccttcatcggcgccgtgcccggcatcggccccagcctgcagaagcccttccaggagtacctggaggcccagagacagaagctgcaccacaagagcgagatgggcaccccccagggcgagaactggctgagctggatgttcgagaagctggtggtggtgatggtgtgctacttcatcctgagcatcatcaacagcatggcccagagctacgccaagagaatccagcagagactgaacagcgaggagaagaccaagtag

SEQ ID NO: 104913 - DNA, 1443 bp, synthetic construct
  misc_feature 1..1443: note = Description of Artificial Sequence: Synthetic coding sequence
  source 1..1443: mol_type = other DNA
atgagcgacgtggccatcgtgaaggagggctggctgcacaagagaggcgagtacatcaagacctggagacccagatacttcctgctgaagaacgacggcaccttcatcggctacaaggagagaccccaggacgtggaccagagagaggcccccctgaacaacttcagcgtggcccagtgccagctgatgaagaccgagagacccagacccaacaccttcatcatcagatgcctgcagtggaccaccgtgatcgagagaaccttccacgtggagacccccgaggagagagaggagtggaccaccgccatccagaccgtggccgacggcctgaagaagcaggaggaggaggagatggacttcagaagcggcagccccagcgacaacagcggcgccgaggagatggaggtgagcctggccaagcccaagcacagagtgaccatgaacgagttcgagtacctgaagctgctgggcaagggcaccttcggcaaggtgatcctggtgaaggagaaggccaccggcagatactacgccatgaagatcctgaagaaggaggtgatcgtggccaaggacgaggtggcccacaccctgaccgagaacagagtgctgcagaacagcagacaccccttcctgaccgccctgaagtacagcttccagacccacgacagactgtgcttcgtgatggagtacgccaacggcggcgagctgttcttccacctgagcagagagagagtgttcagcgaggacagagccagattctacggcgccgagatcgtgagcgccctggactacctgcacagcgagaagaacgtggtgtacagagacctgaagctggagaacctgatgctggacaaggacggccacatcaagatcaccgacttcggcctgtgcaaggagggcatcaaggacggcgccaccatgaagaccttctgcggcacccccgagtacctggcccccgaggtgctggaggacaacgactacggcagagccgtggactggtggggcctgggcgtggtgatgtacgagatgatgtgcggcagactgcccttctacaaccaggaccacgagaagctgttcgagctgatcctgatggaggagatcagattccccagaaccctgggccccgaggccaagagcctgctgagcggcctgctgaagaaggaccccaagcagagactgggcggcggcagcgaggacgccaaggagatcatgcagcacagattcttcgccggcatcgtgtggcagcacgtgtacgagaagaagctgagcccccccttcaagccccaggtgaccagcgagaccgacaccagatacttcgacgaggagttcaccgcccagatgatcaccatcaccccccccgaccaggacgacagcatggagtgcgtggacagcgagagaagaccccacttcccccagttcagctacagcgccagcggcaccgcctag

SEQ ID NO: 104914 - DNA, 1443 bp, synthetic construct; identical to SEQ ID NO: 104913
  misc_feature 1..1443: note = Description of Artificial Sequence: Synthetic coding sequence
  source 1..1443: mol_type = other DNA

SEQ ID NO: 104915 - DNA, 1257 bp, synthetic construct
  misc_feature 1..1257: note = Description of Artificial Sequence: Synthetic coding sequence
  source 1..1257: mol_type = other DNA
atgaagaccgagagacccagacccaacaccttcatcatcagatgcctgcagtggaccaccgtgatcgagagaaccttccacgtggagacccccgaggagagagaggagtggaccaccgccatccagaccgtggccgacggcctgaagaagcaggaggaggaggagatggacttcagaagcggcagccccagcgacaacagcggcgccgaggagatggaggtgagcctggccaagcccaagcacagagtgaccatgaacgagttcgagtacctgaagctgctgggcaagggcaccttcggcaaggtgatcctggtgaaggagaaggccaccggcagatactacgccatgaagatcctgaagaaggaggtgatcgtggccaaggacgaggtggcccacaccctgaccgagaacagagtgctgcagaacagcagacaccccttcctgaccgccctgaagtacagcttccagacccacgacagactgtgcttcgtgatggagtacgccaacggcggcgagctgttcttccacctgagcagagagagagtgttcagcgaggacagagccagattctacggcgccgagatcgtgagcgccctggactacctgcacagcgagaagaacgtggtgtacagagacctgaagctggagaacctgatgctggacaaggacggccacatcaagatcaccgacttcggcctgtgcaaggagggcatcaaggacggcgccaccatgaagaccttctgcggcacccccgagtacctggcccccgaggtgctggaggacaacgactacggcagagccgtggactggtggggcctgggcgtggtgatgtacgagatgatgtgcggcagactgcccttctacaaccaggaccacgagaagctgttcgagctgatcctgatggaggagatcagattccccagaaccctgggccccgaggccaagagcctgctgagcggcctgctgaagaaggaccccaagcagagactgggcggcggcagcgaggacgccaaggagatcatgcagcacagattcttcgccggcatcgtgtggcagcacgtgtacgagaagaagctgagcccccccttcaagccccaggtgaccagcgagaccgacaccagatacttcgacgaggagttcaccgcccagatgatcaccatcaccccccccgaccaggacgacagcatggagtgcgtggacagcgagagaagaccccacttcccccagttcagctacagcgccagcggcaccgcctag

SEQ ID NO: 104916 - DNA, 1443 bp, synthetic construct; identical to SEQ ID NO: 104913
  misc_feature 1..1443: note = Description of Artificial Sequence: Synthetic coding sequence
  source 1..1443: mol_type = other DNA

SEQ ID NO: 104917 - DNA, 1443 bp, synthetic construct; identical to SEQ ID NO: 104913
  misc_feature 1..1443: note = Description of Artificial Sequence: Synthetic coding sequence
  source 1..1443: mol_type = other DNA

SEQ ID NO: 104918 - DNA, 1443 bp, synthetic construct; identical to SEQ ID NO: 104913
  misc_feature 1..1443: note = Description of Artificial Sequence: Synthetic coding sequence
  source 1..1443: mol_type = other DNA

SEQ ID NO: 104919 - DNA, 279 bp, synthetic construct
  misc_feature 1..279: note = Description of Artificial Sequence: Synthetic coding sequence
  source 1..279: mol_type = other DNA
atgagcgacgtggccatcgtgaaggagggctggctgcacaagagaggcgagtacatcaagacctggagacccagatacttcctgctgaagaacgacggcaccttcatcggctacaaggagagaccccaggacgtggaccagagagaggcccccctgaacaacttcagcgtggcccagtgccagctgatgaagaccgagagacccagacccaacaccttcatcatcagatgcctgcagtggaccaccgtgatcgagagaaccttccacgtggagacctag

SEQ ID NO: 104920 - DNA, 2421 bp, synthetic construct
  misc_feature 1..2421: note = Description of Artificial Sequence: Synthetic coding sequence
  source 1..2421: mol_type = other DNA
atggccagcggcgccgacagcaagggcgacgacctgagcaccgccatcctgaagcagaagaacagacccaacagactgatcgtggacgaggccatcaacgaggacaacagcgtggtgagcctgagccagcccaagatggacgagctgcagctgttcagaggcgacaccgtgctgctgaagggcaagaagagaagagaggccgtgtgcatcgtgctgagcgacgacacctgcagcgacgagaagatcagaatgaacagagtggtgagaaacaacctgagagtgagactgggcgacgtgatcagcatccagccctgccccgacgtgaagtacggcaagagaatccacgtgctgcccatcgacgacaccgtggagggcatcaccggcaacctgttcgaggtgtacctgaagccctacttcctggaggcctacagacccatcagaaagggcgacatcttcctggtgagaggcggcatgagagccgtggagttcaaggtggtggagaccgaccccagcccctactgcatcgtggcccccgacaccgtgatccactgcgagggcgagcccatcaagagagaggacgaggaggagagcctgaacgaggtgggctacgacgacatcggcggctgcagaaagcagctggcccagatcaaggagatggtggagctgcccctgagacaccccgccctgttcaaggccatcggcgtgaagccccccagaggcatcctgctgtacggcccccccggcaccggcaagaccctgatcgccagagccgtggccaacgagaccggcgccttcttcttcctgatcaacggccccgagatcatgagcaagctggccggcgagagcgagagcaacctgagaaaggccttcgaggaggccgagaagaacgcccccgccatcatcttcatcgacgagctggacgccatcgcccccaagagagagaagacccacggcgaggtggagagaagaatcgtgagccagctgctgaccctgatggacggcctgaagcagagagcccacgtgatcgtgatggccgccaccaacagacccaacagcatcgaccccgccctgagaagattcggcagattcgacagagaggtggacatcggcatccccgacgccaccggcagactggagatcctgcagatccacaccaagaacatgaagctggccgacgacgtggacctggagcaggtggccaacgagacccacggccacgtgggcgccgacctggccgccctgtgcagcgaggccgccctgcaggccatcagaaagaagatggacctgatcgacctggaggacgagaccatcgacgccgaggtgatgaacagcctggccgtgaccatggacgacttcagatgggccctgagccagagcaaccccagcgccctgagagagaccgtggtggaggtgccccaggtgacctgggaggacatcggcggcctggaggacgtgaagagagagctgcaggagctggtgcagtaccccgtggagcaccccgacaagttcctgaagttcggcatgacccccagcaagggcgtgctgttctacggcccccccggctgcggcaagaccctgctggccaaggccatcgccaacgagtgccaggccaacttcatcagcatcaagggccccgagctgctgaccatgtggttcggcgagagcgaggccaacgtgagagagatcttcgacaaggccagacaggccgccccctgcgtgctgttcttcgacgagctggacagcatcgccaaggccagaggcggcaacatcggcgacggcggcggcgccgccgacagagtgatcaaccagatcctgaccgagatggacggcatgagcaccaagaagaacgtgttcatcatcggcgccaccaacagacccgacatcatcgaccccgccatcctgagacccggcagactggaccagctgatctacatccccctgcccgacgagaagagcagagtggccatcctgaaggccaacctgagaaagagccccgtggccaaggacgtggacctggagttcctggccaagatgaccaacggcttcagcggcgccgacctgaccgagatctgccagagagcctgcaagctggccatcagagagagcatcgagagcgagatcagaagagagagagagagacagaccaaccccagcgccatggaggtggaggaggacgaccccgtgcccgagatcagaagagaccacttcgaggaggccatgagattcgccagaagaagcgtgagcgacaacgacatcagaaagtacgagatgttcgcccagaccctgcagcagagcagaggcttcggcagcttcagattccccagcggcaaccagggcggcgccggccccagccagggcagcggcggcggcaccggcggcagcgtgtacaccgaggacaacgacgacgacctgtacggctag

SEQ ID NO: 104921 - DNA, 3669 bp, synthetic construct
  misc_feature 1..3669: note = Description of Artificial Sequence: Synthetic coding sequence
  source 1..3669: mol_type = other DNA
atgagccagcccccccccccccccccccccctgcccccccccccccccccccccgaggccccccagacccccagcagcctggccagcgccgccgccagcggcggcctgctgaagagaagagacagaagaatcctgagcggcagctgccccgaccccaagtgccaggccagactgttcttccccgccagcggcagcgtgagcatcgagtgcaccgagtgcggccagagacacgagcagcagcagctgctgggcgtggaggaggtgaccgaccccgacgtggtgctgcacaacctgctgagaaacgccctgctgggcgtgaccggcgcccccaagaagaacaccgagctggtgaaggtgatgggcctgagcaactaccactgcaagctgctgagccccatcctggccagatacggcatggacaagcagaccggcagagccaagctgctgagagacatgaaccagggcgagctgttcgactgcgccctgctgggcgacagagccttcctgatcgagcccgagcacgtgaacaccgtgggctacggcaaggacagaagcggcagcctgctgtacctgcacgacaccctggaggacatcaagagagccaacaagagccaggagtgcctgatccccgtgcacgtggacggcgacggccactgcctggtgcacgccgtgagcagagccctggtgggcagagagctgttctggcacgccctgagagagaacctgaagcagcacttccagcagcacctggccagataccaggccctgttccacgacttcatcgacgccgccgagtgggaggacatcatcaacgagtgcgaccccctgttcgtgccccccgagggcgtgcccctgggcctgagaaacatccacatcttcggcctggccaacgtgctgcacagacccatcatcctgctggacagcctgagcggcatgagaagcagcggcgactacagcgccaccttcctgcccggcctgatccccgccgagaagtgcaccggcaaggacggccacctgaacaagcccatctgcatcgcctggagcagcagcggcagaaaccactacatccccctggtgggcatcaagggcgccgccctgcccaagctgcccatgaacctgctgcccaaggcctggggcgtgccccaggacctgatcaagaagtacatcaagctggaggaggacggcggctgcgtgatcggcggcgacagaagcctgcaggacaagtacctgctgagactggtggccgccatggaggaggtgttcatggacaagcacggcatccaccccagcctggtggccgacgtgcaccagtacttctacagaagaaccggcgtgatcggcgtgcagcccgaggaggtgaccgccgccgccaagaaggccgtgatggacaacagactgcacaagtgcctgctgtgcggcgccctgagcgagctgcacgtgccccccgagtggctggcccccggcggcaagctgtacaacctggccaagagcacccacggccagctgagaaccgacaagaactacagcttccccctgaacaacctggtgtgcagctacgacagcgtgaaggacgtgctggtgcccgactacggcatgagcaacctgaccgcctgcaactggtgccacggcaccagcgtgagaaaggtgagaggcgacggcagcatcgtgtacctggacggcgacagaaccaacagcagaagcaccggcggcaagtgcggctgcggcttcaagcacttctgggacggcaaggagtacgacaacctgcccgaggccttccccatcaccctggagtggggcggcagagtggtgagagagaccgtgtactggttccagtacgagagcgacagcagcctgaacagcaacgtgtacgacgtggccatgaagctggtgaccaagcacttccccggcgagttcggcagcgagatcctggtgcagaaggtggtgcacaccatcctgcaccagaccgccaagaagaaccccgacgactacacccccgtgaacatcgacggcgcccacgcccagagagtgggcgacgtgcagggccaggagagcgagagccagctgcccaccaagatcatcctgaccggccagaagaccaagaccctgcacaaggaggagctgaacatgagcaagaccgagagaaccatccagcagaacatcaccgagcaggccagcgtgatgcagaagagaaagaccgagaagctgaagcaggagcagaagggccagcccagaaccgtgagccccagcaccatcagagacggccccagcagcgcccccgccacccccaccaaggccccctacagccccaccaccagcaaggagaagaagatcagaatcaccaccaacgacggcagacagagcatggtgaccctgaagagcagcaccaccttcttcgagctgcaggagagcatcgccagagagttcaacatccccccctacctgcagtgcatcagatacggcttcccccccaaggagctgatgcccccccaggccggcatggagaaggagcccgtgcccctgcagcacggcgacagaatcaccatcgagatcctgaagagcaaggccgagggcggccagagcgccgccgcccacagcgcccacaccgtgaagcaggaggacatcgccgtgaccggcaagctgagcagcaaggagctgcaggagcaggccgagaaggagatgtacagcctgtgcctgctggccaccctgatgggcgaggacgtgtggagctacgccaagggcctgccccacatgttccagcagggcggcgtgttctacagcatcatgaagaagaccatgggcatggccgacggcaagcactgcaccttcccccacctgcccggcaagaccttcgtgtacaacgccagcgaggacagactggagctgtgcgtggacgccgccggccacttccccatcggccccgacgtggaggacctggtgaaggaggccgtgagccaggtgagagccgaggccaccaccagaagcagagagagcagccccagccacggcctgctgaagctgggcagcggcggcgtggtgaagaagaagagcgagcagctgcacaacgtgaccgccttccagggcaagggccacagcctgggcaccgccagcggcaacccccacctggaccccagagccagagagaccagcgtggtgagaaagcacaacaccggcaccgacttcagcaacagcagcaccaagaccgagcccagcgtgttcaccgccagcagcagcaacagcgagctgatcagaatcgcccccggcgtggtgaccatgagagacggcagacagctggaccccgacctggtggaggcccagagaaagaagctgcaggagatggtgagcagcatccaggccagcatggacagacacctgagagaccagagcaccgagcagagccccagcgacctgccccagagaaagaccgaggtggtgagcagcagcgccaagagcggcagcctgcagaccggcctgcccgagagcttccccctgaccggcggcaccgagaacctgaacaccgagaccaccgacggctgcgtggccgacgccctgggcgccgccttcgccaccagaagcaaggcccagagaggcaacagcgtggaggagctggaggagatggacagccaggacgccgagatgaccaacaccaccgagcccatggaccacagctag

SEQ ID NO: 104922 - DNA, 3381 bp, synthetic construct; identical to SEQ ID NO: 74107
  misc_feature 1..3381: note = Description of Artificial Sequence: Synthetic coding sequence
  source 1..3381: mol_type = other DNA

SEQ ID NO: 104923 - DNA, 3795 bp, synthetic construct
  misc_feature 1..3795: note = Description of Artificial Sequence: Synthetic coding sequence
  source 1..3795: mol_type = other DNA
atgagcaccctgtacgtgagcccccaccccgacgccttccccagcctgagagccctgatcgccgccagatacggcgaggccggcgagggccccggctggggcggcgcccaccccagaatctgcctgcagcccccccccaccagcagaacccccttccccccccccagactgcccgccctggagcagggccccggcggcctgtgggtgtggggcgccaccgccgtggcccagctgctgtggcccgccggcctgggcggccccggcggcagcagagccgccgtgctggtgcagcagtgggtgagctacgccgacaccgagctgatccccgccgcctgcggcgccaccctgcccgccctgggcctgagaagcagcgcccaggacccccaggccgtgctgggcgccctgggcagagccctgagccccctggaggagtggctgagactgcacacctacctggccggcgaggcccccaccctggccgacctggccgccgtgaccgccctgctgctgcccttcagatacgtgctggacccccccgccagaagaatctggaacaacgtgaccagatggttcgtgacctgcgtgagacagcccgagttcagagccgtgctgggcgaggtggtgctgtacagcggcgccagacccctgagccaccagcccggccccgaggcccccgccctgcccaagaccgccgcccagctgaagaaggaggccaagaagagagagaagctggagaagttccagcagaagcagaagatccagcagcagcagcccccccccggcgagaagaagcccaagcccgagaagagagagaagagagaccccggcgtgatcacctacgacctgcccaccccccccggcgagaagaaggacgtgagcggccccatgcccgacagctacagccccagatacgtggaggccgcctggtacccctggtgggagcagcagggcttcttcaagcccgagtacggcagacccaacgtgagcgccgccaaccccagaggcgtgttcatgatgtgcatccccccccccaacgtgaccggcagcctgcacctgggccacgccctgaccaacgccatccaggacagcctgaccagatggcacagaatgagaggcgagaccaccctgtggaaccccggctgcgaccacgccggcatcgccacccaggtggtggtggagaagaagctgtggagagagcagggcctgagcagacaccagctgggcagagaggccttcctgcaggaggtgtggaagtggaaggaggagaagggcgacagaatctaccaccagctgaagaagctgggcagcagcctggactgggacagagcctgcttcaccatggaccccaagctgagcgccgccgtgaccgaggccttcgtgagactgcacgaggagggcatcatctacagaagcaccagactggtgaactggagctgcaccctgaacagcgccatcagcgacatcgaggtggacaagaaggagctgaccggcagaaccctgctgagcgtgcccggctacaaggagaaggtggagttcggcgtgctggtgagcttcgcctacaaggtgcagggcagcgacagcgacgaggaggtggtggtggccaccaccagaatcgagaccatgctgggcgacgtggccgtggccgtgcaccccaaggacaccagataccagcacctgaagggcaagaacgtgatccaccccttcctgagcagaagcctgcccatcgtgttcgacgagttcgtggacatggacttcggcaccggcgccgtgaagatcacccccgcccacgaccagaacgactacgaggtgggccagagacacggcctggaggccatcagcatcatggacagcagaggcgccctgatcaacgtgcccccccccttcctgggcctgcccagattcgaggccagaaaggccgtgctggtggccctgaaggagagaggcctgttcagaggcatcgaggacaaccccatggtggtgcccctgtgcaacagaagcaaggacgtggtggagcccctgctgagaccccagtggtacgtgagatgcggcgagatggcccaggccgccagcgccgccgtgaccagaggcgacctgagaatcctgcccgaggcccaccagagaacctggcacgcctggatggacaacatcagagagtggtgcatcagcagacagctgtggtggggccacagaatccccgcctacttcgtgaccgtgagcgaccccgccgtgccccccggcgaggaccccgacggcagatactgggtgagcggcagaaacgaggccgaggccagagagaaggccgccaaggagttcggcgtgagccccgacaagatcagcctgcagcaggacgaggacgtgctggacacctggttcagcagcggcctgttccccctgagcatcctgggctggcccaaccagagcgaggacctgagcgtgttctaccccggcaccctgctggagaccggccacgacatcctgttcttctgggtggccagaatggtgatgctgggcctgaagctgaccggcagactgcccttcagagaggtgtacctgcacgccatcgtgagagacgcccacggcagaaagatgagcaagagcctgggcaacgtgatcgaccccctggacgtgatctacggcatcagcctgcagggcctgcacaaccagctgctgaacagcaacctggaccccagcgaggtggagaaggccaaggagggccagaaggccgacttccccgccggcatccccgagtgcggcaccgacgccctgagattcggcctgtgcgcctacatgagccagggcagagacatcaacctggacgtgaacagaatcctgggctacagacacttctgcaacaagctgtggaacgccaccaagttcgccctgagaggcctgggcaagggcttcgtgcccagccccaccagccagcccggcggccacgagagcctggtggacagatggatcagaagcagactgaccgaggccgtgagactgagcaaccagggcttccaggcctacgacttccccgccgtgaccaccgcccagtacagcttctggctgtacgagctgtgcgacgtgtacctggagtgcctgaagcccgtgctgaacggcgtggaccaggtggccgccgagtgcgccagacagaccctgtacacctgcctggacgtgggcctgagactgctgagccccttcatgcccttcgtgaccgaggagctgttccagagactgcccagaagaatgccccaggccccccccagcctgtgcgtgaccccctaccccgagcccagcgagtgcagctggaaggaccccgaggccgaggccgccctggagctggccctgagcatcaccagagccgtgagaagcctgagagccgactacaacctgaccagaatcagacccgactgcttcctggaggtggccgacgaggccaccggcgccctggccagcgccgtgagcggctacgtgcaggccctggccagcgccggcgtggtggccgtgctggccctgggcgcccccgccccccagggctgcgccgtggccctggccagcgacagatgcagcatccacctgcagctgcagggcctggtggaccccgccagagagctgggcaagctgcaggccaagagagtggaggcccagagacaggcccagagactgagagagagaagagccgccagcggctaccccgtgaaggtgcccctggaggtgcaggaggccgacgaggccaagctgcagcagaccgaggccgagctgagaaaggtggacgaggccatcgccctgttccagaagatgctgtag

SEQ ID NO: 104924 - DNA, 525 bp, synthetic construct
  misc_feature 1..525: note = Description of Artificial Sequence: Synthetic coding sequence
  source 1..525: mol_type = other DNA
atgagcaccctgtacgtgagcccccaccccgacgccttccccagcctgagagccctgatcgccgccagatacggcgaggccggcgagggccccggctggggcggcgcccaccccagaatctgcctgcagcccccccccaccagcagaaccagcttccccccccccagactgcccgccctggagcagggccccggcggcctgtgggtgtggggcgccaccgccgtggcccagctgctgtggcccgccggcctgggcggccccggcggcagcagagccgccgtgctggtgcagcagtgggtgagctacgccgacaccgagctgatccccgccgcctgcggcgccaccctgcccgccctgggcctgagaagcagcgcccaggacccccaggccgtgctgggcgccctgggcagagccctgagccccctggaggagtggctgagactgcacacctacctggccggcgaggcccccaccctggccgacctggccgccgtgaccgccctgctgctgcccttcagatactag

SEQ ID NO: 104925 - DNA, 525 bp, synthetic construct; identical to SEQ ID NO: 104924
  misc_feature 1..525: note = Description of Artificial Sequence: Synthetic coding sequence
  source 1..525: mol_type = other DNA

SEQ ID NO: 104926 - DNA, 867 bp, synthetic construct
  misc_feature 1..867: note = Description of Artificial Sequence: Synthetic coding sequence
  source 1..867: mol_type = other DNA
tgaaaggagagaggcctgttcagaggcatcgaggacaaccccatggtggtgcccctgtgcaacagaagcaaggacgtggtggagcccctgctgagaccccagtgggagtggtgcatcagcagacagctgtggtggggccacagaatccccgcctacttcgtgaccgtgagcgaccccgccgtgccccccggcgaggaccccgacggcagatactgggtgagcggcagaaacgaggccgaggccagagagaaggccgccaaggagttcggcgtgagccccgacaagatcagcctgcagcaggacgaggacgtgctggacacctggttcagcagcggcctgttccccctgagcatcctgggctggcccaaccagagcgaggacctgagcgtgttctaccccggcaccctgctggagaccggccacgacatcctgttcttctgggtggccagaatggtgatgctgggcctgaagctgaccggcagactgcccttcagagaggtgtacctgcacgccatcgtgagagacgcccacggcagaaagatgagcaagagcctgggcaacgtgatcgaccccctggacgtgatctacggcatcagcctgcagggcctgcacaaccagctgctgaacagcaacctggaccccagcgaggtggagaaggccaaggagggccagaaggccgacttccccgccggcatccccgagtgcggcaccgacgccctgagattcggcctgtgcgcctacatgagccagggcagagacatcaacctggacgtgaacagaatcctgggctacagacacttctgcaacaagctgtggaacgccaccaagttcgccctgagaggcctgggcaagggcttcgtgccctag

SEQ ID NO: 104927 - DNA, 3795 bp, synthetic construct
  misc_feature 1..3795: note = Description of Artificial Sequence: Synthetic coding sequence
  source 1..3795: mol_type = other DNA
atgagcaccctgtacgtgagcccccaccccgacgccttccccagcctgagagccctgatcgccgccagatacggcgaggccggcgagggccccggctggggcggcgcccaccccagaatctgcctgcagcccccccccaccagcagaaccagcttccccccccccagactgcccgccctggagcagggccccggcggcctgtgggtgtggggcgccaccgccgtggcccagctgctgtggcccgccggcctgggcggccccggcggcagcagagccgccgtgctggtgcagcagtgggtgagctacgccgacaccgagctgatccccgccgcctgcggcgccaccctgcccgccctgggcctgagaagcagcgcccaggacccccaggccgtgctgggcgccctgggcagagccctgagccccctggaggagtggctgagactgcacacctacctggccggcgaggcccccaccctggccgacctggccgccgtgaccgccctgctgctgcccttcagatacgtgctggacccccccgccagaagaatctggaacaacgtgaccagatggttcgtgacctgcgtgagacagcccgagttcagagccgtgctgggcgaggtggtgctgtacagcggcgccagacccctgagccaccagcccggccccgaggcccccgccctgcccaagaccgccgcccagctgaagaaggaggccaagaagagagagaagctggagaagttccagcagaagcagaagatccagcagcagcagcccccccccggcgagaagaagcccaagcccgagaagagagagaagagagaccccggcgtgatcacctacgacctgcccaccccccccggcgagaagaaggacgtgagcggccccatgcccgacagctacagccccagatacgtggaggccgcctggtacccctggtgggagcagcagggcttcttcaagcccgagtacggcagacccaacgtgagcgccgccaaccccagaggcgtgttcatgatgtgcatccccccccccaacgtgaccggcagcctgcacctgggccacgccctgaccaacgccatccaggacagcctgaccagatggcacagaatgagaggcgagaccaccctgtggaaccccggctgcgaccacgccggcatcgccacccaggtggtggtggagaagaagctgtggagagagcagggcctgagcagacaccagctgggcagagaggccttcctgcaggaggtgtggaagtggaaggaggagaagggcgacagaatctaccaccagctgaagaagctgggcagcagcctggactgggacagagcctgcttcaccatggaccccaagctgagcgccgccgtgaccgaggccttcgtgagactgcacgaggagggcatcatctacagaagcaccagactggtgaactggagctgcaccctgaacagcgccatcagcgacatcgaggtggacaagaaggagctgaccggcagaaccctgctgagcgtgcccggctacaaggagaaggtggagttcggcgtgctggtgagcttcgcctacaaggtgcagggcagcgacagcgacgaggaggtggtggtggccaccaccagaatcgagaccatgctgggcgacgtggccgtggccgtgcaccccaaggacaccagataccagcacctgaagggcaagaacgtgatccaccccttcctgagcagaagcctgcccatcgtgttcgacgagttcgtggacatggacttcggcaccggcgccgtgaagatcacccccgcccacgaccagaacgactacgaggtgggccagagacacggcctggaggccatcagcatcatggacagcagaggcgccctgatcaacgtgcccccccccttcctgggcctgcccagattcgaggccagaaaggccgtgctggtggccctgaaggagagaggcctgttcagaggcatcgaggacaaccccatggtggtgcccctgtgcaacagaagcaaggacgtggtggagcccctgctgagaccccagtggtacgtgagatgcggcgagatggcccaggccgccagcgccgccgtgaccagaggcgacctgagaatcctgcccgaggcccaccagagaacctggcacgcctggatggacaacatcagagagtggtgcatcagcagacagctgtggtggggccacagaatccccgcctacttcgtgaccgtgagcgaccccgccgtgccccccggcgaggaccccgacggcagatactgggtgagcggcagaaacgaggccgaggccagagagaaggccgccaaggagttcggcgtgagccccgacaagatcagcctgcagcaggacgaggacgtgctggacacctggttcagcagcggcctgttccccctgagcatcctgggctggcccaaccagagcgaggacctgagcgtgttctaccccggcaccctgctggagaccggccacgacatcctgttcttctgggtggccagaatggtgatgctgggcctgaagctgaccggcagactgcccttcagagaggtgtacctgcacgccatcgtgagagacgcccacggcagaaagatgagcaagagcctgggcaacgtgatcgaccccctggacgtgatctacggcatcagcctgcagggcctgcacaaccagctgctgaacagcaacctggaccccagcgaggtggagaaggccaaggagggccagaaggccgacttccccgccggcatccccgagtgcggcaccgacgccctgagattcggcctgtgcgcctacatgagccagggcagagacatcaacctggacgtgaacagaatcctgggctacagacacttctgcaacaagctgtggaacgccaccaagttcgccctgagaggcctgggcaagggcttcgtgcccagccccaccagccagcccggcggccacgagagcctggtggacagatggatcagaagcagactgaccgaggccgtgagactgagcaaccagggcttccaggcctacgacttccccgccgtgaccaccgcccagtacagcttctggctgtacgagctgtgcgacgtgtacctggagtgcctgaagcccgtgctgaacggcgtggaccaggtggccgccgagtgcgccagacagaccctgtacacctgcctggacgtgggcctgagactgctgagccccttcatgcccttcgtgaccgaggagctgttccagagactgcccagaagaatgccccaggccccccccagcctgtgcgtgaccccctaccccgagcccagcgagtgcagctggaaggaccccgaggccgaggccgccctggagctggccctgagcatcaccagagccgtgagaagcctgagagccgactacaacctgaccagaatcagacccgactgcttcctggaggtggccgacgaggccaccggcgccctggccagcgccgtgagcggctacgtgcaggccctggccagcgccggcgtggtggccgtgctggccctgggcgcccccgccccccagggctgcgccgtggccctggccagcgacagatgcagcatccacctgcagctgcagggcctggtggaccccgccagagagctgggcaagctgcaggccaagagagtggaggcccagagacaggcccagagactgagagagagaagagccgccagcggctaccccgtgaaggtgcccctggaggtgcaggaggccgacgaggccaagctgcagcagaccgaggccgagctgagaaaggtggacgaggccatcgccctgttccagaagatgctgtag

SEQ ID NO: 104928 - DNA, 1101 bp, synthetic construct
  misc_feature 1..1101: note = Description of Artificial Sequence: Synthetic coding sequence
  source 1..1101: mol_type = other DNA
atgagcaccctgtacgtgagcccccaccccgacgccttccccagcctgagagccctgatcgccgccagatacggcgaggccggcgagggccccggctggggcggcgcccaccccagaatctgcctgcagcccccccccaccagcagaacccccttccccccccccagactgcccgccctggagcagggccccggcggcctgtgggtgtggggcgccaccgccgtggcccagctgctgtggcccgccggcctgggcggccccggcggcagcagagccgccgtgctggtgcagcagtgggtgagctacgccgacaccgagctgatccccgccgcctgcggcgccaccctgcccgccctgggcctgagaagcagcgcccaggacccccaggccgtgctgggcgccctgggcagagccctgagccccctggaggagtggctgagactgcacacctacctggccggcgaggcccccaccctggccgacctggccgccgtgaccgccctgctgctgcccttcagatacgtgctggacccccccgccagaagaatctggaacaacgtgaccagatggttcgtgacctgcgtgagacagcccgagttcagagccgtgctgggcgaggtggtgctgtacagcggcgccagacccctgagccaccagcccggccccgaggcccccgccctgcccaagaccgccgcccagctgaagaaggaggccaagaagagagagaagctggagaagttccagcagaagcagaagatccagcagcagcagcccccccccggcgagaagaagcccaagcccgagaagagagagaagagagaccccggcgtgatcacctacgacctgcccaccccccccggcgagaagaaggacgtgagcggccccatgcccgacagctacagccccagatacgtggaggccgcctggtacccctggtgggagcagcagggcttcttcaagcccgagtacggcagacccaacgtgagcgccgccaaccccagaggcgtgttcatgatgtgcatccccccccccaacgtgaccggcagcctgcacctgggccacgccctgaccaacgccatccaggacagcctgaccagatag

SEQ ID NO: 104929 - DNA, 525 bp, synthetic construct
  misc_feature 1..525: note = Description of Artificial Sequence: Synthetic coding sequence
  source 1..525: mol_type = other DNA
atgagcaccctgtacgtgagcccccaccccgacgccttccccagcctgagagccctgatcgccgccagatacggcgaggccggcgagggccccggctggggcggcgcccaccccagaatctgcctgcagcccccccccaccagcagaacccccttccccccccccagactgcccgccctggagcagggccccggcggcctgtgggtgtggggcgccaccgccgtggcccagctgctgtggcccgccggcctgggcggccccggcggcagcagagccgccgtgctggtgcagcagtgggtgagctacgccgacaccgagctgatccccgccgcctgcggcgccaccctgcccgccctgggcctgagaagcagcgcccaggacccccaggccgtgctgggcgccctgggcagagccctgagccccctggaggagtggctgagactgcacacctacctggccggcgaggcccccaccctggccgacctggccgccgtgaccgccctgctgctgcccttcagatactag

SEQ ID NO: 104930 - DNA, 3552 bp, synthetic construct
  misc_feature 1..3552: note = Description of Artificial Sequence: Synthetic coding sequence
  source 1..3552: mol_type = other DNA
tgaggcctgggcggccccggcggcagcagagccgccgtgctggtgcagcagtgggtgagctacgccgacaccgagctgatccccgccgcctgcggcgccaccctgcccgccctgggcctgagaagcagcgcccaggacccccaggccgtgctgggcgccctgggcagagccctgagccccctggaggagtggctgagactgcacacctacctggccggcgaggcccccaccctggccgacctggccgccgtgaccgccctgctgctgcccttcagatacgtgctggacccccccgccagaagaatctggaacaacgtgaccagatggttcgtgacctgcgtgagacagcccgagttcagagccgtgctgggcgaggtggtgctgtacagcggcgccagacccctgagccaccagcccggccccgaggcccccgccctgcccaagaccgccgcccagctgaagaaggaggccaagaagagagagaagctggagaagttccagcagaagcagaagatccagcagcagcagcccccccccggcgagaagaagcccaagcccgagaagagagagaagagagaccccggcgtgatcacctacgacctgcccaccccccccggcgagaagaaggacgtgagcggccccatgcccgacagctacagccccagatacgtggaggccgcctggtacccctggtgggagcagcagggcttcttcaagcccgagtacggcagacccaacgtgagcgccgccaaccccagaggcgtgttcatgatgtgcatccccccccccaacgtgaccggcagcctgcacctgggccacgccctgaccaacgccatccaggacagcctgaccagatggcacagaatgagaggcgagaccaccctgtggaaccccggctgcgaccacgccggcatcgccacccaggtggtggtggagaagaagctgtggagagagcagggcctgagcagacaccagctgggcagagaggccttcctgcaggaggtgtggaagtggaaggaggagaagggcgacagaatctaccaccagctgaagaagctgggcagcagcctggactgggacagagcctgcttcaccatggaccccaagctgagcgccgccgtgaccgaggccttcgtgagactgcacgaggagggcatcatctacagaagcaccagactggtgaactggagctgcaccctgaacagcgccatcagcgacatcgaggtggacaagaaggagctgaccggcagaaccctgctgagcgtgcccggctacaaggagaaggtggagttcggcgtgctggtgagcttcgcctacaaggtgcagggcagcgacagcgacgaggaggtggtggtggccaccaccagaatcgagaccatgctgggcgacgtggccgtggccgtgcaccccaaggacaccagataccagcacctgaagggcaagaacgtgatccaccccttcctgagcagaagcctgcccatcgtgttcgacgagttcgtggacatggacttcggcaccggcgccgtgaagatcacccccgcccacgaccagaacgactacgaggtgggccagagacacggcctggaggccatcagcatcatggacagcagaggcgccctgatcaacgtgcccccccccttcctgggcctgcccagattcgaggccagaaaggccgtgctggtggccctgaaggagagaggcctgttcagaggcatcgaggacaaccccatggtggtgcccctgtgcaacagaagcaaggacgtggtggagcccctgctgagaccccagtggtacgtgagatgcggcgagatggcccaggccgccagcgccgccgtgaccagaggcgacctgagaatcctgcccgaggcccaccagagaacctggcacgcctggatggacaacatcagagagtggtgcatcagcagacagctgtggtggggccacagaatccccgcctacttcgtgaccgtgagcgaccccgccgtgccccccggcgaggaccccgacggcagatactgggtgagcggcagaaacgaggccgaggccagagagaaggccgccaaggagttcggcgtgagccccgacaagatcagcctgcagcaggacgaggacgtgctggacacctggttcagcagcggcctgttccccctgagcatcctgggctggcccaaccagagcgaggacctgagcgtgttctaccccggcaccctgctggagaccggccacgacatcctgttcttctgggtggccagaatggtgatgctgggcctgaagctgaccggcagactgcccttcagagaggtgtacctgcacgccatcgtgagagacgcccacggcagaaagatgagcaagagcctgggcaacgtgatcgaccccctggacgtgatctacggcatcagcctgcagggcctgcacaaccagctgctgaacagcaacctggaccccagcgaggtggagaaggccaaggagggccagaaggccgacttccccgccggcatccccgagtgcggcaccgacgccctgagattcggcctgtgcgcctacatgagccagggcagagacatcaacctggacgtgaacagaatcctgggctacagacacttctgcaacaagctgtggaacgccaccaagttcgccctgagaggcctgggcaagggcttcgtgcccagccccaccagccagcccggcggccacgagagcctggtggacagatggatcagaagcagactgaccgaggccgtgagactgagcaaccagggcttccaggcctacgacttccccgccgtgaccaccgcccagtacagcttctggctgtacgagctgtgcgacgtgtacctggagtgcctgaagcccgtgctgaacggcgtggaccaggtggccgccgagtgcgccagacagaccctgtacacctgcctggacgtgggcctgagactgctgagccccttcatgcccttcgtgaccgaggagctgttccagagactgcccagaagaatgccccaggccccccccagcctgtgcgtgaccccctaccccgagcccagcgagtgcagctggaaggaccccgaggccgaggccgccctggagctggccctgagcatcaccagagccgtgagaagcctgagagccgactacaacctgaccagaatcagacccgactgcttcctggaggtggccgacgaggccaccggcgccctggccagcgccgtgagcggctacgtgcaggccctggccagcgccggcgtggtggccgtgctggccctgggcgcccccgccccccagggctgcgccgtggccctggccagcgacagatgcagcatccacctgcagctgcagggcctggtggaccccgccagagagctgggcaagctgcaggccaagagagtggaggcccagagacaggcccagagactgagagagagaagagccgccagcggctaccccgtgaaggtgcccctggaggtgcaggaggccgacgaggccaagctgcagcagaccgaggccgagctgagaaaggtggacgaggccatcgccctgttccagaagatgctgtag

SEQ ID NO: 104931 - DNA, 525 bp, synthetic construct; identical to SEQ ID NO: 104929
  misc_feature 1..525: note = Description of Artificial Sequence: Synthetic coding sequence
  source 1..525: mol_type = other DNA

SEQ ID NO: 104932 - DNA, 867 bp, synthetic construct; identical to SEQ ID NO: 104926
  misc_feature 1..867: note = Description of Artificial Sequence: Synthetic coding sequence
  source 1..867: mol_type = other DNA

SEQ ID NO: 104933 - DNA, 525 bp, synthetic construct; identical to SEQ ID NO: 104929
  misc_feature 1..525: note = Description of Artificial Sequence: Synthetic coding sequence
  source 1..525: mol_type = other DNA

SEQ ID NO: 104934 - DNA, 867 bp, synthetic construct; identical to SEQ ID NO: 104926
  misc_feature 1..867: note = Description of Artificial Sequence: Synthetic coding sequence
  source 1..867: mol_type = other DNA

SEQ ID NO: 104935 - DNA, 867 bp, synthetic construct; identical to SEQ ID NO: 104926
  misc_feature 1..867: note = Description of Artificial Sequence: Synthetic coding sequence
  source 1..867: mol_type = other DNA

SEQ ID NO: 104936 - DNA, 3795 bp, synthetic construct; identical to SEQ ID NO: 104927
  misc_feature 1..3795: note = Description of Artificial Sequence: Synthetic coding sequence
  source 1..3795: mol_type = other DNA

SEQ ID NO: 104937 - DNA, 525 bp, synthetic construct; identical to SEQ ID NO: 104929
  misc_feature 1..525: note = Description of Artificial Sequence: Synthetic coding sequence
  source 1..525: mol_type = other DNA

SEQ ID NO: 104938 - DNA, 894 bp, synthetic construct
  misc_feature 1..894: note = Description of Artificial Sequence: Synthetic coding sequence
  source 1..894: mol_type = other DNA
atgcccgacagctacagccccagatacgtggaggccgcctggtacccctggtgggagcagcagggcttcttcaagcccgagtacggcagacccaacgtgagcgccgccaaccccagaggcgtgttcatgatgtgcatccccccccccaacgtgaccggcagcctgcacctgggccacgccctgaccaacgccatccaggacagcctgaccagatggcacagaatgagaggcgagaccaccctgtggaaccccggctgcgaccacgccggcatcgccacccaggtggtggtggagaagaagctgtggagagagcagggcctgagcagacaccagctgggcagagaggccttcctgcaggaggtgtggaagtggaaggaggagaagggcgacagaatctaccaccagctgaagaagctgggcagcagcctggactgggacagagcctgcttcaccatggaccccaagctgagcgccgccgtgaccgaggccttcgtgagactgcacgaggagggcatcatctacagaagcaccagactggtgaactggagctgcaccctgaacagcgccatcagcgacatcgaggtggacaagaaggagctgaccggcagaaccctgctgagcgtgcccggctacaaggagaaggtggagttcggcgtgctggtgagcttcgcctacaaggtgcagggcagcgacagcgacgaggaggtggtggtggccaccaccagaatcgagaccatgctgggcgacgtggccgtggccgtgcaccccaaggacaccagataccagcacctgaagggcaagaacgtgatccaccccttcctgagcagaagcctgcccatcgtgttcgacgagttcgtggacatggacttcggcaccggccccgcccaggtgtag

SEQ ID NO: 104939 - DNA, 867 bp, synthetic construct; identical to SEQ ID NO: 104926
  misc_feature 1..867: note = Description of Artificial Sequence: Synthetic coding sequence
  source 1..867: mol_type = other DNA

SEQ ID NO: 104940 - DNA, 867 bp, synthetic construct; identical to SEQ ID NO: 104926
  misc_feature 1..867: note = Description of Artificial Sequence: Synthetic coding sequence
  source 1..867: mol_type = other DNA

SEQ ID NO: 104941 - DNA, 288 bp, synthetic construct
  misc_feature 1..288: note = Description of Artificial Sequence: Synthetic coding sequence
  source 1..288: mol_type = other DNA
tgacccgccggcctgggcggccccggcggcagcagagccgccgtgctggtgcagcagtgggtgagctacgccgacaccgagctgatccccgccgcctgcggcgccaccctgcccgccctgggcctgagaagcagcgcccaggacccccaggccgtgctgggcgccctgggcagagccctgagccccctggaggagtggctgagactgcacacctacctggccggcgaggcccccaccctggccgacctggccgccgtgaccgccctgctgctgcccttcagatactag

SEQ ID NO: 104942 - DNA, 3795 bp, synthetic construct; identical to SEQ ID NO: 104923
  misc_feature 1..3795: note = Description of Artificial Sequence: Synthetic coding sequence
  source 1..3795: mol_type = other DNA

SEQ ID NO: 104943 - DNA, 2031 bp, synthetic construct
  misc_feature 1..2031: note = Description of Artificial Sequence: Synthetic coding sequence
  source 1..2031: mol_type = other DNA
atgagcaccctgtacgtgagcccccaccccgacgccttccccagcctgagagccctgatcgccgccagatacggcgaggccggcgagggccccggctggggcggcgcccaccccagaatctgcagactgcccagattcgaggccagaaaggccgtgctggtggccctgaaggagagaggcctgttcagaggcatcgaggacaaccccatggtggtgcccctgtgcaacagaagcaaggacgtggtggagcccctgctgagaccccagtggtacgtgagatgcggcgagatggcccaggccgccagcgccgccgtgaccagaggcgacctgagaatcctgcccgaggcccaccagagaacctggcacgcctggatggacaacatcagagagtggtgcatcagcagacagctgtggtggggccacagaatccccgcctacttcgtgaccgtgagcgaccccgccgtgccccccggcgaggaccccgacggcagatactgggtgagcggcagaaacgaggccgaggccagagagaaggccgccaaggagttcggcgtgagccccgacaagatcagcctgcagcaggacgaggacgtgctggacacctggttcagcagcggcctgttccccctgagcatcctgggctggcccaaccagagcgaggacctgagcgtgttctaccccggcaccctgctggagaccggccacgacatcctgttcttctgggtggccagaatggtgatgctgggcctgaagctgaccggcagactgcccttcagagaggtgtacctgcacgccatcgtgagagacgcccacggcagaaagatgagcaagagcctgggcaacgtgatcgaccccctggacgtgatctacggcatcagcctgcagggcctgcacaaccagctgctgaacagcaacctggaccccagcgaggtggagaaggccaaggagggccagaaggccgacttccccgccggcatccccgagtgcggcaccgacgccctgagattcggcctgtgcgcctacatgagccagggcagagacatcaacctggacgtgaacagaatcctgggctacagacacttctgcaacaagctgtggaacgccaccaagttcgccctgagaggcctgggcaagggcttcgtgcccagccccaccagccagcccggcggccacgagagcctggtggacagatggatcagaagcagactgaccgaggccgtgagactgagcaaccagggcttccaggcctacgacttccccgccgtgaccaccgcccagtacagcttctggctgtacgagctgtgcgacgtgtacctggagtgcctgaagcccgtgctgaacggcgtggaccaggtggccgccgagtgcgccagacagaccctgtacacctgcctggacgtgggcctgagactgctgagccccttcatgcccttcgtgaccgaggagctgttccagagactgcccagaagaatgccccaggccccccccagcctgtgcgtgaccccctaccccgagcccagcgagtgcagctggaaggaccccgaggccgaggccgccctggagctggccctgagcatcaccagagccgtgagaagcctgagagccgactacaacctgaccagaatcagacccgactgcttcctggaggtggccgacgaggccaccggcgccctggccagcgccgtgagcggctacgtgcaggccctggccagcgccggcgtggtggccgtgctggccctgggcgcccccgccccccagggctgcgccgtggccctggccagcgacagatgcagcatccacctgcagctgcagggcctggtggaccccgccagagagctgggcaagctgcaggccaagagagtggaggcccagagacaggcccagagactgagagagagaagagccgccagcggctaccccgtgaaggtgcccctggaggtgcaggaggccgacgaggccaagctgcagcagaccgaggccgagctgagaaaggtggacgaggccatcgccctgttccagaagatgctgtag

SEQ ID NO: 104944 - DNA, 2031 bp, synthetic construct; identical to SEQ ID NO: 104943
  misc_feature 1..2031: note = Description of Artificial Sequence: Synthetic coding sequence
  source 1..2031: mol_type = other DNA

SEQ ID NO: 104945 - DNA, 894 bp, synthetic construct; identical to SEQ ID NO: 104938
  misc_feature 1..894: note = Description of Artificial Sequence: Synthetic coding sequence
  source 1..894: mol_type = other DNA

SEQ ID NO: 104946 - DNA, 894 bp, synthetic construct; identical to SEQ ID NO: 104938
  misc_feature 1..894: note = Description of Artificial Sequence: Synthetic coding sequence
  source 1..894: mol_type = other DNA

SEQ ID NO: 104947 - DNA, 894 bp, synthetic construct; identical to SEQ ID NO: 104938
  misc_feature 1..894: note = Description of Artificial Sequence: Synthetic coding sequence
  source 1..894: mol_type = other DNA

SEQ ID NO: 104948 - DNA, 2031 bp, synthetic construct; identical to SEQ ID NO: 104943
  misc_feature 1..2031: note = Description of Artificial Sequence: Synthetic coding sequence
  source 1..2031: mol_type = other DNA

SEQ ID NO: 104949 - DNA, 2031 bp, synthetic construct; identical to SEQ ID NO: 104943
  misc_feature 1..2031: note = Description of Artificial Sequence: Synthetic coding sequence
  source 1..2031: mol_type = other DNA

SEQ ID NO: 104950 - DNA, 894 bp, synthetic construct; identical to SEQ ID NO: 104938
  misc_feature 1..894: note = Description of Artificial Sequence: Synthetic coding sequence
  source 1..894: mol_type = other DNA

SEQ ID NO: 104951 - DNA, 3192 bp, synthetic construct
  misc_feature 1..3192: note = Description of Artificial Sequence: Synthetic coding sequence
  source 1..3192: mol_type = other DNA
atgccccacctgcccctggccagcttcagaccccccttctggggcctgagacacagcagaggcctgcccagattccacagcgtgagcacccagagcgagccccacggcagccccatcagcagaagaaacagagaggccaagcagaagagactgagagagaagcaggccaccctggaggccgagatcgccggcgagagcaagagccccgccgagagcatcaaggcctggagacccaaggagctggtgctgtacgagatccccaccaagcccggcgagaagaaggacgtgagcggccccctgccccccgcctacagccccagatacgtggaggccgcctggtacccctggtgggtgagagagggcttcttcaagcccgagtaccaggccagactgccccaggccaccggcgagaccttcagcatgtgcatccccccccccaacgtgaccggcagcctgcacatcggccacgccctgaccgtggccatccaggacgccctggtgagatggcacagaatgagaggcgaccaggtgctgtgggtgcccggcagcgaccacgccggcatcgccacccaggccgtggtggagaagcagctgtggaaggagagaggcgtgagaagacacgagctgagcagagaggccttcctgagagaggtgtggcagtggaaggaggccaagggcggcgagatctgcgagcagctgagagccctgggcgccagcctggactgggacagagagtgcttcaccatggacgtgggcagcagcgtggccgtgaccgaggccttcgtgagactgtacaaggccggcctgctgtacagaaaccaccagctggtgaactggagctgcgccctgagaagcgccatcagcgacatcgaggtggagaacagacccctgcccggccacacccagctgagactgcccggctgccccacccccgtgagcttcggcctgctgttcagcgtggccttccccgtggacggcgagcccgacgccgaggtggtggtgggcaccaccagacccgagaccctgcccggcgacgtggccgtggccgtgcaccccgacgacagcagatacacccacctgcacggcagacagctgagacaccccctgatgggccagcccctgcccctgatcaccgactacgccgtgcagccccacgtgggcaccggcgccgtgaaggtgacccccgcccacagccccgccgacgccgagatgggcgccagacacggcctgagccccctgaacgtgatcgccgaggacggcaccatgaccagcctgtgcggcgactggctgcagggcctgcacagattcgtggccagagagaagatcatgagcgtgctgagcgagtggggcctgttcagaggcctgcagaaccaccccatggtgctgcccatctgcagcagaagcggcgacgtgatcgagtacctgctgaagaaccagtggttcgtgagatgccaggagatgggcgccagagccgccaaggccgtggagagcggcgccctggagctgagccccagcttccaccagaagaactggcagcactggttcagccacatcggcgactggtgcgtgagcagacagctgtggtggggccaccagatccccgcctacctggtggtggaggaccacgcccagggcgaggaggactgctgggtggtgggcagaagcgaggccgaggccagagaggtggccgccgagctgaccggcagacccggcgccgagctgaccctggagagagaccccgacgtgctggacacctggttcagcagcgccctgttccccttcagcgccctgggctggccccaggagacccccgacctggccagattctaccccctgagcctgctggagaccggcagcgacctgctgctgttctgggtgggcagaatggtgatgctgggcacccagctgaccggccagctgcccttcagcaaggtgctgctgcaccccatggtgagagacagacagggcagaaagatgagcaagagcctgggcaacgtgctggaccccagagacatcatcagcggcgtggagatgcaggtgctgcaggagaagctgagaagcggcaacctggaccccgccgagctggccatcgtggccgccgcccagaagaaggacttcccccacggcatccccgagtgcggcaccgacgccctgagattcaccctgtgcagccacggcgtgcaggccggcgacctgcacctgagcgtgagcgaggtgcagagctgcagacacttctgcaacaagatctggaacgccctgagattcatcctgaacgccctgggcgagaagttcgtgccccagcccgccgaggagctgagccccagcagccccatggacgcctggatcctgagcagactggccctggccgcccaggagtgcgagagaggcttcctgaccagagagctgagcctggtgacccacgccctgcaccacttctggctgcacaacctgtgcgacgtgtacctggaggccgtgaagcccgtgctgtggcacagccccagacccctgggccccccccaggtgctgttcagctgcgccgacctgggcctgagactgctggcccccctgatgcccttcctggccgaggagctgtggcagagactgccccccagacccggctgcccccccgcccccagcatcagcgtggccccctaccccagcgcctgcagcctggagcactggagacagcccgagctggagagaagattcagcagagtgcaggaggtggtgcaggtgctgagagccctgagagccacctaccagctgaccaaggccagacccagagtgctgctgcagagcagcgagcccggcgaccagggcctgttcgaggccttcctggagcccctgggcaccctgggctactgcggcgccgtgggcctgctgccccccggcgccgccgcccccagcggctgggcccaggcccccctgagcgacaccgcccaggtgtacatggagctgcagggcctggtggacccccagatccagctgcccctgctggccgccagaagatacaagctgcagaagcagctggacagcctgaccgccagaacccccagcgagggcgaggccggcacccagagacagcagaagctgagcagcctgcagctggagctgagcaagctggacaaggccgccagccacctgagacagctgatggacgagccccccgcccccggcagccccgagctgtag

SEQ ID NO: 104952 - DNA, 774 bp, synthetic construct
  misc_feature 1..774: note = Description of Artificial Sequence: Synthetic coding sequence
  source 1..774: mol_type = other DNA
atgccccacctgcccctggccagcttcagaccccccttctggggcctgagacacagcagaggcctgcccagattccacagcgtgagcacccagagcgagccccacggcagccccatcagcagaagaaacagagaggccaagcagaagagactgagagagaagcaggccaccctggaggccgagatcgccggcgagagcaagagccccgccgagagcatcaaggcctggagacccaaggagctggtgctgtacgagatccccaccaagcccggcgagaagaaggacgtgagcggccccctgccccccgcctacagccccagatacgtggaggccgcctggtacccctggtgggtgagagagggcttcttcaagcccgagtaccaggccagactgccccaggccaccggcgagaccttcagcatgtgcatccccccccccaacgtgaccggcagcctgcacatcggccacgccctgaccgtggccatccaggacgccctggtgagatggcacagaatgagaggcgaccaggtgctgtgggtgcccggcagcgaccacgccggcatcgccacccaggccgtggtggagaagcagctgtggaaggagagaggcgtgagaagacacgagctgagcagagaggccttcctgagagaggtgtggcagtggaaggaggccaagggcggcgagatctgcgagcagctgagagccctgggcgccagcctggactgggacagagtgttctaccacggctgctggctgctgagcggctgcgactag

SEQ ID NO: 104953 - DNA, 3192 bp, synthetic construct; identical to SEQ ID NO: 104951
  misc_feature 1..3192: note = Description of Artificial Sequence: Synthetic coding sequence
  source 1..3192: mol_type = other DNA

SEQ ID NO: 104954 - DNA, 348 bp, synthetic construct
  misc_feature 1..348: note = Description of Artificial Sequence: Synthetic coding sequence
  source 1..348: mol_type = other DNA
atgccccacctgcccctggccagcttcagaccccccttctggggcctgagacacagcagaggcctgcccagattccacagcgtgagcacccagagcgagccccacggcagccccatcagcagaagaaacagagaggccaagcagaagagactgagagagaagcaggccaccctggaggccgagatcgccggcgagagcaagagccccgccgagagcatcaaggcctggagacccaaggagctggtgctgtacgagatccccaccaagcccggcgagaagaaggacgtgagcggccccctgccccccgcctacagccccagatacgtggaggccgcctggtacccctag

SEQ ID NO: 104955 - DNA, 981 bp, synthetic construct
  misc_feature 1..981: note = Description of Artificial Sequence: Synthetic coding sequence
  source 1..981: mol_type = other DNA
atgccccacctgcccctggccagcttcagaccccccttctggggcctgagacacagcagaggcctgcccagattccacagcgtgagcacccagagcgagccccacggcagccccatcagcagaagaaacagagaggccaagcagaagagactgagagagaagcaggccaccctggaggccgagatcgccggcgagagcaagagccccgccgagagcatcaaggcctggagacccaaggagctggtgctgtacgagatccccaccaagcccggcgagaagaaggacgtgagcggccccctgccccccgcctacagccccagatacgtggaggccgcctggtacccctggtgggtgagagagggcttcttcaagcccgagtaccaggccagactgccccaggccaccggcgagaccttcagcatgtgcatccccccccccaacgtgaccggcagcctgcacatcggccacgccctgaccgtggccatccaggacgccctggtgagatggcacagaatgagaggcgaccaggtgctgtgggtgcccggcagcgaccacgccggcatcgccacccaggccgtggtggagaagcagctgtggaaggagagaggcgtgagaagacacgagctgagcagagaggccttcctgagagaggtgtggcagtggaaggaggccaagggcggcgagatctgcgagcagctgagagccctgggcgccagcctggactgggacagagagtgcttcaccatggacgtgggcagcagcgtggccgtgaccgaggccttcgtgagactgtacaaggccggcctgctgtacagaaaccaccagctggtgaactggagctgcgccctgagaagcgccatcagcgacatcgaggtggagaacagacccctgcccggccacacccagctgagactgcccggctgccccacccccgtgagcttcggcctgctgttcagcgtggccttccccgtggacggctag

SEQ ID NO: 104956 - DNA, 3282 bp, synthetic construct
  misc_feature 1..3282: note = Description of Artificial Sequence: Synthetic coding sequence
  source 1..3282: mol_type = other DNA
atgggcggcaaggcctggcccagaagagccgtgggcaccgccggcggcccctgcgccgagcagatcagcgcccccttccagaccctgctgatgccccacctgcccctggccagcttcagaccccccttctggggcctgagacacagcagaggcctgcccagattccacagcgtgagcacccagagcgagccccacggcagccccatcagcagaagaaacagagaggccaagcagaagagactgagagagaagcaggccaccctggaggccgagatcgccggcgagagcaagagccccgccgagagcatcaaggcctggagacccaaggagctggtgctgtacgagatccccaccaagcccggcgagaagaaggacgtgagcggccccctgccccccgcctacagccccagatacgtggaggccgcctggtacccctggtgggtgagagagggcttcttcaagcccgagtaccaggccagactgccccaggccaccggcgagaccttcagcatgtgcatccccccccccaacgtgaccggcagcctgcacatcggccacgccctgaccgtggccatccaggacgccctggtgagatggcacagaatgagaggcgaccaggtgctgtgggtgcccggcagcgaccacgccggcatcgccacccaggccgtggtggagaagcagctgtggaaggagagaggcgtgagaagacacgagctgagcagagaggccttcctgagagaggtgtggcagtggaaggaggccaagggcggcgagatctgcgagcagctgagagccctgggcgccagcctggactgggacagagagtgcttcaccatggacgtgggcagcagcgtggccgtgaccgaggccttcgtgagactgtacaaggccggcctgctgtacagaaaccaccagctggtgaactggagctgcgccctgagaagcgccatcagcgacatcgaggtggagaacagacccctgcccggccacacccagctgagactgcccggctgccccacccccgtgagcttcggcctgctgttcagcgtggccttccccgtggacggcgagcccgacgccgaggtggtggtgggcaccaccagacccgagaccctgcccggcgacgtggccgtggccgtgcaccccgacgacagcagatacacccacctgcacggcagacagctgagacaccccctgatgggccagcccctgcccctgatcaccgactacgccgtgcagccccacgtgggcaccggcgccgtgaaggtgacccccgcccacagccccgccgacgccgagatgggcgccagacacggcctgagccccctgaacgtgatcgccgaggacggcaccatgaccagcctgtgcggcgactggctgcagggcctgcacagattcgtggccagagagaagatcatgagcgtgctgagcgagtggggcctgttcagaggcctgcagaaccaccccatggtgctgcccatctgcagcagaagcggcgacgtgatcgagtacctgctgaagaaccagtggttcgtgagatgccaggagatgggcgccagagccgccaaggccgtggagagcggcgccctggagctgagccccagcttccaccagaagaactggcagcactggttcagccacatcggcgactggtgcgtgagcagacagctgtggtggggccaccagatccccgcctacctggtggtggaggaccacgcccagggcgaggaggactgctgggtggtgggcagaagcgaggccgaggccagagaggtggccgccgagctgaccggcagacccggcgccgagctgaccctggagagagaccccgacgtgctggacacctggttcagcagcgccctgttccccttcagcgccctgggctggccccaggagacccccgacctggccagattctaccccctgagcctgctggagaccggcagcgacctgctgctgttctgggtgggcagaatggtgatgctgggcacccagctgaccggccagctgcccttcagcaaggtgctgctgcaccccatggtgagagacagacagggcagaaagatgagcaagagcctgggcaacgtgctggaccccagagacatcatcagcggcgtggagatgcaggtgctgcaggagaagctgagaagcggcaacctggaccccgccgagctggccatcgtggccgccgcccagaagaaggacttcccccacggcatccccgagtgcggcaccgacgccctgagattcaccctgtgcagccacggcgtgcaggccggcgacctgcacctgagcgtgagcgaggtgcagagctgcagacacttctgcaacaagatctggaacgccctgagattcatcctgaacgccctgggcgagaagttcgtgccccagcccgccgaggagctgagccccagcagccccatggacgcctggatcctgagcagactggccctggccgcccaggagtgcgagagaggcttcctgaccagagagctgagcctggtgacccacgccctgcaccacttctggctgcacaacctgtgcgacgtgtacctggaggccgtgaagcccgtgctgtggcacagccccagacccctgggccccccccaggtgctgttcagctgcgccgacctgggcctgagactgctggcccccctgatgcccttcctggccgaggagctgtggcagagactgccccccagacccggctgcccccccgcccccagcatcagcgtggccccctaccccagcgcctgcagcctggagcactggagacagcccgagctggagagaagattcagcagagtgcaggaggtggtgcaggtgctgagagccctgagagccacctaccagctgaccaaggccagacccagagtgctgctgcagagcagcgagcccggcgaccagggcctgttcgaggccttcctggagcccctgggcaccctgggctactgcggcgccgtgggcctgctgccccccggcgccgccgcccccagcggctgggcccaggcccccctgagcgacaccgcccaggtgtacatggagctgcagggcctggtggacccccagatccagctgcccctgctggccgccagaagatacaagctgcagaagcagctggacagcctgaccgccagaacccccagcgagggcgaggccggcacccagagacagcagaagctgagcagcctgcagctggagctgagcaagctggacaaggccgccagccacctgagacagctgatggacgagccccccgcccccggcagccccgagctgtag

SEQ ID NO: 104957 - DNA, 2772 bp, synthetic construct
  misc_feature 1..2772: note = Description of Artificial Sequence: Synthetic coding sequence
  source 1..2772: mol_type = other DNA
atgtgcatccccccccccaacgtgaccggcagcctgcacatcggccacgccctgaccgtggccatccaggacgccctggtgagatggcacagaatgagaggcgaccaggtgctgtgggtgcccggcagcgaccacgccggcatcgccacccaggccgtggtggagaagcagctgtggaaggagagaggcgtgagaagacacgagctgagcagagaggccttcctgagagaggtgtggcagtggaaggaggccaagggcggcgagatctgcgagcagctgagagccctgggcgccagcctggactgggacagagagtgcttcaccatggacgtgggcagcagcgtggccgtgaccgaggccttcgtgagactgtacaaggccggcctgctgtacagaaaccaccagctggtgaactggagctgcgccctgagaagcgccatcagcgacatcgaggtggagaacagacccctgcccggccacacccagctgagactgcccggctgccccacccccgtgagcttcggcctgctgttcagcgtggccttccccgtggacggcgagcccgacgccgaggtggtggtgggcaccaccagacccgagaccctgcccggcgacgtggccgtggccgtgcaccccgacgacagcagatacacccacctgcacggcagacagctgagacaccccctgatgggccagcccctgcccctgatcaccgactacgccgtgcagccccacgtgggcaccggcgccgtgaaggtgacccccgcccacagccccgccgacgccgagatgggcgccagacacggcctgagccccctgaacgtgatcgccgaggacggcaccatgaccagcctgtgcggcgactggctgcagggcctgcacagattcgtggccagagagaagatcatgagcgtgctgagcgagtggggcctgttcagaggcctgcagaaccaccccatggtgctgcccatctgcagcagaagcggcgacgtgatcgagtacctgctgaagaaccagtggttcgtgagatgccaggagatgggcgccagagccgccaaggccgtggagagcggcgccctggagctgagccccagcttccaccagaagaactggcagcactggttcagccacatcggcgactggtgcgtgagcagacagctgtggtggggccaccagatccccgcctacctggtggtggaggaccacgcccagggcgaggaggactgctgggtggtgggcagaagcgaggccgaggccagagaggtggccgccgagctgaccggcagacccggcgccgagctgaccctggagagagaccccgacgtgctggacacctggttcagcagcgccctgttccccttcagcgccctgggctggccccaggagacccccgacctggccagattctaccccctgagcctgctggagaccggcagcgacctgctgctgttctgggtgggcagaatggtgatgctgggcacccagctgaccggccagctgcccttcagcaaggtgctgctgcaccccatggtgagagacagacagggcagaaagatgagcaagagcctgggcaacgtgctggaccccagagacatcatcagcggcgtggagatgcaggtgctgcaggagaagctgagaagcggcaacctggaccccgccgagctggccatcgtggccgccgcccagaagaaggacttcccccacggcatccccgagtgcggcaccgacgccctgagattcaccctgtgcagccacggcgtgcaggccggcgacctgcacctgagcgtgagcgaggtgcagagctgcagacacttctgcaacaagatctggaacgccctgagattcatcctgaacgccctgggcgagaagttcgtgccccagcccgccgaggagctgagccccagcagccccatggacgcctggatcctgagcagactggccctggccgcccaggagtgcgagagaggcttcctgaccagagagctgagcctggtgacccacgccctgcaccacttctggctgcacaacctgtgcgacgtgtacctggaggccgtgaagcccgtgctgtggcacagccccagacccctgggccccccccaggtgctgttcagctgcgccgacctgggcctgagactgctggcccccctgatgcccttcctggccgaggagctgtggcagagactgccccccagacccggctgcccccccgcccccagcatcagcgtggccccctaccccagcgcctgcagcctggagcactggagacagcccgagctggagagaagattcagcagagtgcaggaggtggtgcaggtgctgagagccctgagagccacctaccagctgaccaaggccagacccagagtgctgctgcagagcagcgagcccggcgaccagggcctgttcgaggccttcctggagcccctgggcaccctgggctactgcggcgccgtgggcctgctgccccccggcgccgccgcccccagcggctgggcccaggcccccctgagcgacaccgcccaggtgtacatggagctgcagggcctggtggacccccagatccagctgcccctgctggccgccagaagatacaagctgcagaagcagctggacagcctgaccgccagaacccccagcgagggcgaggccggcacccagagacagcagaagctgagcagcctgcagctggagctgagcaagctggacaaggccgccagccacctgagacagctgatggacgagccccccgcccccggcagccccgagctgtag

SEQ ID NO: 104958 - DNA, 885 bp, synthetic construct
  misc_feature 1..885: note = Description of Artificial Sequence: Synthetic coding sequence
  source 1..885: mol_type = other DNA
atggccagcgccagcggcgccatggccaagcacgagcagatcctggtgctggacccccccaccgacctgaagttcaagggccccttcaccgacgtggtgaccaccaacctgaagctgagaaaccccagcgacagaaaggtgtgcttcaaggtgaagaccaccgcccccagaagatactgcgtgagacccaacagcggcatcatcgaccccggcagcaccgtgaccgtgagcgtgatgctgcagcccttcgactacgaccccaacgagaagagcaagcacaagttcatggtgcagaccatcttcgccccccccaacaccagcgacatggaggccgtgtggaaggaggccaagcccgacgagctgatggacagcaagctgagatgcgtgttcgagatgcccaacgagaacgacaagctgggcatcaccccccccggcaacgcccccaccgtgaccagcatgagcagcatcaacaacaccgtggccacccccgccagctaccacaccaaggacgaccccagaggcctgagcgtgctgaagcaggagaagcagaagaacgacatggagcccagcaaggccgtgcccctgaacgccagcaagcaggacggccccatgcccaagccccacagcgtgagcctgaacgacaccgagaccagaaagctgatggaggagtgcaagagactgcagggcgagatgatgaagctgagcgaggagaacagacacctgagagacgagggcctgagactgagaaaggtggcccacagcgacaagcccggcagcaccagcaccgccagcttcagagacaacgtgaccagccccctgcccagcctgctggtggtgatcgccgccatcttcatcggcttcttcctgggcaagttcatcctgtag

SEQ ID NO: 104959 - DNA, 750 bp, synthetic construct
  misc_feature 1..750: note = Description of Artificial Sequence: Synthetic coding sequence
  source 1..750: mol_type = other DNA
atggccagcgccagcggcgccatggccaagcacgagcagatcctggtgctggacccccccaccgacctgaagttcaagggccccttcaccgacgtggtgaccaccaacctgaagctgagaaaccccagcgacagaaaggtgtgcttcaaggtgaagaccaccgcccccagaagatactgcgtgagacccaacagcggcatcatcgaccccggcagcaccgtgaccgtgagcgtgatgctgcagcccttcgactacgaccccaacgagaagagcaagcacaagttcatggtgcagaccatcttcgccccccccaacaccagcgacatggaggccgtgtggaaggaggccaagcccgacgagctgatggacagcaagctgagatgcgtgttcgagatgcccaacgagaacgacaagctgaacgacatggagcccagcaaggccgtgcccctgaacgccagcaagcaggacggccccatgcccaagccccacagcgtgagcctgaacgacaccgagaccagaaagctgatggaggagtgcaagagactgcagggcgagatgatgaagctgagcgaggagaacagacacctgagagacgagggcctgagactgagaaaggtggcccacagcgacaagcccggcagcaccagcaccgccagcttcagagacaacgtgaccagccccctgcccagcctgctggtggtgatcgccgccatcttcatcggcttcttcctgggcaagttcatcctgtag

SEQ ID NO: 104960 - DNA, 300 bp, synthetic construct
  misc_feature 1..300: note = Description of Artificial Sequence: Synthetic coding sequence
  source 1..300: mol_type = other DNA
atggccaaggtggagcaggtgctgagcctggagccccagcacgagctgaagttcagaggccccttcaccgacgtggtgaccaccaacctgaagctgggcaaccccaccgacagaaacgtgtgcttcaaggtgaagaccaccgcccccagaagatactgcgtgagacccaacagcggcatcatcgacgccggcgccagcatcaacgtgagcggcagaagatggaccgccgacgaggaggacagcgccgagcagcagccccacttcagcatcagccccaactgggagggcagaagaccctag

SEQ ID NO: 104961 - DNA, 732 bp, synthetic construct
  misc_feature 1..732: note = Description of Artificial Sequence: Synthetic coding sequence
  source 1..732: mol_type = other DNA
atggccaaggtggagcaggtgctgagcctggagccccagcacgagctgaagttcagaggccccttcaccgacgtggtgaccaccaacctgaagctgggcaaccccaccgacagaaacgtgtgcttcaaggtgaagaccaccgcccccagaagatactgcgtgagacccaacagcggcatcatcgacgccggcgccagcatcaacgtgagcgtgatgctgcagcccttcgactacgaccccaacgagaagagcaagcacaagttcatggtgcagagcatgttcgcccccaccgacaccagcgacatggaggccgtgtggaaggaggccaagcccgaggacctgatggacagcaagctgagatgcgtgttcgagctgcccgccgagaacgacaagccccacgacgtggagatcaacaagatcatcagcaccaccgccagcaagaccgagacccccatcgtgagcaagagcctgagcagcagcctggacgacaccgaggtgaagaaggtgatggaggagtgcaagagactgcagggcgaggtgcagagactgagagaggagaacaagcagttcaaggaggaggacggcctgagaatgagaaagaccgtgcagagcaacagccccatcagcgccctggcccccaccggcaaggaggagggcctgagcaccagactgctggccctggtggtgctgttcttcatcgtgggcgtgatcatcggcaagatcgccctgtag

SEQ ID NO: 104962 - DNA, 1575 bp, synthetic construct
  misc_feature 1..1575: note = Description of Artificial Sequence: Synthetic coding sequence
  source 1..1575: mol_type = other DNA
atggacaccgagagcacctacagcggctacagctactacagcagccacagcaagaagagccacagacagggcgagagaaccagagagagacacaagagccccagaaacaaggacggcagaggcagcgagaagagcgtgaccatccagccccccaccggcgagcccctgctgggcaacgacagcaccagaaccgaggaggtgcaggacgacaactggggcgagaccaccaccgccatcaccggcaccagcgagcacagcatcagccaggaggacatcgccagaatcagcaaggacatggaggacagcgtgggcctggactgcaagagatacctgggcctgaccgtggccagcttcctgggcctgctggtgttcctgacccccatcgccttcatcctgctgccccccatcctgtggagagacgagctggagccctgcggcaccatctgcgagggcctgttcatcagcatggccttcaagctgctgatcctgctgatcggcacctgggccctgttcttcagaaagagaagagccgacatgcccagagtgttcgtgttcagagccctgctgctggtgctgatcttcctgttcgtggtgagctactggctgttctacggcgtgagaatcctggacagcagagacagaaactaccagggcatcgtgcagtacgccgtgagcctggtggacgccctgctgttcatccactacctggccatcgtgctgctggagctgagacagctgcagcccatgttcaccctgcaggtggtgagaagcaccgacggcgagagcagattctacagcctgggccacctgagcatccagagagccgccctggtggtgctggagaactactacaaggacttcaccatctacaaccccaacctgctgaccgccagcaagttcagagccgccaagcacatggccggcctgaaggtgtacaacgtggacggccccagcaacaacgccaccggccagagcagagccatgatcgccgccgccgccagaagaagagacagcagccacaacgagctgtactacgaggaggccgagcacgagagaagagtgaagaagagaaaggccagactggtggtggccgtggaggaggccttcatccacatccagagactgcaggccgaggagcagcagaaggcccccggcgaggtgatggaccccagagaggccgcccaggccatcttccccagcatggccagagccctgcagaagtacctgagaatcaccagacagcagaactaccacagcatggagagcatcctgcagcacctggccttctgcatcaccaacggcatgacccccaaggccttcctggagagatacctgagcgccggccccaccctgcagtacgacaaggacagatggctgagcacccagtggagactggtgagcgacgaggccgtgaccaacggcctgagagacggcatcgtgttcgtgctgaagtgcctggacttcagcctggtggtgaacgtgaagaagatccccttcatcatcctgagcgaggagttcatcgaccccaagagccacaagttcgtgctgagactgcagagcgagaccagcgtgtag

SEQ ID NO: 104963 - DNA, 1575 bp, synthetic construct; identical to SEQ ID NO: 104962
  misc_feature 1..1575: note = Description of Artificial Sequence: Synthetic coding sequence
  source 1..1575: mol_type = other DNA

SEQ ID NO: 104964 - DNA, 1575 bp, synthetic construct; identical to SEQ ID NO: 104962
  misc_feature 1..1575: note = Description of Artificial Sequence: Synthetic coding sequence
  source 1..1575: mol_type = other DNA

SEQ ID NO: 104965 - DNA, 1569 bp, synthetic construct
  misc_feature 1..1569: note = Description of Artificial Sequence: Synthetic coding sequence
  source 1..1569: mol_type = other DNA
atggacaccgagagcacctacagcggctacagctactacagcagccacagcaagaagagccacagacagggcgagagaaccagagagagacacaagagccccagaaacaaggacggcagaggcagcgagaagagcgtgaccatccagccccccaccggcgagcccctgctgggcaacgacagcaccagaaccgaggaggacgacaactggggcgagaccaccaccgccatcaccggcaccagcgagcacagcatcagccaggaggacatcgccagaatcagcaaggacatggaggacagcgtgggcctggactgcaagagatacctgggcctgaccgtggccagcttcctgggcctgctggtgttcctgacccccatcgccttcatcctgctgccccccatcctgtggagagacgagctggagccctgcggcaccatctgcgagggcctgttcatcagcatggccttcaagctgctgatcctgctgatcggcacctgggccctgttcttcagaaagagaagagccgacatgcccagagtgttcgtgttcagagccctgctgctggtgctgatcttcctgttcgtggtgagctactggctgttctacggcgtgagaatcctggacagcagagacagaaactaccagggcatcgtgcagtacgccgtgagcctggtggacgccctgctgttcatccactacctggccatcgtgctgctggagctgagacagctgcagcccatgttcaccctgcaggtggtgagaagcaccgacggcgagagcagattctacagcctgggccacctgagcatccagagagccgccctggtggtgctggagaactactacaaggacttcaccatctacaaccccaacctgctgaccgccagcaagttcagagccgccaagcacatggccggcctgaaggtgtacaacgtggacggccccagcaacaacgccaccggccagagcagagccatgatcgccgccgccgccagaagaagagacagcagccacaacgagctgtactacgaggaggccgagcacgagagaagagtgaagaagagaaaggccagactggtggtggccgtggaggaggccttcatccacatccagagactgcaggccgaggagcagcagaaggcccccggcgaggtgatggaccccagagaggccgcccaggccatcttccccagcatggccagagccctgcagaagtacctgagaatcaccagacagcagaactaccacagcatggagagcatcctgcagcacctggccttctgcatcaccaacggcatgacccccaaggccttcctggagagatacctgagcgccggccccaccctgcagtacgacaaggacagatggctgagcacccagtggagactggtgagcgacgaggccgtgaccaacggcctgagagacggcatcgtgttcgtgctgaagtgcctggacttcagcctggtggtgaacgtgaagaagatccccttcatcatcctgagcgaggagttcatcgaccccaagagccacaagttcgtgctgagactgcagagcgagaccagcgtgtag

SEQ ID NO: 104966 - DNA, 1566 bp, synthetic construct
  misc_feature 1..1566: note = Description of Artificial Sequence: Synthetic coding sequence
  source 1..1566: mol_type = other DNA
atggacaccgagagccagtacagcggctacagctacaagagcggccacagcagaagcagcagaaagcacagagacagaagagacagacacagaagcaagagcagagacggcggcagaggcgacaagagcgtgaccatccaggcccccggcgagcccctgctggacaacgagagcaccagaggcgacgagagagacgacaactggggcgagaccaccaccgtggtgaccggcaccagcgagcacagcatcagccacgacgacctgaccagaatcgccaaggacatggaggacagcgtgcccctggactgcagcagacacctgggcgtggccgccggcgccaccctggccctgctgagcttcctgacccccctggccttcctgctgctgccccccctgctgtggagagaggagctggagccctgcggcaccgcctgcgagggcctgttcatcagcgtggccttcaagctgctgatcctgctgctgggcagctgggccctgttcttcagaagacccaaggccagcctgcccagagtgttcgtgctgagagccctgctgatggtgctggtgttcctgctggtggtgagctactggctgttctacggcgtgagaatcctggacgccagagagagaagctaccagggcgtggtgcagttcgccgtgagcctggtggacgccctgctgttcgtgcactacctggccgtggtgctgctggagctgagacagctgcagccccagttcaccctgaaggtggtgagaagcaccgacggcgccagcagattctacaacgtgggccacctgagcatccagagagtggccgtgtggatcctggagaagtactaccacgacttccccgtgtacaaccccgccctgctgaacctgcccaagagcgtgctggccaagaaggtgagcggcttcaaggtgtacagcctgggcgaggagaacagcaccaacaacagcaccggccagagcagagccgtgatcgccgccgccgccagaagaagagacaacagccacaacgagtactactacgaggaggccgagcacgagagaagagtgagaaagagaagagccagactggtggtggccgtggaggaggccttcacccacatcaagagactgcaggaggaggagcagaagaaccccagagaggtgatggaccccagagaggccgcccaggccatcttcgccagcatggccagagccatgcagaagtacctgagaaccaccaagcagcagccctaccacaccatggagagcatcctgcagcacctggagttctgcatcacccacgacatgacccccaaggccttcctggagagatacctggccgccggccccaccatccagtaccacaaggagagatggctggccaagcagtggaccctggtgagcgaggagcccgtgaccaacggcctgaaggacggcatcgtgttcctgctgaagagacaggacttcagcctggtggtgagcaccaagaaggtgcccttcttcaagctgagcgaggagttcgtggaccccaagagccacaagttcgtgatgagactgcagagcgagaccagcgtgtag

SEQ ID NO: 104967 - DNA, 1542 bp, synthetic construct
  misc_feature 1..1542: note = Description of Artificial Sequence: Synthetic coding sequence
  source 1..1542: mol_type = other DNA
atgaccacccagctgcccgcctacgtggccatcctgctgttctacgtgagcagagccagctgccaggacaccttcaccgccgccgtgtacgagcacgccgccatcctgcccaacgccaccctgacccccgtgagcagagaggaggccctggccctgatgaacagaaacctggacatcctggagggcgccatcaccagcgccgccgaccagggcgcccacatcatcgtgacccccgaggacgccatctacggctggaacttcaacagagacagcctgtacccctacctggaggacatccccgaccccgaggtgaactggatcccctgcaacaacagaaacagattcggccagacccccgtgcaggagagactgagctgcctggccaagaacaacagcatctacgtggtggccaacatcggcgacaagaagccctgcgacaccagcgacccccagtgcccccccgacggcagataccagtacaacaccgacgtggtgttcgacagccagggcaagctggtggccagataccacaagcagaacctgttcatgggcgagaaccagttcaacgtgcccaaggagcccgagatcgtgaccttcaacaccaccttcggcagcttcggcatcttcacctgcttcgacatcctgttccacgaccccgccgtgaccctggtgaaggacttccacgtggacaccatcgtgttccccaccgcctggatgaacgtgctgccccacctgagcgccgtggagttccacagcgcctgggccatgggcatgagagtgaacttcctggccagcaacatccactaccccagcaagaagatgaccggcagcggcatctacgcccccaacagcagcagagccttccactacgacatgaagaccgaggagggcaagctgctgctgagccagctggacagccaccccagccacagcgccgtggtgaactggaccagctacgccagcagcatcgaggccctgagcagcggcaacaaggagttcaagggcaccgtgttcttcgacgagttcaccttcgtgaagctgaccggcgtggccggcaactacaccgtgtgccagaaggacctgtgctgccacctgagctacaagatgagcgagaacatccccaacgaggtgtacgccctgggcgccttcgacggcctgcacaccgtggagggcagatactacctgcagatctgcaccctgctgaagtgcaagaccaccaacctgaacacctgcggcgacagcgccgagaccgccagcaccagattcgagatgttcagcctgagcggcaccttcggcacccagtacgtgttccccgaggtgctgctgagcgagaaccagctggcccccggcgagttccaggtgagcaccgacggcagactgttcagcctgaagcccaccagcggccccgtgctgaccgtgaccctgttcggcagactgtacgagaaggactgggccagcaacgccagcagcggcctgaccgcccaggccagaatcatcatgctgatcgtgatcgcccccatcgtgtgcagcctgagctggtag

SEQ ID NO: 104968 - DNA, 1563 bp, synthetic construct
  misc_feature 1..1563: note = Description of Artificial Sequence: Synthetic coding sequence
  source 1..1563: mol_type = other DNA
atggtgaccagcagcttccccatcagcgtggccgtgttcgccctgatcaccctgcaggtgggcacccaggacagcttcatcgccgccgtgtacgagcacgccgtgatcctgcccaacaagaccgagacccccgtgagccaggaggacgccctgaacctgatgaacgagaacatcgacatcctggagaccgccatcaagcaggccgccgagcagggcgccagaatcatcgtgacccccgaggacgccctgtacggctggaagttcaccagagagaccgtgttcccctacctggaggacatccccgacccccaggtgaactggatcccctgccaggacccccacagattcggccacacccccgtgcaggccagactgagctgcctggccaaggacaacagcatctacgtgctggccaacctgggcgacaagaagccctgcaacagcagagacagcacctgcccccccaacggctacttccagtacaacaccaacgtggtgtacaacaccgagggcaagctggtggccagataccacaagtaccacctgtacagcgagccccagttcaacgtgcccgagaagcccgagctggtgaccttcaacaccgccttcggcagattcggcatcttcacctgcttcgacatcttcttctacgaccccggcgtgaccctggtgaaggacttccacgtggacaccatcctgttccccaccgcctggatgaacgtgctgcccctgctgaccgccatcgagttccacagcgcctgggccatgggcatgggcgtgaacctgctggtggccaacacccaccacgtgagcctgaacatgaccggcagcggcatctacgcccccaacggccccaaggtgtaccactacgacatgaagaccgagctgggcaagctgctgctgagcgaggtggacagccaccccctgagcagcctggcctaccccaccgccgtgaactggaacgcctacgccaccaccatcaagcccttccccgtgcagaagaacaccttcagaggcttcatcagcagagacggcttcaacttcaccgagctgttcgagaacgccggcaacctgaccgtgtgccagaaggagctgtgctgccacctgagctacagaatgctgcagaaggaggagaacgaggtgtacgtgctgggcgccttcaccggcctgcacggcagaagaagaagagagtactggcaggtgtgcaccctgctgaagtgcaagaccaccaacctgaccacctgcggcagacccgtggagaccgccagcaccagattcgagatgttcagcctgagcggcaccttcggcaccgagtacgtgttccccgaggtgctgctgaccgagatccacctgagccccggcaagttcgaggtgctgaaggacggcagactggtgaacaagaacggcagcagcggccccatcctgaccgtgagcctgttcggcagatggtacaccaaggacagcctgtacagcagctgcggcaccagcaacagcgccatcacctacctgctgatcttcatcctgctgatgatcatcgccctgcagaacatcgtgatgctgtag

SEQ ID NO: 104969 - DNA, 501 bp, synthetic construct
  misc_feature 1..501: note = Description of Artificial Sequence: Synthetic coding sequence
  source 1..501: mol_type = other DNA
atggtgaccagcagcttccccatcagcgtggccgtgttcgccctgatcaccctgcaggtgggcacccaggacagcttcatcgccgccgtgtacgagcacgccgtgatcctgcccaacaagaccgagacccccgtgagccaggaggacgccctgaacctgatgaacgagaacatcgacatcctggagaccgccatcaagcaggccgccgagcagggcgccagaatcatcgtgacccccgaggacgccctgtacggctggaagttcaccagagagaccgtgttcccctacctggaggacatccccgacccccaggtgaactggatcccctgccaggacccccacagattcggccacacccccgtgcaggccagactgagctgcctggccaaggacaacagcatctacgtgctggccaacctgggcgacaagaagccctgcaacagcagagacagcacctgcccccccaacggctacttccagtacaacaccaacgtggtgtag

SEQ ID NO: 104970 - DNA, 1404 bp, synthetic construct
  misc_feature 1..1404: note = Description of Artificial Sequence: Synthetic coding sequence
  source 1..1404: mol_type = other DNA
atgaacgagaacatcgacatcctggagaccgccatcaagcaggccgccgagcagggcgccagaatcatcgtgacccccgaggacgccctgtacggctggaagttcaccagagagaccgtgttcccctacctggaggacatccccgacccccaggtgaactggatcccctgccaggacccccacagattcggccacacccccgtgcaggccagactgagctgcctggccaaggacaacagcatctacgtgctggccaacctgggcgacaagaagccctgcaacagcagagacagcacctgcccccccaacggctacttccagtacaacaccaacgtggtgtacaacaccgagggcaagctggtggccagataccacaagtaccacctgtacagcgagccccagttcaacgtgcccgagaagcccgagctggtgaccttcaacaccgccttcggcagattcggcatcttcacctgcttcgacatcttcttctacgaccccggcgtgaccctggtgaaggacttccacgtggacaccatcctgttccccaccgcctggatgaacgtgctgcccctgctgaccgccatcgagttccacagcgcctgggccatgggcatgggcgtgaacctgctggtggccaacacccaccacgtgagcctgaacatgaccggcagcggcatctacgcccccaacggccccaaggtgtaccactacgacatgaagaccgagctgggcaagctgctgctgagcgaggtggacagccaccccctgagcagcctggcctaccccaccgccgtgaactggaacgcctacgccaccaccatcaagcccttccccgtgcagaagaacaccttcagaggcttcatcagcagagacggcttcaacttcaccgagctgttcgagaacgccggcaacctgaccgtgtgccagaaggagctgtgctgccacctgagctacagaatgctgcagaaggaggagaacgaggtgtacgtgctgggcgccttcaccggcctgcacggcagaagaagaagagagtactggcaggtgtgcaccctgctgaagtgcaagaccaccaacctgaccacctgcggcagacccgtggagaccgccagcaccagattcgagatgttcagcctgagcggcaccttcggcaccgagtacgtgttccccgaggtgctgctgaccgagatccacctgagccccggcaagttcgaggtgctgaaggacggcagactggtgaacaagaacggcagcagcggccccatcctgaccgtgagcctgttcggcagatggtacaccaaggacagcctgtacagcagctgcggcaccagcaacagcgccatcacctacctgctgatcttcatcctgctgatgatcatcgccctgcagaacatcgtgatgctgtag

SEQ ID NO: 104971 - DNA, 309 bp, synthetic construct
  misc_feature 1..309: note = Description of Artificial Sequence: Synthetic coding sequence
  source 1..309: mol_type = other DNA
atgaacgagaacatcgacatcctggagaccgccatcaagcaggccgccgagcagggcgccagaatcatcgtgacccccgaggacgccctgtacggctggaagttcaccagagagaccgtgttcccctacctggaggacatccccgacccccaggtgaactggatcccctgccaggacccccacagattcggccacacccccgtgcaggccagactgagctgcctggccaaggacaacagcatctacgtgctggccaacctgggcgacaagaagccctgcaacagcagagacagcacctgccccccctag

SEQ ID NO: 104972 - DNA, 306 bp, synthetic construct
  misc_feature 1..306: note = Description of Artificial Sequence: Synthetic coding sequence
  source 1..306: mol_type = other DNA
atggtgaccagcagcttccccatcagcgtggccgtgttcgccctgatcaccctgcaggtgggcacccaggacagcttcatcgccgccgtgtacgagcacgccgtgatcctgcccaacaagaccgagacccccgtgagccaggaggacgccctgaacctgatgaacgagaacatcgacatcctggagaccgccatcaagcaggccgccgagcagggcgccagaatcatcgtgacccccgaggacgccctgtacggctggaagttcaccagagagaccgtgttcccctacctggaggacatcccctag

SEQ ID NO: 104973 - DNA, 2931 bp, synthetic construct
  misc_feature 1..2931: note = Description of Artificial Sequence: Synthetic coding sequence
  source 1..2931: mol_type = other DNA
atggaggagagaaagcacgagaccatgaaccccgcccacgtgctgttcgacagattcgtgcaggccaccacctgcaagggcaccctgaaggccttccaggagctgtgcgaccacctggagctgaagcccaaggactacagaagcttctaccacaagctgaagagcaagctgaactactggaaggccaaggccctgtgggccaagctggacaagagaggcagccacaaggactacaagaagggcaaggcctgcaccaacaccaagtgcctgatcatcggcgccggcccctgcggcctgagaaccgccatcgacctgagcctgctgggcgccaaggtggtggtgatcgagaagagagacgccttcagcagaaacaacgtgctgcacctgtggcccttcaccatccacgacctgagaggcctgggcgccaagaagttctacggcaagttctgcgccggcgccatcgaccacatcagcatcagacagctgcagctgatcctgctgaaggtggccctgatcctgggcatcgagatccacgtgaacgtggagttccagggcctgatccagccccccgaggaccaggagaacgagagaatcggctggagagccctggtgcaccccaagacccaccccgtgagcgagtacgagttcgaggtgatcatcggcggcgacggcagaagaaacaccctggagggcttcagaagaaaggagttcagaggcaagctggccatcgccatcaccgccaacttcatcaacagaaacaccaccgccgaggccaaggtggaggagatcagcggcgtggccttcatcttcaaccagaagttcttccaggagctgagagaggccaccggcatcgacctggagaacatcgtgtactacaaggacgacacccactacttcgtgatgaccgccaagaagcagagcctgctggacaagggcgtgatcctgcacgactacgccgacaccgagctgctgctgagcagagagaacgtggaccaggaggccctgctgagctacgccagagaggccgccgacttcagcacccagcagcagctgcccagcctggacttcgccatcaaccactacggccagcccgacgtggccatgttcgacttcacctgcatgtacgccagcgagaacgccgccctggtgagagagcagaacggccaccagctgctggtggccctggtgggcgacagcctgctggagcccttctggcccatgggcaccggcatcgccagaggcttcctggccgccatggacagcgcctggatggtgagaagctggagcctgggcaccagccccctggaggtgctggccgagagagagagcatctacagactgctgccccagaccacccccgagaacgtgagcaagaacttcagccagtacagcatcgaccccgtgaccagataccccaacatcaacgtgaacttcctgagacccagccaggtgagacacctgtacgacaccggcgagaccaaggacatccacctggagatggagagcctggtgaacagcagaaccacccccaagctgaccagaaacgagagcgtggccagaagcagcaagctgctgggctggtgccagagacagaccgacggctacgccggcgtgaacgtgaccgacctgaccatgagctggaagagcggcctggccctgtgcgccatcatccacagatacagacccgacctgatcgacttcgacagcctggacgagcagaacgtggagaagaacaaccagctggccttcgacatcgccgagaaggagctgggcatcagccccatcatgaccggcaaggagatggccagcgtgggcgagcccgacaagctgagcatggtgatgtacctgacccagttctacgagatgttcaaggacagcctgcccagcagcgacaccctggacctgaacgccgaggagaaggccgtgctgatcgccagcaccagaagccccatcagcttcctgagcaagctgggccagaccatcagcagaaagagaagccccaaggacaagaaggagaaggacctggacggcgccggcaagagaagaaagaccagccagagcgaggaggaggaggcccccagaggccacagaggcgagagacccaccctggtgagcaccctgaccgacagaagaatggacgtggccgtgggcaaccagaacaaggtgaagtacatggccacccagctgctggccaagttcgaggagaacgcccccgcccagagcatcggcatcagaagacagctgacccaggagagaggcgccagccagcccagctgctgcctgcccggccaggtgagacccgcccccacccccagatggaagcagggcagcatgaagaaggagttcccccagaacctgggcggcagcgacacctgctacttctgccagaagagagtgtacgtgatggagagactgagcgccgagggcaagttcttccacagaagctgcttcaagtgcgagtactgcgccaccaccctgagactgagcgcctacgcctacgacatcgaggacggcaagttctactgcaagccccactactgctacagactgagcggctacgcccagagaaagagacccgccgtggcccccctgagcggcaaggaggccaagggccccctgcaggacggcgccaccaccgacgccaacggcagagccaacgccgtggccagcagcaccgagagaacccccggcagcggcgtgaacggcctggaggagcccagcatcgccaagagactgagaggcacccccgagagaatcgagctggagaactacagactgagcctgagacaggccgaggccctgcaggaggtgcccgaggagacccaggccgagcacaacctgagcagcgtgctggacaccggcgccgaggaggacgtggccagcagaagcgccagaagagccgccggcagaccccccgccaccagaccctag

SEQ ID NO: 104974 - DNA, 825 bp, synthetic construct
  misc_feature 1..825: note = Description of Artificial Sequence: Synthetic coding sequence
  source 1..825: mol_type = other DNA
atgatcatcagccacttccccaagtgcgtggccgtgttcgccctgctggccctgagcgtgggcgccctggacaccttcatcgccgccgtgtacgagcacgccgtgatcctgcccaacagaaccgagacccccgtgagcaaggaggaggccctgctgctgatgaacaagaacatcgacgtgctggagaaggccgtgaagctggccgccaagcagggcgcccacatcatcgtgacccccgaggacggcatctacggctggatcttcaccagagagagcatctacccctacctggaggacatccccgaccccggcgtgaactggatcccctgcagagacccctggagattcggcaacacccccgtgcagcagagactgagctgcctggccaaggacaacagcatctacgtggtggccaacatcggcgacaagaagccctgcaacgccagcgacagccagtgcccccccgacggcagataccagtacaacaccgacgtggtgttcgacagccagggcaagctgctggccagataccacaagtacaacctgttcgcccccgagatccagttcgacttccccaaggacagcgagctggtgaccttcgacacccccttcggcaagttcggcatcttcacctgcttcgacatcttcagccacgaccccgccgtggtggtggtggacgagttccagctgaccgccttcagcaccccccagcacggcaccaccagatgccccagcagcagactgttccccagcatccagcacggccccagaccctgggagagcatctacctgctgcagatccccaccacccccgcctgcacctag

SEQ ID NO: 104975 - DNA, 444 bp, synthetic construct
  misc_feature 1..444: note = Description of Artificial Sequence: Synthetic coding sequence
  source 1..444: mol_type = other DNA
atgatcatcagccacttccccaagtgcgtggccgtgttcgccctgctggccctgagcgtgggcgccctggacaccttcatcgccgccgtgtacgagcacgccgtgatcctgcccaacagaaccgagacccccgtgagcaaggaggaggccctgctgctgatgaacaagaacatcgacgtgctggagaaggccgtgaagctggccgccaagcagggcgcccacatcatcgtgacccccgaggacggcatctacggctggatcttcaccagagagagcatctacccctacctggaggacatccccgaccccggcgtgaactggatcccctgcagagacccctggagaaagagcaagaagatgaacgagcccgtgagcaaggagctgtgctaccactgccacagcgagtgcaaccagtacggccagtggaagctgtacagaacctag

SEQ ID NO: 104976 - DNA, 624 bp, synthetic construct
  misc_feature 1..624: note = Description of Artificial Sequence: Synthetic coding sequence
  source 1..624: mol_type = other DNA
atgatcatcagccacttccccaagtgcgtggccgtgttcgccctgctggccctgagcgtgggcgccctggacaccttcatcgccgccgtgtacgagcacgccgtgatcctgcccaacagaaccgagacccccgtgagcaaggaggaggccctgctgctgatgaacaagaacatcgacgtgctggagaaggccgtgaagctggccgccaagcagggcgcccacatcatcgtgacccccgaggacggcatctacggctggatcttcaccagagagagcatctacccctacctggaggacatccccgaccccggcgtgaactggatcccctgcagagacccctggagattcggcaacacccccgtgcagcagagactgagctgcctggccaaggacaacagcatctacgtggtggccaacatcggcgacaagaagccctgcaacgccagcgacagccagtgcccccccgacggcagataccagtacaacaccgacgtggtgttcgacagccagggcaagctgctggccagataccacaagggcgtggagagcaccccccagaagcagagcagatgcaccaccatgacctggaagcagagagtggtgagctgctgctaccagaactag

SEQ ID NO: 104977 - DNA, 561 bp, synthetic construct
  misc_feature 1..561: note = Description of Artificial Sequence: Synthetic coding sequence
  source 1..561: mol_type = other DNA
atgagccccaagcccagagccagcggcccccccgccaaggccaccgaggccggcaagagaaagagcagcagccagcccagccccagcgaccccaagaagaagaccaccaaggtggccaagaagggcaaggccgtgagaagaggcagaagaggcaagaagggcgccgccaccaagatggccgccgtgaccgcccccgaggccgagagcgcccccgccgcccccggccccagcgaccagcccagccaggagctgccccagcacgagctgccccccgaggagcccgtgagcgagggcacccagcacgaccccctgagccaggaggccgagctggaggagcccctgagccaggagagcgaggtggaggagcccctgagccaggagagccaggtggaggagcccctgagccaggagagcgaggtggaggagcccctgagccaggagagccaggtggaggagcccctgagccaggagagcgagatggaggagcccctgagccaggagagccaggtggaggagccccccagccaggagagcgagatggaggagctgcccagcgtgtag

SEQ ID NO: 104978 - DNA, 621 bp, synthetic construct
  misc_feature 1..621: note = Description of Artificial Sequence: Synthetic coding sequence
  source 1..621: mol_type = other DNA
atgagccccaagcccagagccagcggcccccccgccaaggccaccgaggccggcaagagaaagagcagcagccagcccagccccagcgaccccaagaagaagaccaccaaggtggccaagaagggcaaggccgtgagaagaggcagaagaggcaagaagggcgccgccaccaagatggccgccgtgaccgcccccgaggccgagagcgcccccgccgcccccggccccagcgaccagcccagccaggagctgccccagcacgagctgccccccgaggagcccgtgagcgagggcacccagcacgaccccctgagccaggaggccgagctggaggagcccctgagccaggagagcgaggtggaggagcccctgagccaggagagccaggtggaggagcccctgagccaggagagcgaggtggaggagcccctgagccaggagagccaggtggaggagcccctgagccaggagagcgaggtggaggagcccctgagccaggagagccaggtggaggagcccctgagccaggagagcgagatggaggagcccctgagccaggagagccaggtggaggagccccccagccaggagagcgagatggaggagctgcccagcgtgtag

SEQ ID NO: 104979 - DNA, 420 bp, synthetic construct
  misc_feature 1..420: note = Description of Artificial Sequence: Synthetic coding sequence
  source 1..420: mol_type = other DNA
atgagccccaagcccagagccagcggcccccccgccaaggccaccgaggccggcaagagaaagagcagcagccagcccagccccagcgaccccaagaagaagaccaccaaggtggccaagaagggcaaggccgtgagaagaggcagaagaggcaagaagggcgccgccaccaagatggccgccgtgaccgcccccgaggccgagagcgcccccgccgcccccggccccagcgaccagcccagccaggagctgccccagcacgagctgccccccgaggagcccgtgagcgagggcacccagcacgaccccctgagccaggagagcgaggtggaggagcccctgagccaggagagcgaggtggaggagcccctgaccgtgtggatggccagcttcagccccgtgagcgagagcaccgactag

SEQ ID NO: 104980 - DNA, 561 bp, synthetic construct
  misc_feature 1..561: note = Description of Artificial Sequence: Synthetic coding sequence
  source 1..561: mol_type = other DNA
atgagccccaagcccagagccagcggcccccccgccaaggccaccgaggccggcaagagaaagagcagcagccagcccagccccagcgaccccaagaagaagaccaccaaggtggccaagaagggcaaggccgtgagaagaggcagaagaggcaagaagggcgccgccaccaagatggccgccgtgaccgcccccgaggccgagagcggccccgccgcccccggccccagcgaccagcccagccaggagctgccccagcacgagctgccccccgaggagcccgtgagcgagggcacccagcacgaccccctgagccaggagagcgagctggaggagcccctgagccaggagagcgaggtggaggagcccctgagccaggagagccaggtggaggagcccctgagccaggagagcgaggtggaggagcccctgagccaggagagccaggtggaggagcccctgagccaggagagcgaggtggaggagcccctgagccaggagagccaggtggaggagcccctgagccaggagagcgagatggaggagctgcccagcgtgtag

SEQ ID NO: 104981 - DNA, 501 bp, synthetic construct
  misc_feature 1..501: note = Description of Artificial Sequence: Synthetic coding sequence
  source 1..501: mol_type = other DNA
atgagccccaagcccagagccagcggcccccccgccaaggccaccgaggccggcaagagaaagagcagcagccagcccagccccagcgaccccaagaagaagaccaccaaggtggccaagaagggcaaggccgtgagaagaggcagaagaggcaagaagggcgccgccaccaagatggccgccgtgaccgcccccgaggccgagagcggccccgccgcccccggccccagcgaccagcccagccaggagctgccccagcacgagctgccccccgaggagcccgtgagcgagggcacccagcacgaccccctgagccaggagagcgagctggaggagcccctgagccaggagagcgaggtggaggagcccctgagccaggagagccaggtggaggagcccctgagccaggagagcgaggtggaggagcccctgagccaggagagccaggtggaggagcccctgagccaggagagcgagatggaggagctgcccagcgtgtag

SEQ ID NO: 104982 - DNA, 378 bp, synthetic construct
  misc_feature 1..378: note = Description of Artificial Sequence: Synthetic coding sequence
  source 1..378: mol_type = other DNA
atgagccccaagcccagagccagcggcccccccgccaaggccaccgaggccggcaagagaaagagcagcagccagcccagccccagcgaccccaagaagaagaccaccaaggtggccaagaagggcaaggccgtgagaagaggcagaagaggcaagaagggcgccgccaccaagatggccgccgtgaccgcccccgaggccgagagcggccccgccgcccccggccccagcgaccagcccagccaggagctgccccagcacgagctgccccccgaggagcccgtgagcgagggcacccagcacgaccccctgagccaggagagcgagctggaggagcccctgagccaggagagacccgccacccccctgagcccctag

SEQ ID NO: 104983 - DNA, 378 bp, synthetic construct
  misc_feature 1..378: note = Description of Artificial Sequence: Synthetic coding sequence
  source 1..378: mol_type = other DNA
atgagccccaagcccagagccagcggcccccccgccaaggccaaggagaccggcaagagaaagagcagcagccagcccagccccagcggccccaagaagaagaccaccaaggtggccgagaagggcgaggccgtgagaggcggcagaagaggcaagaagggcgccgccaccaagatggccgccgtgaccgcccccgaggccgagagcggccccgccgcccccggccccagcgaccagcccagccaggagctgccccagcacgagctgccccccgaggagcccgtgagcgagggcacccagcacgaccccctgagccaggagagcgagctggaggagcccctgagcaagggcagacccagcacccccctgagcccctag

SEQ ID NO: 104984 - DNA, 2220 bp, synthetic construct
  misc_feature 1..2220: note = Description of Artificial Sequence: Synthetic coding sequence
  source 1..2220: mol_type = other DNA
atgcccggcaagatggtggtgatcctgggcgccagcaacatcctgtggatcatgttcgccgccagccaggccttcaagatcgagaccacccccgagagcagatacctggcccagatcggcgacagcgtgagcctgacctgcagcaccaccggctgcgagagccccttcttcagctggagaacccagatcgacagccccctgaacggcaaggtgaccaacgagggcaccaccagcaccctgaccatgaaccccgtgagcttcggcaacgagcacagctacctgtgcaccgccacctgcgagagcagaaagctggagaagggcatccaggtggagatctacagcttccccaaggaccccgagatccacctgagcggccccctggaggccggcaagcccatcaccgtgaagtgcagcgtggccgacgtgtaccccttcgacagactggagatcgacctgctgaagggcgaccacctgatgaagagccaggagttcctggaggacgccgacagaaagagcctggagaccaagagcctggaggtgaccttcacccccgtgatcgaggacatcggcaaggtgctggtgtgcagagccaagctgcacatcgacgagatggacagcgtgcccaccgtgagacaggccgtgaaggagctgcaggtgtacatcagccccaagaacaccgtgatcagcgtgaaccccagcaccaagctgcaggagggcggcagcgtgaccatgacctgcagcagcgagggcctgcccgcccccgagatcttctggagcaagaagctggacaacggcaacctgcagcacctgagcggcaacgccaccctgaccctgatcgccatgagaatggaggacagcggcatctacgtgtgcgagggcgtgaacctgatcggcaagaacagaaaggaggtggagctgatcgtgcaggagaagcccttcaccgtggagatcagccccggccccagaatcgccgcccagatcggcgacagcgtgatgctgacctgcagcgtgatgggctgcgagagccccagcttcagctggagaacccagatcgacagccccctgagcggcaaggtgagaagcgagggcaccaacagcaccctgaccctgagccccgtgagcttcgagaacgagcacagctacctgtgcaccgtgacctgcggccacaagaagctggagaagggcatccaggtggagctgtacagcttccccagagaccccgagatcgagatgagcggcggcctggtgaacggcagcagcgtgaccgtgagctgcaaggtgcccagcgtgtaccccctggacagactggagatcgagctgctgaagggcgagaccatcctggagaacatcgagttcctggaggacaccgacatgaagagcctggagaacaagagcctggagatgaccttcatccccaccatcgaggacaccggcaaggccctggtgtgccaggccaagctgcacatcgacgacatggagttcgagcccaagcagagacagagcacccagaccctgtacgtgaacgtggcccccagagacaccaccgtgctggtgagccccagcagcatcctggaggagggcagcagcgtgaacatgacctgcctgagccagggcttccccgcccccaagatcctgtggagcagacagctgcccaacggcgagctgcagcccctgagcgagaacgccaccctgaccctgatcagcaccaagatggaggacagcggcgtgtacctgtgcgagggcatcaaccaggccggcagaagcagaaaggaggtggagctgatcatccaggtgacccccaaggacatcaagctgaccgccttccccagcgagagcgtgaaggagggcgacaccgtgatcatcagctgcacctgcggcaacgtgcccgagacctggatcatcctgaagaagaaggccgagaccggcgacaccgtgctgaagagcatcgacggcgcctacaccatcagaaaggcccagctgaaggacgccggcgtgtacgagtgcgagagcaagaacaaggtgggcagccagctgagaagcctgaccctggacgtgcagggcagagagaacaacaaggactacttcagccccgagctgctggtgctgtacttcgccagcagcctgatcatccccgccatcggcatgatcatctacttcgccagaaaggccaacatgaagggcagctacagcctggtggaggcccagaagagcaaggtgtag

SEQ ID NO: 104985 - DNA, 1944 bp, synthetic construct
  misc_feature 1..1944: note = Description of Artificial Sequence: Synthetic coding sequence
  source 1..1944: mol_type = other DNA
atgcccggcaagatggtggtgatcctgggcgccagcaacatcctgtggatcatgttcgccgccagccaggccttcaagatcgagaccacccccgagagcagatacctggcccagatcggcgacagcgtgagcctgacctgcagcaccaccggctgcgagagccccttcttcagctggagaacccagatcgacagccccctgaacggcaaggtgaccaacgagggcaccaccagcaccctgaccatgaaccccgtgagcttcggcaacgagcacagctacctgtgcaccgccacctgcgagagcagaaagctggagaagggcatccaggtggagatctacagcttccccaaggaccccgagatccacctgagcggccccctggaggccggcaagcccatcaccgtgaagtgcagcgtggccgacgtgtaccccttcgacagactggagatcgacctgctgaagggcgaccacctgatgaagagccaggagttcctggaggacgccgacagaaagagcctggagaccaagagcctggaggtgaccttcacccccgtgatcgaggacatcggcaaggtgctggtgtgcagagccaagctgcacatcgacgagatggacagcgtgcccaccgtgagacaggccgtgaaggagctgcaggtgtacatcagccccaagaacaccgtgatcagcgtgaaccccagcaccaagctgcaggagggcggcagcgtgaccatgacctgcagcagcgagggcctgcccgcccccgagatcttctggagcaagaagctggacaacggcaacctgcagcacctgagcggcaacgccaccctgaccctgatcgccatgagaatggaggacagcggcatctacgtgtgcgagggcgtgaacctgatcggcaagaacagaaaggaggtggagctgatcgtgcaggccttccccagagaccccgagatcgagatgagcggcggcctggtgaacggcagcagcgtgaccgtgagctgcaaggtgcccagcgtgtaccccctggacagactggagatcgagctgctgaagggcgagaccatcctggagaacatcgagttcctggaggacaccgacatgaagagcctggagaacaagagcctggagatgaccttcatccccaccatcgaggacaccggcaaggccctggtgtgccaggccaagctgcacatcgacgacatggagttcgagcccaagcagagacagagcacccagaccctgtacgtgaacgtggcccccagagacaccaccgtgctggtgagccccagcagcatcctggaggagggcagcagcgtgaacatgacctgcctgagccagggcttccccgcccccaagatcctgtggagcagacagctgcccaacggcgagctgcagcccctgagcgagaacgccaccctgaccctgatcagcaccaagatggaggacagcggcgtgtacctgtgcgagggcatcaaccaggccggcagaagcagaaaggaggtggagctgatcatccaggtgacccccaaggacatcaagctgaccgccttccccagcgagagcgtgaaggagggcgacaccgtgatcatcagctgcacctgcggcaacgtgcccgagacctggatcatcctgaagaagaaggccgagaccggcgacaccgtgctgaagagcatcgacggcgcctacaccatcagaaaggcccagctgaaggacgccggcgtgtacgagtgcgagagcaagaacaaggtgggcagccagctgagaagcctgaccctggacgtgcagggcagagagaacaacaaggactacttcagccccgagctgctggtgctgtacttcgccagcagcctgatcatccccgccatcggcatgatcatctacttcgccagaaaggccaacatgaagggcagctacagcctggtggaggcccagaagagcaaggtgtag

SEQ ID NO: 104986 - DNA, 1623 bp, synthetic construct
  misc_feature 1..1623: note = Description of Artificial Sequence: Synthetic coding sequence
  source 1..1623: mol_type = other DNA
atgcccggcaagatggtggtgatcctgggcgccagcaacatcctgtggatcatgttcgccgccagccaggccttcaagatcgagaccacccccgagagcagatacctggcccagatcggcgacagcgtgagcctgacctgcagcaccaccggctgcgagagccccttcttcagctggagaacccagatcgacagccccctgaacggcaaggtgaccaacgagggcaccaccagcaccctgaccatgaaccccgtgagcttcggcaacgagcacagctacctgtgcaccgccacctgcgagagcagaaagctggagaagggcatccaggtggagatctacagcttccccaaggaccccgagatccacctgagcggccccctggaggccggcaagcccatcaccgtgaagtgcagcgtggccgacgtgtaccccttcgacagactggagatcgacctgctgaagggcgaccacctgatgaagagccaggagttcctggaggacgccgacagaaagagcctggagaccaagagcctggaggtgaccttcacccccgtgatcgaggacatcggcaaggtgctggtgtgcagagccaagctgcacatcgacgagatggacagcgtgcccaccgtgagacaggccgtgaaggagctgcaggtgtacatcagccccaagaacaccgtgatcagcgtgaaccccagcaccaagctgcaggagggcggcagcgtgaccatgacctgcagcagcgagggcctgcccgcccccgagatcttctggagcaagaagctggacaacggcaacctgcagcacctgagcggcaacgccaccctgaccctgatcgccatgagaatggaggacagcggcatctacgtgtgcgagggcgtgaacctgatcggcaagaacagaaaggaggtggagctgatcgtgcaggtggcccccagagacaccaccgtgctggtgagccccagcagcatcctggaggagggcagcagcgtgaacatgacctgcctgagccagggcttccccgcccccaagatcctgtggagcagacagctgcccaacggcgagctgcagcccctgagcgagaacgccaccctgaccctgatcagcaccaagatggaggacagcggcgtgtacctgtgcgagggcatcaaccaggccggcagaagcagaaaggaggtggagctgatcatccaggtgacccccaaggacatcaagctgaccgccttccccagcgagagcgtgaaggagggcgacaccgtgatcatcagctgcacctgcggcaacgtgcccgagacctggatcatcctgaagaagaaggccgagaccggcgacaccgtgctgaagagcatcgacggcgcctacaccatcagaaaggcccagctgaaggacgccggcgtgtacgagtgcgagagcaagaacaaggtgggcagccagctgagaagcctgaccctggacgtgcagggcagagagaacaacaaggactacttcagccccgagctgctggtgctgtacttcgccagcagcctgatcatccccgccatcggcatgatcatctacttcgccagaaaggccaacatgaagggcagctacagcctggtggaggcccagaagagcaaggtgtag

SEQ ID NO: 104987 - DNA, 2034 bp, synthetic construct
  misc_feature 1..2034: note = Description of Artificial Sequence: Synthetic coding sequence
  source 1..2034: mol_type = other DNA
atgcccggcaagatggtggtgatcctgggcgccagcaacatcctgtggatcatgttcgccgccagccaggccttcaagatcgagaccacccccgagagcagatacctggcccagatcggcgacagcgtgagcctgacctgcagcaccaccggcagcttccccaaggaccccgagatccacctgagcggccccctggaggccggcaagcccatcaccgtgaagtgcagcgtggccgacgtgtaccccttcgacagactggagatcgacctgctgaagggcgaccacctgatgaagagccaggagttcctggaggacgccgacagaaagagcctggagaccaagagcctggaggtgaccttcacccccgtgatcgaggacatcggcaaggtgctggtgtgcagagccaagctgcacatcgacgagatggacagcgtgcccaccgtgagacaggccgtgaaggagctgcaggtgtacatcagccccaagaacaccgtgatcagcgtgaaccccagcaccaagctgcaggagggcggcagcgtgaccatgacctgcagcagcgagggcctgcccgcccccgagatcttctggagcaagaagctggacaacggcaacctgcagcacctgagcggcaacgccaccctgaccctgatcgccatgagaatggaggacagcggcatctacgtgtgcgagggcgtgaacctgatcggcaagaacagaaaggaggtggagctgatcgtgcaggagaagcccttcaccgtggagatcagccccggccccagaatcgccgcccagatcggcgacagcgtgatgctgacctgcagcgtgatgggctgcgagagccccagcttcagctggagaacccagatcgacagccccctgagcggcaaggtgagaagcgagggcaccaacagcaccctgaccctgagccccgtgagcttcgagaacgagcacagctacctgtgcaccgtgacctgcggccacaagaagctggagaagggcatccaggtggagctgtacagcttccccagagaccccgagatcgagatgagcggcggcctggtgaacggcagcagcgtgaccgtgagctgcaaggtgcccagcgtgtaccccctggacagactggagatcgagctgctgaagggcgagaccatcctggagaacatcgagttcctggaggacaccgacatgaagagcctggagaacaagagcctggagatgaccttcatccccaccatcgaggacaccggcaaggccctggtgtgccaggccaagctgcacatcgacgacatggagttcgagcccaagcagagacagagcacccagaccctgtacgtgaacgtggcccccagagacaccaccgtgctggtgagccccagcagcatcctggaggagggcagcagcgtgaacatgacctgcctgagccagggcttccccgcccccaagatcctgtggagcagacagctgcccaacggcgagctgcagcccctgagcgagaacgccaccctgaccctgatcagcaccaagatggaggacagcggcgtgtacctgtgcgagggcatcaaccaggccggcagaagcagaaaggaggtggagctgatcatccaggtgacccccaaggacatcaagctgaccgccttccccagcgagagcgtgaaggagggcgacaccgtgatcatcagctgcacctgcggcaacgtgcccgagacctggatcatcctgaagaagaaggccgagaccggcgacaccgtgctgaagagcatcgacggcgcctacaccatcagaaaggcccagctgaaggacgccggcgtgtacgagtgcgagagcaagaacaaggtgggcagccagctgagaagcctgaccctggacgtgcagggcagagagaacaacaaggactacttcagccccgagctgctggtgctgtacttcgccagcagcctgatcatccccgccatcggcatgatcatctacttcgccagaaaggccaacatgaagggcagctacagcctggtggaggcccagaagagcaaggtgtag

SEQ ID NO: 104988 - DNA, 1566 bp, synthetic construct
  misc_feature 1..1566: note = Description of Artificial Sequence: Synthetic coding sequence
  source 1..1566: mol_type = other DNA
atggaggccaactggaccgccttcctgttccaggcccacgaggccagccaccaccagcagcaggccgcccagaacagcctgctgcccctgctgagcagcgccgtggagccccccgaccagaagcccctgctgcccatccccatcacccagaagccccagggcgcccccgagaccctgaaggacgccatcggcatcaagaaggagaagcccaagaccagcttcgtgtgcacctactgcagcaaggccttcagagacagctaccacctgagaagacacgagagctgccacaccggcatcaagctggtgagcagacccaagaagacccccaccaccgtggtgcccctgatcagcaccatcgccggcgacagcagcagaaccagcctggtgagcaccatcgccggcatcctgagcaccgtgaccaccagcagcagcggcaccaaccccagcagcagcgccagcaccaccgccatgcccgtgacccagagcgtgaagaagcccagcaagcccgtgaagaagaaccacgcctgcgagatgtgcggcaaggccttcagagacgtgtaccacctgaacagacacaagctgagccacagcgacgagaagcccttcgagtgccccatctgcaaccagagattcaagagaaaggacagaatgacctaccacgtgagaagccacgagggcggcatcaccaagccctacacctgcagcgtgtgcggcaagggcttcagcagacccgaccacctgagctgccacgtgaagcacgtgcacagcaccgagagacccttcaagtgccagacctgcaccgccgccttcgccaccaaggacagactgagaacccacatggtgagacacgagggcaaggtgagctgcaacatctgcggcaagctgctgagcgccgcctacatcaccagccacctgaagacccacggccagagccagagcatcaactgcaacacctgcaagcagggcatcagcaagacctgcatgagcgaggagaccagcaaccagaagcagcagcagcagcagcagcagcagcagcagcagcagcagcagcagcagcagcagcacgtgaccagctggcccggcaagcaggtggagaccctgagactgtgggaggaggccgtgaaggccagaaagaaggaggccgccaacctgtgccagaccagcaccgccgccaccacccccgtgaccctgaccacccccttcagcatcaccagcagcgtgagcagcggcaccatgagcaaccccgtgaccgtggccgccgccatgagcatgagaagccccgtgaacgtgagcagcgccgtgaacatcaccagccccatgaacatcggccaccccgtgaccatcaccagccccctgagcatgaccagccccctgaccctgaccacccccgtgaacctgcccacccccgtgaccgcccccgtgaacatcgcccaccccgtgaccatcaccagccccatgaacctgcccacccccatgaccctggccgcccccctgaacatcgccatgagacccgtggagagcatgcccttcctgccccaggccctgcccaccagccccccctggtag

SEQ ID NO: 104989 - DNA, 1566 bp, synthetic construct; identical to SEQ ID NO: 104988
  misc_feature 1..1566: note = Description of Artificial Sequence: Synthetic coding sequence
  source 1..1566: mol_type = other DNA

SEQ ID NO: 104990 - DNA, 1374 bp, synthetic construct
  misc_feature 1..1374: note = Description of Artificial Sequence: Synthetic coding sequence
  source 1..1374: mol_type = other DNA
atgagaccccccagccccctgcccgccagatggctgtgcgtgctggccggcgccctggcctgggccctgggccccgccggcggccaggccgccagactgcaggaggagtgcgactacgtgcagatgatcgaggtgcagcacaagcagtgcctggaggaggcccagctggagaacgagaccatcggctgcagcaagatgtgggacaacctgacctgctggcccgccacccccagaggccaggtggtggtgctggcctgccccctgatcttcaagctgttcagcagcatccagggcagaaacgtgagcagaagctgcaccgacgagggctggacccacctggagcccggcccctaccccatcgcctgcggcctggacgacaaggccgccagcctggacgagcagcagaccatgttctacggcagcgtgaagaccggctacaccatcggctacggcctgagcctggccaccctgctggtggccaccgccatcctgagcctgttcagaaagctgcactgcaccagaaactacatccacatgcacctgttcatcagcttcatcctgagagccgccgccgtgttcatcaaggacctggccctgttcgacagcggcgagagcgaccagtgcagcgagggcagcgtgggctgcaaggccgccatggtgttcttccagtactgcgtgatggccaacttcttctggctgctggtggagggcctgtacctgtacaccctgctggccgtgagcttcttcagcgagagaaagtacttctggggctacatcctgatcggctggggcgtgcccagcaccttcaccatggtgtggaccatcgccagaatccacttcgaggactacggctgctgggacaccatcaacagcagcctgtggtggatcatcaagggccccatcctgaccagcatcctggtgaacttcatcctgttcatctgcatcatcagaatcctgctgcagaagctgagaccccccgacatcagaaagagcgacagcagcccctacagcagactggccagaagcaccctgctgctgatccccctgttcggcgtgcactacatcatgttcgccttcttccccgacaacttcaagcccgaggtgaagatggtgttcgagctggtggtgggcagcttccagggcttcgtggtggccatcctgtactgcttcctgaacggcgaggtgcaggccgagctgagaagaaagtggagaagatggcacctgcagggcgtgctgggctggaaccccaagtacagacaccccagcggcggcagcaacggcgccacctgcagcacccaggtgagcatgctgaccagagtgagccccggcgccagaagaagcagcagcttccaggccgaggtgagcctggtgtag

SEQ ID NO: 104991 - DNA, 1251 bp, synthetic construct
  misc_feature 1..1251: note = Description of Artificial Sequence: Synthetic coding sequence
  source 1..1251: mol_type = other DNA
atgatcgaggtgcagcacaagcagtgcctggaggaggcccagctggagaacgagaccatcggctgcagcaagatgtgggacaacctgacctgctggcccgccacccccagaggccaggtggtggtgctggcctgccccctgatcttcaagctgttcagcagcatccagggcagaaacgtgagcagaagctgcaccgacgagggctggacccacctggagcccggcccctaccccatcgcctgcggcctggacgacaaggccgccagcctggacgagcagcagaccatgttctacggcagcgtgaagaccggctacaccatcggctacggcctgagcctggccaccctgctggtggccaccgccatcctgagcctgttcagaaagctgcactgcaccagaaactacatccacatgcacctgttcatcagcttcatcctgagagccgccgccgtgttcatcaaggacctggccctgttcgacagcggcgagagcgaccagtgcagcgagggcagcgtgggctgcaaggccgccatggtgttcttccagtactgcgtgatggccaacttcttctggctgctggtggagggcctgtacctgtacaccctgctggccgtgagcttcttcagcgagagaaagtacttctggggctacatcctgatcggctggggcgtgcccagcaccttcaccatggtgtggaccatcgccagaatccacttcgaggactacggctgctgggacaccatcaacagcagcctgtggtggatcatcaagggccccatcctgaccagcatcctggtgaacttcatcctgttcatctgcatcatcagaatcctgctgcagaagctgagaccccccgacatcagaaagagcgacagcagcccctacagcagactggccagaagcaccctgctgctgatccccctgttcggcgtgcactacatcatgttcgccttcttccccgacaacttcaagcccgaggtgaagatggtgttcgagctggtggtgggcagcttccagggcttcgtggtggccatcctgtactgcttcctgaacggcgaggtgcaggccgagctgagaagaaagtggagaagatggcacctgcagggcgtgctgggctggaaccccaagtacagacaccccagcggcggcagcaacggcgccacctgcagcacccaggtgagcatgctgaccagagtgagccccggcgccagaagaagcagcagcttccaggccgaggtgagcctggtgtag

SEQ ID NO: 104992 - DNA, 744 bp, synthetic construct
  misc_feature 1..744: note = Description of Artificial Sequence: Synthetic coding sequence
  source 1..744: mol_type = other DNA
atgaccagacagagagtgtggatgagatgggccgtgagacagccctggagcttcagcaacatcgtgagctggctgaccagcagcggctgctggtggagagccagcacctgcaccccctgcctgcccagccccagcagcctgagcggcagcaccagcggcggcgtgcccagcaccttcaccatggtgtggaccatcgccagaatccacttcgaggactacggctgctgggacaccatcaacagcagcctgtggtggatcatcaagggccccatcctgaccagcatcctggtgaacttcatcctgttcatctgcatcatcagaatcctgctgcagaagctgagaccccccgacatcagaaagagcgacagcagcccctacagcagactggccagaagcaccctgctgctgatccccctgttcggcgtgcactacatcatgttcgccttcttccccgacaacttcaagcccgaggtgaagatggtgttcgagctggtggtgggcagcttccagggcttcgtggtggccatcctgtactgcttcctgaacggcgaggtgcaggccgagctgagaagaaagtggagaagatggcacctgcagggcgtgctgggctggaaccccaagtacagacaccccagcggcggcagcaacggcgccacctgcagcacccaggtgagcatgctgaccagagtgagccccggcgccagaagaagcagcagcttccaggccgaggtgagcctggtgtag

SEQ ID NO: 104993 - DNA, 1230 bp, synthetic construct
  misc_feature 1..1230: note = Description of Artificial Sequence: Synthetic coding sequence
  source 1..1230: mol_type = other DNA
atgagagccggcagaagacccagactgggcccctgggccggcggctgcagcaagatgtgggacaacctgacctgctggcccgccacccccagaggccaggtggtggtgctggcctgccccctgatcttcaagctgttcagcagcatccagggcagaaacgtgagcagaagctgcaccgacgagggctggacccacctggagcccggcccctaccccatcgcctgcggcctggacgacaaggccgccagcctggacgagcagaccatgttctacggcagcgtgaagaccggctacaccatcggctacggcctgagcctggccaccctgctggtggccaccgccatcctgagcctgttcagaaagctgcactgcaccagaaactacatccacatgcacctgttcatcagcttcatcctgagagccgccgccgtgttcatcaaggacctggccctgttcgacagcggcgagagcgaccagtgcagcgagggcagcgtgggctgcaaggccgccatggtgttcttccagtactgcgtgatggccaacttcttctggctgctggtggagggcctgtacctgtacaccctgctggccgtgagcttcttcagcgagagaaagtacttctggggctacatcctgatcggctggggcgtgcccagcaccttcaccatggtgtggaccatcgccagaatccacttcgaggactacggctgctgggacaccatcaacagcagcctgtggtggatcatcaagggccccatcctgaccagcatcctggtgaacttcatcctgttcatctgcatcatcagaatcctgctgcagaagctgagaccccccgacatcagaaagagcgacagcagcccctacagcagactggccagaagcaccctgctgctgatccccctgttcggcgtgcactacatcatgttcgccttcttccccgacaacttcaagcccgaggtgaagatggtgttcgagctggtggtgggcagcttccagggcttcgtggtggccatcctgtactgcttcctgaacggcgaggtgcaggccgagctgagaagaaagtggagaagatggcacctgcagggcgtgctgggctggaaccccaagtacagacaccccagcggcggcagcaacggcgccacctgcagcacccaggtgagcatgctgaccagagtgagccccggcgccagaagaagcagcagcttccaggccgaggtgagcctggtgtag

SEQ ID NO: 104994 - DNA, 1317 bp, synthetic construct
  misc_feature 1..1317: note = Description of Artificial Sequence: Synthetic coding sequence
  source 1..1317: mol_type = other DNA
atgagaaccctgctgccccccgccctgctgacctgctggctgctggcccccgtgaacagcatccaccccgagtgcagattccacctggagatccaggaggaggagaccaagtgcgccgagctgctgagaagccagaccgagaagcacaaggcctgcagcggcgtgtgggacaacatcacctgctggagacccgccaacgtgggcgagaccgtgaccgtgccctgccccaaggtgttcagcaacttctacagcaaggccggcaacatcagcaagaactgcaccagcgacggctggagcgagaccttccccgacttcgtggacgcctgcggctacagcgaccccgaggacgagagcaagatcaccttctacatcctggtgaaggccatctacaccctgggctacagcgtgagcctgatgagcctggccaccggcagcatcatcctgtgcctgttcagaaagctgcactgcaccagaaactacatccacctgaacctgttcctgagcttcatcctgagagccatcagcgtgctggtgaaggacgacgtgctgtacagcagcagcggcaccctgcactgccccgaccagcccagcagctgggtgggctgcaagctgagcctggtgttcctgcagtactgcatcatggccaacttcttctggctgctggtggagggcctgtacctgcacaccctgctggtggccatgctgccccccagaagatgcttcctggcctacctgctgatcggctggggcctgcccaccgtgtgcatcggcgcctggaccgccgccagactgtacctggaggacaccggctgctgggacaccaacgaccacagcgtgccctggtgggtgatcagaatccccatcctgatcagcatcatcgtgaacttcgtgctgttcatcagcatcatcagaatcctgctgcagaagctgaccagccccgacgtgggcggcaacgaccagagccagtacaagagactggccaagagcaccctgctgctgatccccctgttcggcgtgcactacatggtgttcgccgtgttccccatcagcatcagcagcaagtaccagatcctgttcgagctgtgcctgggcagcttccagggcctggtggtggccgtgctgtactgcttcctgaacagcgaggtgcagtgcgagctgaagagaaagtggagaagcagatgccccacccccagcgccagcagagactacagagtgtgcggcagcagcttcagcagaaacggcagcgagggcgccctgcagttccacagaggcagcagagcccagagcttcctgcagaccgagaccagcgtgatctag

SEQ ID NO: 104995 - DNA, 1269 bp, synthetic construct
  misc_feature 1..1269: note = Description of Artificial Sequence: Synthetic coding sequence
  source 1..1269: mol_type = other DNA
atgcccctgtgggaggcccccagcgaccaccccgccaacccccccgccaccctgcagggccacaccagcctgcccggctgccaggaggagcccgccagagacccccagagcggcctgccccagatcaccagcgagagcagcagcttcagcgagggcagcctgcccagctggagcagcggccccgccggcgccaagctgaacgccagccacgagggcatcggcagcagcagcgacggcaacggcgacagcaaggccgccaccgagagagtggtgagcgccatggacaccgtgagaagaaagcaccccgagatcaccttctacatcctggtgaaggccatctacaccctgggctacagcgtgagcctgatgagcctggccaccggcagcatcatcctgtgcctgttcagaaagctgcactgcaccagaaactacatccacctgaacctgttcctgagcttcatcctgagagccatcagcgtgctggtgaaggacgacgtgctgtacagcagcagcggcaccctgcactgccccgaccagcccagcagctgggtgggctgcaagctgagcctggtgttcctgcagtactgcatcatggccaacttcttctggctgctggtggagggcctgtacctgcacaccctgctggtggccatgctgccccccagaagatgcttcctggcctacctgctgatcggctggggcctgcccaccgtgtgcatcggcgcctggaccgccgccagactgtacctggaggacaccggctgctgggacaccaacgaccacagcgtgccctggtgggtgatcagaatccccatcctgatcagcatcatcgtgaacttcgtgctgttcatcagcatcatcagaatcctgctgcagaagctgaccagccccgacgtgggcggcaacgaccagagccagtacaagagactggccaagagcaccctgctgctgatccccctgttcggcgtgcactacatggtgttcgccgtgttccccatcagcatcagcagcaagtaccagatcctgttcgagctgtgcctgggcagcttccagggcctggtggtggccgtgctgtactgcttcctgaacagcgaggtgcagtgcgagctgaagagaaagtggagaagcagatgccccacccccagcgccagcagagactacagagtgtgcggcagcagcttcagcagaaacggcagcgagggcgccctgcagttccacagaggcagcagagcccagagcttcctgcagaccgagaccagcgtgatctag

SEQ ID NO: 104996 - DNA, 234 bp, synthetic construct
  misc_feature 1..234: note = Description of Artificial Sequence: Synthetic coding sequence
  source 1..234: mol_type = other DNA
atgagaaccctgctgccccccgccctgctgacctgctggctgctggcccccgtgaacagcatccaccccgagtgcagattccacctggagatccaggaggaggagaccaagtgcgccgagctgctgagaagccagaccgagaagcacaagggccacaccaagggcttcatcctgatccacgccggcggcctgaagagaatcctggacccccacacctaccccctggccccctag

SEQ ID NO: 104997 - DNA, 2022 bp, synthetic construct
  misc_feature 1..2022: note = Description of Artificial Sequence: Synthetic coding sequence
  source 1..2022: mol_type = other DNA
atgtgcagcagagtgcccctgctgctgcccctgctgctgctgctggccctgggccccggcgtgcagggctgccccagcggctgccagtgcagccagccccagaccgtgttctgcaccgccagacagggcaccaccgtgcccagagacgtgccccccgacaccgtgggcctgtacgtgttcgagaacggcatcaccatgctggacgccggcagcttcgccggcctgcccggcctgcagctgctggacctgagccagaaccagatcgccagcctgcccagcggcgtgttccagcccctggccaacctgagcaacctggacctgaccgccaacagactgcacgagatcaccaacgagaccttcagaggcctgagaagactggagagactgtacctgggcaagaacagaatcagacacatccagcccggcgccttcgacaccctggacagactgctggagctgaagctgcaggacaacgagctgagagccctgccccccctgagactgcccagactgctgctgctggacctgagccacaacagcctgctggccctggagcccggcatcctggacaccgccaacgtggaggccctgagactggccggcctgggcctgcagcagctggacgagggcctgttcagcagactgagaaacctgcacgacctggacgtgagcgacaaccagctggagagagtgccccccgtgatcagaggcctgagaggcctgaccagactgagactggccggcaacaccagaatcgcccagctgagacccgaggacctggccggcctggccgccctgcaggagctggacgtgagcaacctgagcctgcaggccctgcccggcgacctgagcggcctgttccccagactgagactgctggccgccgccagaaaccccttcaactgcgtgtgccccctgagctggttcggcccctgggtgagagagagccacgtgaccctggccagccccgaggagaccagatgccacttcccccccaagaacgccggcagactgctgctggagctggactacgccgacttcggctgccccgccaccaccaccaccgccaccgtgcccaccaccagacccgtggtgagagagcccaccgccctgagcagcagcctggcccccacctggctgagccccaccgagcccgccaccgaggcccccagcccccccagcaccgccccccccaccgtgggccccgtgccccagccccaggactgcccccccagcacctgcctgaacggcggcacctgccacctgggcaccagacaccacctggcctgcctgtgccccgagggcttcaccggcctgtactgcgagagccagatgggccagggcaccagacccagccccacccccgtgacccccagaccccccagaagcctgaccctgggcatcgagcccgtgagccccaccagcctgagagtgggcctgcagagatacctgcagggcagcagcgtgcagctgagaagcctgagactgacctacagaaacctgagcggccccgacaagagactggtgaccctgagactgcccgccagcctggccgagtacaccgtgacccagctgagacccaacgccacctacagcgtgtgcgtgatgcccctgggccccggcagagtgcccgagggcgaggaggcctgcggcgaggcccacaccccccccgccgtgcacagcaaccacgcccccgtgacccaggccagagagggcaacctgcccctgctgatcgcccccgccctggccgccgtgctgctggccgccctggccgccgtgggcgccgcctactgcgtgagaagaggcagagccatggccgccgccgcccaggacaagggccaggtgggccccggcgccggccccctggagctggagggcgtgaaggtgcccctggagcccggccccaaggccaccgagggcggcggcgaggccctgcccagcggcagcgagtgcgaggtgcccctgatgggcttccccggccccggcctgcagagccccctgcacgccaagccctacatctag

SEQ ID NO: 104998 - DNA, 2538 bp, synthetic construct
  misc_feature 1..2538: note = Description of Artificial Sequence: Synthetic coding sequence
  source 1..2538: mol_type = other DNA
atggagctgtggagacagtgcacccactggctgatccagtgcagagtgctgccccccagccacagagtgacctgggacggcgcccaggtgtgcgagctggcccaggccctgagagacggcgtgctgctgtgccagctgctgaacaacctgctgccccacgccatcaacctgagagaggtgaacctgagaccccagatgagccagttcctgtgcctgaagaacatcagaaccttcctgagcacctgctgcgagaagttcggcctgaagagaagcgagctgttcgaggccttcgacctgttcgacgtgcaggacttcggcaaggtgatctacaccctgagcgccctgagctggacccccatcgcccagaacagaggcatcatgcccttccccaccgaggaggagagcgtgggcgacgaggacatctacagcggcctgagcgaccagatcgacgacaccgtggaggaggacgaggacctgtacgactgcgtggagaacgaggaggccgagggcgacgagatctacgaggacctgatgagaagcgagcccgtgagcatgccccccaagatgaccgagtacgacaagagatgctgctgcctgagagagatccagcagaccgaggagaagtacaccgacaccctgggcagcatccagcagcacttcctgaagcccctgcagagattcctgaagccccaggacatcgagatcatcttcatcaacatcgaggacctgctgagagtgcacacccacttcctgaaggagatgaaggaggccctgggcacccccggcgccgccaacctgtaccaggtgttcatcaagtacaaggagagattcctggtgtacggcagatactgcagccaggtggagagcgccagcaagcacctggacagagtggccgccgccagagaggacgtgcagatgaagctggaggagtgcagccagagagccaacaacggcagattcaccctgagagacctgctgatggtgcccatgcagagagtgctgaagtaccacctgctgctgcaggagctggtgaagcacacccaggaggccatggagaaggagaacctgagactggccctggacgccatgagagacctggcccagtgcgtgaacgaggtgaagagagacaacgagaccctgagacagatcaccaacttccagctgagcatcgagaacctggaccagagcctggcccactacggcagacccaagatcgacggcgagctgaagatcaccagcgtggagagaagaagcaagatggacagatacgccttcctgctggacaaggccctgctgatctgcaagagaagaggcgacagctacgacctgaaggacttcgtgaacctgcacagcttccaggtgagagacgacagcagcggcgacagagacaacaagaagtggagccacatgttcctgctgatcgaggaccagggcgcccagggctacgagctgttcttcaagaccagagagctgaagaagaagtggatggagcagttcgagatggccatcagcaacatctaccccgagaacgccaccgccaacggccacgacttccagatgttcagcttcgaggagaccaccagctgcaaggcctgccagatgctgctgagaggcaccttctaccagggctacagatgccacagatgcagagccagcgcccacaaggagtgcctgggcagagtgcccccctgcggcagacacggccaggacttccccggcaccatgaagaaggacaagctgcacagaagagcccaggacaagaagagaaacgagctgggcctgcccaagatggaggtgttccaggagtactacggcctgccccccccccccggcgccatcggccccttcctgagactgaaccccggcgacatcgtggagctgaccaaggccgaggccgagcagaactggtgggagggcagaaacaccagcaccaacgagatcggctggttcccctgcaacagagtgaagccctacgtgcacggccccccccaggacctgagcgtgcacctgtggtacgccggccccatggagagagccggcgccgagagcatcctggccaacagaagcgacggcaccttcctggtgagacagagagtgaaggacgccgccgagttcgccatcagcatcaagtacaacgtggaggtgaagcacatcaagatcatgaccgccgagggcctgtacagaatcaccgagaagaaggccttcagaggcctgaccgagctggtggagttctaccagcagaacagcctgaaggactgcttcaagagcctggacaccaccctgcagttccccttcaaggagcccgagaagagaaccatcagcagacccgccgtgggcagcaccaagtacttcggcaccgccaaggccagatacgacttctgcgccagagacagaagcgagctgagcctgaaggagggcgacatcatcaagatcctgaacaagaagggccagcagggctggtggagaggcgagatctacggcagagtgggctggttccccgccaactacgtggaggaggactacagcgagtactgctag

SEQ ID NO: 104999 - DNA, 2247 bp, synthetic construct
  misc_feature 1..2247: note = Description of Artificial Sequence: Synthetic coding sequence
  source 1..2247: mol_type = other DNA
atgagccagttcctgtgcctgaagaacatcagaaccttcctgagcacctgctgcgagaagttcggcctgaagagaagcgagctgttcgaggccttcgacctgttcgacgtgcaggacttcggcaaggtgatctacaccctgagcgccctgagctggacccccatcgcccagaacagaggcatcatgcccttccccaccgaggaggagagcgtgggcgacgaggacatctacagcggcctgagcgaccagatcgacgacaccgtggaggaggacgaggacctgtacgactgcgtggagaacgaggaggccgagggcgacgagatctacgaggacctgatgagaagcgagcccgtgagcatgccccacttcctgaagcccctgcagagattcctgaagccccaggacatcgagatcatcttcatcaacatcgaggacctgctgagagtgcacacccacttcctgaaggagatgaaggaggccctgggcacccccggcgccgccaacctgtaccaggtgttcatcaagtacaaggagagattcctggtgtacggcagatactgcagccaggtggagagcgccagcaagcacctggacagagtggccgccgccagagaggacgtgcagatgaagctggaggagtgcagccagagagccaacaacggcagattcaccctgagagacctgctgatggtgcccatgcagagagtgctgaagtaccacctgctgctgcaggagctggtgaagcacacccaggaggccatggagaaggagaacctgagactggccctggacgccatgagagacctggcccagtgcgtgaacgaggtgaagagagacaacgagaccctgagacagatcaccaacttccagctgagcatcgagaacctggaccagagcctggcccactacggcagacccaagatcgacggcgagctgaagatcaccagcgtggagagaagaagcaagatggacagatacgccttcctgctggacaaggccctgctgatctgcaagagaagaggcgacagctacgacctgaaggacttcgtgaacctgcacagcttccaggtgagagacgacagcagcggcgacagagacaacaagaagtggagccacatgttcctgctgatcgaggaccagggcgcccagggctacgagctgttcttcaagaccagagagctgaagaagaagtggatggagcagttcgagatggccatcagcaacatctaccccgagaacgccaccgccaacggccacgacttccagatgttcagcttcgaggagaccaccagctgcaaggcctgccagatgctgctgagaggcaccttctaccagggctacagatgccacagatgcagagccagcgcccacaaggagtgcctgggcagagtgcccccctgcggcagacacggccaggacttccccggcaccatgaagaaggacaagctgcacagaagagcccaggacaagaagagaaacgagctgggcctgcccaagatggaggtgttccaggagtactacggcctgccccccccccccggcgccatcggccccttcctgagactgaaccccggcgacatcgtggagctgaccaaggccgaggccgagcagaactggtgggagggcagaaacaccagcaccaacgagatcggctggttcccctgcaacagagtgaagccctacgtgcacggccccccccaggacctgagcgtgcacctgtggtacgccggccccatggagagagccggcgccgagagcatcctggccaacagaagcgacggcaccttcctggtgagacagagagtgaaggacgccgccgagttcgccatcagcatcaagtacaacgtggaggtgaagcacatcaagatcatgaccgccgagggcctgtacagaatcaccgagaagaaggccttcagaggcctgaccgagctggtggagttctaccagcagaacagcctgaaggactgcttcaagagcctggacaccaccctgcagttccccttcaaggagcccgagaagagaaccatcagcagacccgccgtgggcagcaccaagtacttcggcaccgccaaggccagatacgacttctgcgccagagacagaagcgagctgagcctgaaggagggcgacatcatcaagatcctgaacaagaagggccagcagggctggtggagaggcgagatctacggcagagtgggctggttccccgccaactacgtggaggaggactacagcgagtactgctag

SEQ ID NO: 105000 - DNA, 2442 bp, synthetic construct
  misc_feature 1..2442: note = Description of Artificial Sequence: Synthetic coding sequence
  source 1..2442: mol_type = other DNA
atggagctgtggagacagtgcacccactggctgatccagtgcagagtgctgccccccagccacagagtgacctgggacggcgcccaggtgtgcgagctggcccaggccctgagagacggcgtgctgctgtgccagctgctgaacaacctgctgccccacgccatcaacctgagagaggtgaacctgagaccccagatgagccagttcctgtgcctgaagaacatcagaaccttcctgagcacctgctgcgagaagttcggcctgaagagaagcgagctgttcgaggccttcgacctgttcgacgtgcaggacttcggcaaggtgatctacaccctgagcgccctgagctggacccccatcgcccagaacagaggcatcatgcccttccccaccgaggaggagagcgtgggcgacgaggacatctacagcggcctgagcgaccagatcgacgacaccgtggaggaggacgaggacctgtacgactgcgtggagaacgaggaggccgagggcgacgagatctacgaggacctgatgagaagcgagcccgtgagcatgccccacttcctgaagcccctgcagagattcctgaagccccaggacatcgagatcatcttcatcaacatcgaggacctgctgagagtgcacacccacttcctgaaggagatgaaggaggccctgggcacccccggcgccgccaacctgtaccaggtgttcatcaagtacaaggagagattcctggtgtacggcagatactgcagccaggtggagagcgccagcaagcacctggacagagtggccgccgccagagaggacgtgcagatgaagctggaggagtgcagccagagagccaacaacggcagattcaccctgagagacctgctgatggtgcccatgcagagagtgctgaagtaccacctgctgctgcaggagctggtgaagcacacccaggaggccatggagaaggagaacctgagactggccctggacgccatgagagacctggcccagtgcgtgaacgaggtgaagagagacaacgagaccctgagacagatcaccaacttccagctgagcatcgagaacctggaccagagcctggcccactacggcagacccaagatcgacggcgagctgaagatcaccagcgtggagagaagaagcaagatggacagatacgccttcctgctggacaaggccctgctgatctgcaagagaagaggcgacagctacgacctgaaggacttcgtgaacctgcacagcttccaggtgagagacgacagcagcggcgacagagacaacaagaagtggagccacatgttcctgctgatcgaggaccagggcgcccagggctacgagctgttcttcaagaccagagagctgaagaagaagtggatggagcagttcgagatggccatcagcaacatctaccccgagaacgccaccgccaacggccacgacttccagatgttcagcttcgaggagaccaccagctgcaaggcctgccagatgctgctgagaggcaccttctaccagggctacagatgccacagatgcagagccagcgcccacaaggagtgcctgggcagagtgcccccctgcggcagacacggccaggacttccccggcaccatgaagaaggacaagctgcacagaagagcccaggacaagaagagaaacgagctgggcctgcccaagatggaggtgttccaggagtactacggcctgccccccccccccggcgccatcggccccttcctgagactgaaccccggcgacatcgtggagctgaccaaggccgaggccgagcagaactggtgggagggcagaaacaccagcaccaacgagatcggctggttcccctgcaacagagtgaagccctacgtgcacggccccccccaggacctgagcgtgcacctgtggtacgccggccccatggagagagccggcgccgagagcatcctggccaacagaagcgacggcaccttcctggtgagacagagagtgaaggacgccgccgagttcgccatcagcatcaagtacaacgtggaggtgaagcacatcaagatcatgaccgccgagggcctgtacagaatcaccgagaagaaggccttcagaggcctgaccgagctggtggagttctaccagcagaacagcctgaaggactgcttcaagagcctggacaccaccctgcagttccccttcaaggagcccgagaagagaaccatcagcagacccgccgtgggcagcaccaagtacttcggcaccgccaaggccagatacgacttctgcgccagagacagaagcgagctgagcctgaaggagggcgacatcatcaagatcctgaacaagaagggccagcagggctggtggagaggcgagatctacggcagagtgggctggttccccgccaactacgtggaggaggactacagcgagtactgctag

SEQ ID NO: 105001 - DNA, 2538 bp, synthetic construct; identical to SEQ ID NO: 104998
  misc_feature 1..2538: note = Description of Artificial Sequence: Synthetic coding sequence
  source 1..2538: mol_type = other DNA

SEQ ID NO: 105002 - DNA, 2607 bp, synthetic construct
  misc_feature 1..2607: note = Description of Artificial Sequence: Synthetic coding sequence
  source 1..2607: mol_type = other DNA
atggagcagtggagacagtgcggcagatggctgatcgactgcaaggtgctgccccccaaccacagagtggtgtggcccagcgccgtggtgttcgacctggcccaggccctgagagacggcgtgctgctgtgccagctgctgcacaacctgagccccggcagcatcgacctgaaggacatcaacttcagaccccagatgagccagttcctgtgcctgaagaacatcagaaccttcctgaaggtgtgccacgacaagttcggcctgagaaacagcgagctgttcgaccccttcgacctgttcgacgtgagagacttcggcaaggtgatcagcgccgtgagcagactgagcctgcacagcatcgcccagaacaagggcatcagacccttccccagcgaggagaccaccgagaacgacgacgacgtgtacagaagcctggaggagctggccgacgagcacgacctgggcgaggacatctacgactgcgtgccctgcgaggacggcggcgacgacatctacgaggacatcatcaaggtggaggtgcagcagcccatgaagatgggcatgaccgaggacgacaagagaaactgctgcctgctggagatccaggagaccgaggccaagtactacagaaccctggaggacatcgagaagaactacatgagccccctgagactggtgctgagccccgccgacatggccgccgtgttcatcaacctggaggacctgatcaaggtgcaccacagcttcctgagagccatcgacgtgagcgtgatggtgggcggcagcaccctggccaaggtgttcctggacttcaaggagagactgctgatctacggcgagtactgcagccacatggagcacgcccagaacaccctgaaccagctgctggccagcagagaggacttcagacagaaggtggaggagtgcaccctgaaggtgcaggacggcaagttcaagctgcaggacctgctggtggtgcccatgcagagagtgctgaagtaccacctgctgctgaaggagctgctgagccacagcgccgagagacccgagagacagcagctgaaggaggccctggaggccatgcaggacctggccatgtacatcaacgaggtgaagagagacaaggagaccctgagaaagatcagcgagttccagagcagcatcgagaacctgcaggtgaagctggaggagttcggcagacccaagatcgacggcgagctgaaggtgagaagcatcgtgaaccacaccaagcaggacagatacctgttcctgttcgacaaggtggtgatcgtgtgcaagagaaagggctacagctacgagctgaaggagatcatcgagctgctgttccacaagatgaccgacgaccccatgaacaacaaggacgtgaagaagtggagctacggcttctacctgatccacctgcagggcaagcagggcttccagttcttctgcaagaccgaggacatgaagagaaagtggatggagcagttcgagatggccatgagcaacatcaagcccgacaaggccaacgccaaccaccacagcttccagatgtacaccttcgacaagaccaccaactgcaaggcctgcaagatgttcctgagaggcaccttctaccagggctacatgtgcaccaagtgcggcgtgggcgcccacaaggagtgcctggaggtgatccccccctgcaagttcagaaccagcggcgacagagacgccagcggcgccggccccggccccaagatggtggccatgcagaactaccacggcaaccccgccccccccggcaagcccgtgctgaccttccagaccggcgacgtgctggagctgctgagaggcgaccccgagagcccctggtgggagggcagactggtgcagaccagaaagagcggctacttccccagcagcagcgtgaagccctgccccgtggacggcagaccccccatcagcagaccccccagcagagagatcgactacaccgcctacccctggttcgccggcaacatggagagacagcagaccgacaacctgctgaagagccacgccagcggcacctacctgatcagagagagacccgccgaggccgagagattcgccatcagcatcaagttcaacgacgaggtgaagcacatcaaggtggtggagaaggacaactggatccacatcaccgaggccaagaagttcgacagcctgctggagctggtggagtactaccagtgccacagcctgaaggagagcttcaagcagctggacaccaccctgaagtacccctacaagagcagagagagaagcgccagcagagccagcagcagaagccccgccagctgcgccagctacaacttcagcttcctgagcccccagggcctgagcttcgccagccagggccccagcgcccccttctggagcgtgttcacccccagagtgatcggcaccgccgtggccagatacaacttcgccgccagagacatgagagagctgagcctgagagagggcgacgtggtgagaatctacagcagaatcggcggcgaccagggctggtggaagggcgagaccaacggcagaatcggctggttccccagcacctacgtggaggaggagggcatccagtag

SEQ ID NO: 105003 - DNA, 2637 bp, synthetic construct
  misc_feature 1..2637: note = Description of Artificial Sequence: Synthetic coding sequence
  source 1..2637: mol_type = other DNA
atggagcagtggagacagtgcggcagatggctgatcgactgcaaggtgctgccccccaaccacagagtggtgtggcccagcgccgtggtgttcgacctggcccaggccctgagagacggcgtgctgctgtgccagctgctgcacaacctgagccccggcagcatcgacctgaaggacatcaacttcagaccccagatgagccagttcctgtgcctgaagaacatcagaaccttcctgaaggtgtgccacgacaagttcggcctgagaaacagcgagctgttcgaccccttcgacctgttcgacgtgagagacttcggcaaggtgatcagcgccgtgagcagactgagcctgcacagcatcgcccagaacaagggcatcagacccttccccagcgaggagaccaccgagaacgacgacgacgtgtacagaagcctggaggagctggccgacgagcacgacctgggcgaggacatctacgactgcgtgccctgcgaggacggcggcgacgacatctacgaggacatcatcaaggtggaggtgcagcagcccatgatcagatacatgcagaagatgggcatgaccgaggacgacaagagaaactgctgcctgctggagatccaggagaccgaggccaagtactacagaaccctggaggacatcgagaagaactacatgagccccctgagactggtgctgagccccgccgacatggccgccgtgttcatcaacctggaggacctgatcaaggtgcaccacagcttcctgagagccatcgacgtgagcgtgatggtgggcggcagcaccctggccaaggtgttcctggacttcaaggagagactgctgatctacggcgagtactgcagccacatggagcacgcccagaacaccctgaaccagctgctggccagcagagaggacttcagacagaaggtggaggagtgcaccctgaaggtgcaggacggcaagttcaagctgcaggacctgctggtggtgcccatgcagagagtgctgaagtaccacctgctgctgaaggagctgctgagccacagcgccgagagacccgagagacagcagctgaaggaggccctggaggccatgcaggacctggccatgtacatcaacgaggtgaagagagacaaggagaccctgagaaagatcagcgagttccagagcagcatcgagaacctgcaggtgaagctggaggagttcggcagacccaagatcgacggcgagctgaaggtgagaagcatcgtgaaccacaccaagcaggacagatacctgttcctgttcgacaaggtggtgatcgtgtgcaagagaaagggctacagctacgagctgaaggagatcatcgagctgctgttccacaagatgaccgacgaccccatgaacaacaaggacgtgaagaagagccacggcaagatgtggagctacggcttctacctgatccacctgcagggcaagcagggcttccagttcttctgcaagaccgaggacatgaagagaaagtggatggagcagttcgagatggccatgagcaacatcaagcccgacaaggccaacgccaaccaccacagcttccagatgtacaccttcgacaagaccaccaactgcaaggcctgcaagatgttcctgagaggcaccttctaccagggctacatgtgcaccaagtgcggcgtgggcgcccacaaggagtgcctggaggtgatccccccctgcaagttcaccagccccgccgacctggacgccagcggcgccggccccggccccaagatggtggccatgcagaactaccacggcaaccccgccccccccggcaagcccgtgctgaccttccagaccggcgacgtgctggagctgctgagaggcgaccccgagagcccctggtgggagggcagactggtgcagaccagaaagagcggctacttccccagcagcagcgtgaagccctgccccgtggacggcagaccccccatcagcagaccccccagcagagagatcgactacaccgcctacccctggttcgccggcaacatggagagacagcagaccgacaacctgctgaagagccacgccagcggcacctacctgatcagagagagacccgccgaggccgagagattcgccatcagcatcaagttcaacgacgaggtgaagcacatcaaggtggtggagaaggacaactggatccacatcaccgaggccaagaagttcgacagcctgctggagctggtggagtactaccagtgccacagcctgaaggagagcttcaagcagctggacaccaccctgaagtacccctacaagagcagagagagaagcgccagcagagccagcagcagaagccccgccagctgcgccagctacaacttcagcttcctgagcccccagggcctgagcttcgccagccagggccccagcgcccccttctggagcgtgttcacccccagagtgatcggcaccgccgtggccagatacaacttcgccgccagagacatgagagagctgagcctgagagagggcgacgtggtgagaatctacagcagaatcggcggcgaccagggctggtggaagggcgagaccaacggcagaatcggctggttccccagcacctacgtggaggaggagggcatccagtag

SEQ ID NO: 105004 - DNA, 2607 bp, synthetic construct
  misc_feature 1..2607: note = Description of Artificial Sequence: Synthetic coding sequence
  source 1..2607: mol_type = other DNA
atggagcagtggagacagtgcggcagatggctgatcgactgcaaggtgctgccccccaaccacagagtggtgtggcccagcgccgtggtgttcgacctggcccaggccctgagagacggcgtgctgctgtgccagctgctgcacaacctgagccccggcagcatcgacctgaaggacatcaacttcagaccccagatgagccagttcctgtgcctgaagaacatcagaaccttcctgaaggtgtgccacgacaagttcggcctgagaaacagcgagctgttcgaccccttcgacctgttcgacgtgagagacttcggcaaggtgatcagcgccgtgagcagactgagcctgcacagcatcgcccagaacaagggcatcagacccttccccagcgaggagaccaccgagaacgacgacgacgtgtacagaagcctggaggagctggccgacgagcacgacctgggcgaggacatctacgactgcgtgccctgcgaggacggcggcgacgacatctacgaggacatcatcaaggtggaggtgcagcagcccatgaagatgggcatgaccgaggacgacaagagaaactgctgcctgctggagatccaggagaccgaggccaagtactacagaaccctggaggacatcgagaagaactacatgagccccctgagactggtgctgagccccgccgacatggccgccgtgttcatcaacctggaggacctgatcaaggtgcaccacagcttcctgagagccatcgacgtgagcgtgatggtgggcggcagcaccctggccaaggtgttcctggacttcaaggagagactgctgatctacggcgagtactgcagccacatggagcacgcccagaacaccctgaaccagctgctggccagcagagaggacttcagacagaaggtggaggagtgcaccctgaaggtgcaggacggcaagttcaagctgcaggacctgctggtggtgcccatgcagagagtgctgaagtaccacctgctgctgaaggagctgctgagccacagcgccgagagacccgagagacagcagctgaaggaggccctggaggccatgcaggacctggccatgtacatcaacgaggtgaagagagacaaggagaccctgagaaagatcagcgagttccagagcagcatcgagaacctgcaggtgaagctggaggagttcggcagacccaagatcgacggcgagctgaaggtgagaagcatcgtgaaccacaccaagcaggacagatacctgttcctgttcgacaaggtggtgatcgtgtgcaagagaaagggctacagctacgagctgaaggagatcatcgagctgctgttccacaagatgaccgacgaccccatgaacaacaaggacgtgaagaagtggagctacggcttctacctgatccacctgcagggcaagcagggcttccagttcttctgcaagaccgaggacatgaagagaaagtggatggagcagttcgagatggccatgagcaacatcaagcccgacaaggccaacgccaaccaccacagcttccagatgtacaccttcgacaagaccaccaactgcaaggcctgcaagatgttcctgagaggcaccttctaccagggctacatgtgcaccaagtgcggcgtgggcgcccacaaggagtgcctggaggtgatccccccctgcaagttcaccagccccgccgacctggacgccagcggcgccggccccggccccaagatggtggccatgcagaactaccacggcaaccccgccccccccggcaagcccgtgctgaccttccagaccggcgacgtgctggagctgctgagaggcgaccccgagagcccctggtgggagggcagactggtgcagaccagaaagagcggctacttccccagcagcagcgtgaagccctgccccgtggacggcagaccccccatcagcagaccccccagcagagagatcgactacaccgcctacccctggttcgccggcaacatggagagacagcagaccgacaacctgctgaagagccacgccagcggcacctacctgatcagagagagacccgccgaggccgagagattcgccatcagcatcaagttcaacgacgaggtgaagcacatcaaggtggtggagaaggacaactggatccacatcaccgaggccaagaagttcgacagcctgctggagctggtggagtactaccagtgccacagcctgaaggagagcttcaagcagctggacaccaccctgaagtacccctacaagagcagagagagaagcgccagcagagccagcagcagaagccccgccagctgcgccagctacaacttcagcttcctgagcccccagggcctgagcttcgccagccagggccccagcgcccccttctggagcgtgttcacccccagagtgatcggcaccgccgtggccagatacaacttcgccgccagagacatgagagagctgagcctgagagagggcgacgtggtgagaatctacagcagaatcggcggcgaccagggctggtggaagggcgagaccaacggcagaatcggctggttccccagcacctacgtggaggaggagggcatccagtag

SEQ ID NO: 105005 - DNA, 2520 bp, synthetic construct
  misc_feature 1..2520: note = Description of Artificial Sequence: Synthetic coding sequence
  source 1..2520: mol_type = other DNA
atggagcagtggagacagtgcggcagatggctgatcgactgcaaggtgctgccccccaaccacagagtggtgtggcccagcgccgtggtgttcgacctggcccaggccctgagagacggcgtgctgctgtgccagctgctgcacaacctgagccccggcagcatcgacctgaaggacatcaacttcagaccccagatgagccagttcctgtgcctgaagaacatcagaaccttcctgaaggtgtgccacgacaagttcggcctgagaaacagcgagctgttcgaccccttcgacctgttcgacgtgagagacttcggcaaggtgatcagcgccgtgagcagactgagcctgcacagcatcgcccagaacaagggcatcagacccttccccagcgaggagaccaccgagaacgacgacgacgtgtacagaagcctggaggagctggccgacgagcacgacctgggcgaggacatctacgactgcgtgccctgcgaggacggcggcgacgacatctacgaggacatcatcaaggtggaggtgcagcagcccatgaagatgggcatgaccgaggacgacaagagaaactgctgcctgctggagatccaggagaccgaggccaagtactacagaaccctggaggacatcgagaagaactacatgagccccctgagactggtgctgagccccgccgacatggccgccgtgttcatcaacctggaggacctgatcaaggtgcaccacagcttcctgagagccatcgacgtgagcgtgatggtgggcggcagcaccctggccaaggtgttcctggacttcaaggagagactgctgatctacggcgagtactgcagccacatggagcacgcccagaacaccctgaaccagctgctggccagcagagaggacttcagacagaaggtggaggagtgcaccctgaaggtgcaggacggcaagttcaagctgcaggacctgctggtggtgcccatgcagagagtgctgaagtaccacctgctgctgaaggagctgctgagccacagcgccgagagacccgagagacagcagctgaaggaggccctggaggccatgcaggacctggccatgtacatcaacgaggtgaagagagacaaggagaccctgagaaagatcagcgagttccagagcagcatcgagaacctgcaggtgaagctggaggagttcggcagacccaagatcgacggcgagctgaaggtgagaagcatcgtgaaccacaccaagcaggacagatacctgttcctgttcgacaaggtggtgatcgtgtgcaagagaaagggctacagctacgagctgaaggagatcatcgagctgctgttccacaagatgaccgacgaccccatgaacaacaaggacgtgaagaagtggagctacggcttctacctgatccacctgcagggcaagcagggcttccagttcttctgcaagaccgaggacatgaagagaaagtggatggagcagttcgagatggccatgagcaacatcaagcccgacaaggccaacgccaaccaccacagcttccagatgtacaccttcgacaagaccaccaactgcaaggcctgcaagatgttcctgagaggcaccttctaccagggctacatgtgcaccaagtgcggcgtgggcgcccacaaggagtgcctggaggtgatccccccctgcaagttcaccagccccgccgacctggacgccagcggcgccggccccggccccaagatggtggccatgcagaactaccacggcaaccccgccccccccggcaagcccgtgctgaccttccagaccggcgacgtgctggagctgctgagaggcgaccccgagagcccctggtgggagggcagactggtgcagaccagaaagagcggctacttccccagcagcagcgtgaagccctgccccgtggacggcagaccccccatcagcagaccccccagcagagagatcgactacaccgcctacccctggttcgccggcaacatggagagacagcagaccgacaacctgctgaagagccacgccagcggcacctacctgatcagagagagacccgccgaggccgagagattcgccatcagcatcaagttcaacgacgaggtgaagcacatcaaggtggtggagaaggacaactggatccacatcaccgaggccaagaagttcgacagcctgctggagctggtggagtactaccagtgccacagcctgaaggagagcttcaagcagctggacaccaccctgaagtacccctacaagagcagagagagaagcgccagcagagccagcagcagaagccccgtgttcacccccagagtgatcggcaccgccgtggccagatacaacttcgccgccagagacatgagagagctgagcctgagagagggcgacgtggtgagaatctacagcagaatcggcggcgaccagggctggtggaagggcgagaccaacggcagaatcggctggttccccagcacctacgtggaggaggagggcatccagtag

SEQ ID NO: 105006 - DNA, 2544 bp, synthetic construct
  misc_feature 1..2544: note = Description of Artificial Sequence: Synthetic coding sequence
  source 1..2544: mol_type = other DNA
atggagccctggaagcagtgcgcccagtggctgatccactgcaaggtgctgcccaccaaccacagagtgacctgggacagcgcccaggtgttcgacctggcccagaccctgagagacggcgtgctgctgtgccagctgctgaacaacctgagagcccacagcatcaacctgaaggagatcaacctgagaccccagatgagccagttcctgtgcctgaagaacatcagaaccttcctgaccgcctgctgcgagaccttcggcatgagaaagagcgagctgttcgaggccttcgacctgttcgacgtgagagacttcggcaaggtgatcgagaccctgagcagactgagcagaacccccatcgccctggccaccggcatcagacccttccccaccgaggagagcatcaacgacgaggacatctacaagggcctgcccgacctgatcgacgagaccctggtggaggacgaggaggacctgtacgactgcgtgtacggcgaggacgagggcggcgaggtgtacgaggacctgatgaaggccgaggaggcccaccagcccaagtgccccgagaacgacatcagaagctgctgcctggccgagatcaagcagaccgaggagaagtacaccgagaccctggagagcatcgagaagtacttcatggcccccctgaagagattcctgaccgccgccgagttcgacagcgtgttcatcaacatccccgagctggtgaagctgcacagaaacctgatgcaggagatccacgacagcatcgtgaacaagaacgaccagaacctgtaccaggtgttcatcaactacaaggagagactggtgatctacggccagtactgcagcggcgtggagagcgccatcagcagcctggactacatcagcaagaccaaggaggacgtgaagctgaagctggaggagtgcagcaagagagccaacaacggcaagttcaccctgagagacctgctggtggtgcccatgcagagagtgctgaagtaccacctgctgctgcaggagctggtgaagcacaccaccgaccccaccgagaaggccaacctgaagctggccctggacgccatgaaggacctggcccagtacgtgaacgaggtgaagagagacaacgagaccctgagagagatcaagcagttccagctgagcatcgagaacctgaaccagcccgtgctgctgttcggcagaccccagggcgacggcgagatcagaatcaccaccctggacaagcacaccaagcaggagagacacatcttcctgttcgacctggccgtgatcgtgtgcaagagaaagggcgacaactacgagatgaaggagatcatcgacctgcagcagtacaagatcgccaacaaccccaccaccgacaaggagaacaagaagtggagctacggcttctacctgatccacacccagggccagaacggcctggagttctactgcaagaccaaggacctgaagaagaagtggctggagcagttcgagatggccctgagcaacatcagacccgactacgccgacagcaacttccacgacttcaagatgcacaccttcaccagagtgaccagctgcaaggtgtgccagatgctgctgagaggcaccttctaccagggctacctgtgcttcaagtgcggcgccagagcccacaaggagtgcctgggcagagtggacaactgcggcagagtgaacagcggcgagcagggcaccctgaagctgcccgagaagagaaccaacggcctgagaagaacccccaagcaggtggaccccggcctgcccaagatgcaggtgatcagaaactacagcggcacccccccccccgccctgcacgagggcccccccctgcagctgcaggccggcgacaccgtggagctgctgaagggcgacgcccacagcctgttctggcagggcagaaacctggccagcggcgaggtgggcttcttccccagcgacgccgtgaagccctgcccctgcgtgcccaagcccgtggactacagctgccagccctggtacgccggcgccatggagagactgcaggccgagaccgagctgatcaacagagtgaacagcacctacctggtgagacacagaaccaaggagagcggcgagtacgccatcagcatcaagtacaacaacgaggccaagcacatcaagatcctgaccagagacggcttcttccacatcgccgagaacagaaagttcaagagcctgatggagctggtggagtactacaagcaccacagcctgaaggagggcttcagaaccctggacaccaccctgcagttcccctacaaggagcccgagcacagcgccggccagagaggcaacagagccggcaacagcctgctgagccccaaggtgctgggcatcgccatcgccagatacgacttctgcgccagagacatgagagagctgagcctgctgaagggcgacgtggtgaagatctacaccaagatgagcgccaacggctggtggagaggcgaggtgaacggcagagtgggctggttccccagcacctacgtggaggaggacgagtag

SEQ ID NO: 105007 - DNA, 1671 bp, synthetic construct
  misc_feature 1..1671: note = Description of Artificial Sequence: Synthetic coding sequence
  source 1..1671: mol_type = other DNA
atgagccagttcctgtgcctgaagaacatcagaaccttcctgaccgcctgctgcgagaccttcggcatgagaaagagcgagctgttcgaggccttcgacctgttcgacgtgagagacttcggcaaggtgatcgagaccctgagcagactgagcagaacccccatcgccctggccaccggcatcagacccttccccaccgaggagagcatcaacgacgaggacatctacaagggcctgcccgacctgatcgacgagaccctggtggaggacgaggaggacctgtacgactgcgtgtacggcgaggacgagggcggcgaggtgtacgaggacctgatgaaggccgaggaggcccaccagcccaagtgccccgagaacgacatcagaagctgctgcctggccgagatcaagcagaccgaggagaagtacaccgagaccctggagagcatcgagaagtacttcatggcccccctgaagagattcctgaccgccgccgagttcgacagcgtgttcatcaacatccccgagctggtgaagctgcacagaaacctgatgcaggagatccacgacagcatcgtgaacaagaacgaccagaacctgtaccaggtgttcatcaactacaaggagagactggtgatctacggccagtactgcagcggcgtggagagcgccatcagcagcctggactacatcagcaagaccaaggaggacgtgaagctgaagctggaggagtgcagcaagagagccaacaacggcaagttcaccctgagagacctgctggtggtgcccatgcagagagtgctgaagtaccacctgctgctgcaggagctggtgaagcacaccaccgaccccaccgagaaggccaacctgaagctggccctggacgccatgaaggacctggcccagtacgtgaacgaggtgaagagagacaacgagaccctgagagagatcaagcagttccagctgagcatcgagaacctgaaccagcccgtgctgctgttcggcagaccccagggcgacggcgagatcagaatcaccaccctggacaagcacaccaagcaggagagacacatcttcctgttcgacctggccgtgatcgtgtgcaagagaaagggcgacaactacgagatgaaggagatcatcgacctgcagcagtacaagatcgccaacaaccccaccaccgacaaggagaacaagaagtggagctacggcttctacctgatccacacccagggccagaacggcctggagttctactgcaagaccaaggacctgaagaagaagtggctggagcagttcgagatggccctgagcaacatcagacccgactacgccgacagcaacttccacgacttcaagatgcacaccttcaccagagtgaccagctgcaaggtgtgccagatgctgctgagaggcaccttctaccagggctacctgtgcttcaagtgcggcgccagagcccacaaggagtgcctgggcagagtggacaactgcggcagagtgaacagcggcgagcagggcaccctgaagctgcccgagaagagaaccaacggcctgagaagaacccccaagcaggtggaccccgacgtgccctgcctgctgcacttcttcatcagcatggcccccgccaccagaagcatcgtgaagagccagaagaagaacaagaagttctag

SEQ ID NO: 105008 - DNA, 864 bp, synthetic construct
  misc_feature 1..864: note = Description of Artificial Sequence: Synthetic coding sequence
  source 1..864: mol_type = other DNA
atgcccatcttcaccttcctgagcgagcagggcaccctgaagctgcccgagaagagaaccaacggcctgagaagaacccccaagcaggtggaccccggcctgcccaagatgcaggtgatcagaaactacagcggcacccccccccccgccctgcacgagggcccccccctgcagctgcaggccggcgacaccgtggagctgctgaagggcgacgcccacagcctgttctggcagggcagaaacctggccagcggcgaggtgggcttcttccccagcgacgccgtgaagccctgcccctgcgtgcccaagcccgtggactacagctgccagccctggtacgccggcgccatggagagactgcaggccgagaccgagctgatcaacagagtgaacagcacctacctggtgagacacagaaccaaggagagcggcgagtacgccatcagcatcaagtacaacaacgaggccaagcacatcaagatcctgaccagagacggcttcttccacatcgccgagaacagaaagttcaagagcctgatggagctggtggagtactacaagcaccacagcctgaaggagggcttcagaaccctggacaccaccctgcagttcccctacaaggagcccgagcacagcgccggccagagaggcaacagagccggcaacagcctgctgagccccaaggtgctgggcatcgccatcgccagatacgacttctgcgccagagacatgagagagctgagcctgctgaagggcgacgtggtgaagatctacaccaagatgagcgccaacggctggtggagaggcgaggtgaacggcagagtgggctggttccccagcacctacgtggaggaggacgagtag

SEQ ID NO: 105009 - DNA, 2628 bp, synthetic construct
  misc_feature 1..2628: note = Description of Artificial Sequence: Synthetic coding sequence
  source 1..2628: mol_type = other DNA
atggagccctggaagcagtgcgcccagtggctgatccactgcaaggtgctgcccaccaaccacagagtgacctgggacagcgcccaggtgttcgacctggcccagaccctgagagacggcgtgctgctgtgccagctgctgaacaacctgagagcccacagcatcaacctgaaggagatcaacctgagaccccagatgagccagttcctgtgcctgaagaacatcagaaccttcctgaccgcctgctgcgagaccttcggcatgagaaagagcgagctgttcgaggccttcgacctgttcgacgtgagagacttcggcaaggtgatcgagaccctgagcagactgagcagaacccccatcgccctggccaccggcatcagacccttccccaccgaggagagcatcaacgacgaggacatctacaagggcctgcccgacctgatcgacgagaccctggtggaggacgaggaggacctgtacgactgcgtgtacggcgaggacgagggcggcgaggtgtacgaggacctgatgaaggccgaggaggcccaccagcccaagtgccccgagaacgacatcagaagctgctgcctggccgagatcaagcagaccgaggagaagtacaccgagaccctggagagcatcgagaagtacttcatggcccccctgaagagattcctgaccgccgccgagttcgacagcgtgttcatcaacatccccgagctggtgaagctgcacagaaacctgatgcaggagatccacgacagcatcgtgaacaagaacgaccagaacctgtaccaggtgttcatcaactacaaggagagactggtgatctacggccagtactgcagcggcgtggagagcgccatcagcagcctggactacatcagcaagaccaaggaggacgtgaagctgaagctggaggagtgcagcaagagagccaacaacggcaagttcaccctgagagacctgctggtggtgcccatgcagagagtgctgaagtaccacctgctgctgcaggagctggtgaagcacaccaccgaccccaccgagaaggccaacctgaagctggccctggacgccatgaaggacctggcccagtacgtgaacgaggtgaagagagacaacgagaccctgagagagatcaagcagttccagctgagcatcgagaacctgaaccagcccgtgctgctgttcggcagaccccagggcgacggcgagatcagaatcaccaccctggacaagcacaccaagcaggagagacacatcttcctgttcgacctggccgtgatcgtgtgcaagagaaagggcgacaactacgagatgaaggagatcatcgacctgcagcagtacaagatcgccaacaaccccaccaccgacaaggagaacaagaagtggagctacggcttctacctgatccacacccagggccagaacggcctggagttctactgcaagaccaaggacctgaagaagaagtggctggagcagttcgagatggccctgagcaacatcagacccgactacgccgacagcaacttccacgacttcaagatgcacaccttcaccagagtgaccagctgcaaggtgtgccagatgctgctgagaggcaccttctaccagggctacctgtgcttcaagtgcggcgccagagcccacaaggagtgcctgggcagagtggacaactgcggcagagtgaacagcggcgagcagggcaccctgaagctgcccgagaagagaaccaacggcctgagaagaacccccaagcaggtggaccccggcctgcccaagatgcaggtgatcagaaactacagcggcacccccccccccgccctgcacgagggcccccccctgcagctgcaggccggcgacaccgtggagctgctgaagggcgacgcccacagcctgttctggcagggcagaaacctggccagcggcgaggtgggcttcttccccagcgacgccgtgaagccctgcccctgcgtgcccaagcccgtggactacagctgccagccctggtacgccggcgccatggagagactgcaggccgagaccgagctgatcaacagagtgaacagcacctacctggtgagacacagaaccaaggagagcggcgagtacgccatcagcatcaagtacaacaacgaggccaagcacatcaagatcctgaccagagacggcttcttccacatcgccgagaacagaaagttcaagagcctgatggagctggtggagtactacaagcaccacagcctgaaggagggcttcagaaccctggacaccaccctgcagttcccctacaaggagcccgagcacagcgccggccagagaggcaacagagccggcaacagcagccccagcctgttctgcggcttcagcttcgtgaccccccccgactacagcttcgtgccccccagcagcacccccttctggagcgtgctgagccccaaggtgctgggcatcgccatcgccagatacgacttctgcgccagagacatgagagagctgagcctgctgaagggcgacgtggtgaagatctacaccaagatgagcgccaacggctggtggagaggcgaggtgaacggcagagtgggctggttccccagcacctacgtggaggaggacgagtag

SEQ ID NO: 105010 - DNA, 756 bp, synthetic construct
  misc_feature 1..756: note = Description of Artificial Sequence: Synthetic coding sequence
  source 1..756: mol_type = other DNA
atgcaggtgatcagaaactacagcggcacccccccccccgccctgcacgagggcccccccctgcagctgcaggccggcgacaccgtggagctgctgaagggcgacgcccacagcctgttctggcagggcagaaacctggccagcggcgaggtgggcttcttccccagcgacgccgtgaagccctgcccctgcgtgcccaagcccgtggactacagctgccagccctggtacgccggcgccatggagagactgcaggccgagaccgagctgatcaacagagtgaacagcacctacctggtgagacacagaaccaaggagagcggcgagtacgccatcagcatcaagtacaacaacgaggccaagcacatcaagatcctgaccagagacggcttcttccacatcgccgagaacagaaagttcaagagcctgatggagctggtggagtactacaagcaccacagcctgaaggagggcttcagaaccctggacaccaccctgcagttcccctacaaggagcccgagcacagcgccggccagagaggcaacagagccggcaacagcctgctgagccccaaggtgctgggcatcgccatcgccagatacgacttctgcgccagagacatgagagagctgagcctgctgaagggcgacgtggtgaagatctacaccaagatgagcgccaacggctggtggagaggcgaggtgaacggcagagtgggctggttccccagcacctacgtggaggaggacgagtag

SEQ ID NO: 105011 - DNA, 912 bp, synthetic construct
  misc_feature 1..912: note = Description of Artificial Sequence: Synthetic coding sequence
  source 1..912: mol_type = other DNA
atgagcagcgccagattcgacagcagcgacagaagcgcctggtacatgggccccgtgagcagacaggaggcccagaccagactgcagggccagagacacggcatgttcctggtgagagacagcagcacctgccccggcgactacgtgctgagcgtgagcgagaacagcagagtgagccactacatcatcaacagcctgcccaacagaagattcaagatcggcgaccaggagttcgaccacctgcccgccctgctggagttctacaagatccactacctggacaccaccaccctgatcgagcccgcccccagataccccagcccccccatgggcagcgtgagcgcccccaacctgcccaccgccgaggacaacctggagtacgtgagaaccctgtacgacttccccggcaacgacgccgaggacctgcccttcaagaagggcgagatcctggtgatcatcgagaagcccgaggagcagtggtggagcgccagaaacaaggacggcagagtgggcatgatccccgtgccctacgtggagaagctggtgagaagcagcccccacggcaagcacggcaacagaaacagcaacagctacggcatccccgagcccgcccacgcctacgcccagccccagaccaccacccccctgcccgccgtgagcggcagccccggcgccgccatcacccccctgcccagcacccagaacggccccgtgttcgccaaggccatccagaagagagtgccctgcgcctacgacaagaccgccctggccctggaggtgggcgacatcgtgaaggtgaccagaatgaacatcaacggccagtgggagggcgaggtgaacggcagaaagggcctgttccccttcacccacgtgaagatcttcgacccccagaaccccgacgagaacgagtag

SEQ ID NO: 105012 - DNA, 912 bp, synthetic construct; identical to SEQ ID NO: 105011
  misc_feature 1..912: note = Description of Artificial Sequence: Synthetic coding sequence
  source 1..912: mol_type = other DNA

SEQ ID NO: 105013 - DNA, 3132 bp, synthetic construct
  misc_feature 1..3132: note = Description of Artificial Sequence: Synthetic coding sequence
  source 1..3132: mol_type = other DNA
atggagttcgtgagagccctgtggctgggcctggccctggccctgggccccggcagcgccggcggccacccccagccctgcggcgtgctggccagactgggcggcagcgtgagactgggcgccctgctgcccagagcccccctggccagagccagagccagagccgccctggccagagccgccctggcccccagactgccccacaacctgagcctggagctggtggtggccgccccccccgccagagaccccgccagcctgaccagaggcctgtgccaggccctggtgccccccggcgtggccgccctgctggccttccccgaggccagacccgagctgctgcagctgcacttcctggccgccgccaccgagacccccgtgctgagcctgctgagaagagaggccagagcccccctgggcgcccccaaccccttccacctgcagctgcactgggccagccccctggagaccctgctggacgtgctggtggccgtgctgcaggcccacgcctgggaggacgtgggcctggccctgtgcagaacccaggaccccggcggcctggtggccctgtggaccagcagagccggcagacccccccagctggtgctggacctgagcagaagagacaccggcgacgccggcctgagagccagactggcccccatggccgcccccgtgggcggcgaggcccccgtgcccgccgccgtgctgctgggctgcgacatcgccagagccagaagagtgctggaggccgtgccccccggcccccactggctgctgggcacccccctgccccccaaggccctgcccaccgccggcctgccccccggcctgctggccctgggcgaggtggccagaccccccctggaggccgccatccacgacatcgtgcagctggtggccagagccctgggcagcgccgcccaggtgcagcccaagagagccctgctgcccgcccccgtgaactgcggcgacctgcagcccgccggccccgagagccccggcagattcctggccagattcctggccaacaccagcttccagggcagaaccggccccgtgtgggtgaccggcagcagccaggtgcacatgagcagacacttcaaggtgtggagcctgagaagagaccccagaggcgcccccgcctgggccaccgtgggcagctggagagacggccagctggacctggagcccggcggcgccagcgccagacccccccccccccagggcgcccaggtgtggcccaagctgagagtggtgaccctgctggagcaccccttcgtgttcgccagagaccccgacgaggacggccagtgccccgccggccagctgtgcctggaccccggcaccaacgacagcgccaccctggacgccctgttcgccgccctggccaacggcagcgcccccagagccctgagaaagtgctgctacggctactgcatcgacctgctggagagactggccgaggacacccccttcgacttcgagctgtacctggtgggcgacggcaagtacggcgccctgagagacggcagatggaccggcctggtgggcgacctgctggccggcagagcccacatggccgtgaccagcttcagcatcaacagcgccagaagccaggtggtggacttcaccagccccttcttcagcaccagcctgggcatcatggtgagagccagagacaccgccagccccatcggcgccttcatgtggcccctgcactggagcacctggctgggcgtgttcgccgccctgcacctgaccgccctgttcctgaccgtgtacgagtggagaagcccctacggcctgacccccagaggcagaaacagaagcaccgtgttcagctacagcagcgccctgaacctgtgctacgccatcctgttcagaagaaccgtgagcagcaagacccccaagtgccccaccggcagactgctgatgaacctgtgggccatcttctgcctgctggtgctgagcagctacaccgccaacctggccgccgtgatggtgggcgacaagaccttcgaggagctgagcggcatccacgaccccaagctgcaccaccccgcccagggcttcagattcggcaccgtgtgggagagcagcgccgaggcctacatcaagaagagcttccccgacatgcacgcccacatgagaagacacagcgcccccaccacccccagaggcgtggccatgctgaccagcgacccccccaagctgaacgccttcatcatggacaagagcctgctggactacgaggtgagcatcgacgccgactgcaagctgctgaccgtgggcaagcccttcgccatcgagggctacggcatcggcctgccccagaacagccccctgaccagcaacctgagcgagttcatcagcagatacaagagcagcggcttcatcgacctgctgcacgacaagtggtacaagatggtgccctgcggcaagagagtgttcgccgtgaccgagaccctgcagatgagcatctaccacttcgccggcctgttcgtgctgctgtgcctgggcctgggcagcgccctgctgagcagcctgggcgagcacgccttcttcagactggccctgcccagaatcagaaagggcagcagactgcagtactggctgcacaccagccagaagatccacagagccctgaacaccgagccccccgagggcagcaaggaggagaccgccgaggccgagcccagcggccccgaggtggagcagcagcagcagcagcaggaccagcccaccgcccccgagggctggaagagagccagaagagccgtggacaaggagagaagagtgagattcctgctggagcccgccgtggtggtggcccccgaggccgacgccgaggccgaggccgcccccagagagggccccgtgtggctgtgcagctacggcagaccccccgccgccagacccaccggcgccccccagcccggcgagctgcaggagctggagagaagaatcgaggtggccagagagagactgagacaggccctggtgagaagaggccagctgctggcccagctgggcgacagcgccagacacagacccagaagactgctgcaggccagagccgcccccgccgaggcccccccccacagcggcagacccggcagccaggagtag

SEQ ID NO: 105014 - DNA, 2502 bp, synthetic construct
  misc_feature 1..2502: note = Description of Artificial Sequence: Synthetic coding sequence
  source 1..2502: mol_type = other DNA
atgcaccagctgttcagactggtgctgggccagaaggacctgagcagagccggcgacctgttcagcctggacgacagcgagatcgaggacagcctgaccgaggccctggagcagatcaagatcatcagcagcagcagcgactaccagaccaacaacaacgaccaggccgtggtggagatctgcatcaccagaatcaccaccgccatcagagagaccgagagcatcgagaagcacgccaaggccctggtgggcctgtgggacagctgcctggagcacaacctgagacccttcggcaaggacgaggacaccccccacgccaagatcgccagcgacatcatgagctgcatcctgcagaactacaacagaccccccgtgatggccctggccatccccatcgccgtgaagttcctgcacagaggcaacaaggagctgtgcagaaacatgagcaactacctgagcctggccgccatcaccaaggccgacctgctggccgaccacaccgaggtgatcgtgaagagcatcctgcagggcaacaccatgctgctgagagtgctgcccgccgtgtacgagaagcagccccagcccatcaacagacacctgaccgagctgctggccctgatgagccagctggagcagcccgagcagtaccacctgctgagactgctgcacgtggccgccaagaagaagcagctggaggtggtgcagaagtgcatccccttcctgatcggccacctgaaggacagcacccacaacgacatcatcctgaacatcctgatcgagatcgccgtgtacgagcccgtggccctgaacagcttcctgcccatgctgaaggagatcggcgagagattcccctacctgaccggccagatggccagaatctacggcgccgtgggccacgtggacgaggagagagccagaagctgcctgacctacctggtgagccagctggccaacatggagcacagcttccaccacatcctgctgctggagatcaagagcatcaccgacaccttcagcagcatcctgggcccccagagcagagacatcttcagaatgagcaacagcttcaccgccatcgccaagctgctgaccagacagctggagaacaccaaggccggcagcggcagaagaaagatcagcaccgagatcgagttccccgagaagctggaggagaccaagctgatcgtgaccgagaacgaggaccacgagaagctgcaggtgaagatccaggccttcgaggacaagatcaacgccggcagcaacacccccggcagcatcagaagatacagcctgggccaggtgagcaaggaggagagaaagaacatcagattcaacagaagcaagagcctggccttccacaccatgctgaccaagggcgtgggcagcgacgacggcgaggacgagaacagaggcgacatccccgccagcatcagcctgagcgagatcgaccccctgggccagggcaacgacaagctgcccttcaagaccgacaccgagagaagccagctgggcgagagcagcgtgagctaccccaacatcatccacatcgacagcgagaacctgagcgagaccgtgaaggagaacagccaggaggagacccccgagaccaccgccagccccatcgagtaccaggacaagctgtacctgcacctgaagaagaacctgagcaaggtgaaggcctacgccatggagatcggcaagaagatccccgtgcccgaccagtgcaccatcgaggacaccgtgagaagctgcgtggccaagctgttcttcacctgcagcctgaagggccactactgcctgtacagcaagagcagcttcatcctgatcagccaggagccccagccctggatccagatcatgttcctgttccagcagagcctgttccccgagcccctgagcatccagagccacagcgtgcagttcctgagagccctgtgggagaagacccaggccggcggcgcccacagcttcgagaccgccatgatggagagcaccttcccccagcagaaggacctggaccaggtgcagctgcacctggaggaggtgagattcttcgacgtgttcggcttcagcgagaccgccggcgcctggcagtgcttcatgtgcaacaaccccgagaaggccaccgtggtgaaccaggacggccagcccctgatcgagggcaagctgaaggagaagcaggtgagatggaagttcatcaagagatggaagaccagatacttcaccctggccggcaaccagctgctgttccagaagggcaagagcaaggacgaccccgacgactgccccatcgagctgagcaaggtgcagagcgtgaaggccgtggccaagaagagaagagacagaagcctgcccagagccttcgagatcttcaccgacaacaagacctacgtgttcaaggccaaggacgagaagaacgccgaggagtggctgcagtgcatcaacgtggccgtggcccaggccaaggagagagagagcagagaggtgaccacctacctgtag

SEQ ID NO: 105015 - DNA, 2502 bp, synthetic construct; identical to SEQ ID NO: 105014
  misc_feature 1..2502: note = Description of Artificial Sequence: Synthetic coding sequence
  source 1..2502: mol_type = other DNA

SEQ ID NO: 105016 - DNA, 2367 bp, synthetic construct
  misc_feature 1..2367: note = Description of Artificial Sequence: Synthetic coding sequence
  source 1..2367: mol_type = other DNA
atgcaccagctgttcagactggtgctgggccagaaggacctgagcagagccggcgacctgttcagcctggacgacagcgagatcgaggacagcctgaccgaggccctggagcagatcaagatcatcagcagcagcagcgactaccagaccaacaacaacgaccaggccgtggtggagatctgcatcaccagaatcaccaccgccatcagagagaccgagagcatcgagaagcacgccaaggccctggtgggcctgtgggacagctgcctggagcacaacctgagacccttcggcaaggacgaggacaccccccacgccaagatcgccagcgacatcatgagctgcatcctgcagaactacaacagaccccccgtgatggccctggccatccccatcgccgtgaagttcctgcacagaggcaacaaggagctgtgcagaaacatgagcaactacctgagcctggccgccatcaccaaggccgacctgctggccgaccacaccgaggtgatcgtgaagagcatcctgcagggcaacaccatgctgctgagagtgctgcccgccgtgtacgagaagcagccccagcccatcaacagacacctgaccgagctgctggccctgatgagccagctggagcagcccgagcagtaccacctgctgagactgctgcacgtggccgccaagaagaagcagctggaggtggtgcagaagtgcatccccttcctgatcggccacctgaaggacagcacccacaacgacatcatcctgaacatcctgatcgagatcgccgtgtacgagcccgtggccctgaacagcttcctgcccatgctgaaggagatcggcgagagattcccctacctgaccggccagatggccagaatctacggcgccgtgggccacgtggacgaggagagagccagaagctgcctgacctacctggtgagccagctggccaacatggagcacagcttccaccacatcctgctgctggagatcaagagcatcaccgacaccttcagcagcatcctgggcccccagagcagagacatcttcagaatgagcaacagcttcaccgccatcgccaagctgctgaccagacagctggagaacaccaaggccggcagcggcagaagaaagatcagcaccgagatcgagttccccgagaagctggaggagaccaagctgatcgtgaccgagaacgaggaccacgagaagctgcaggtgaagatccaggccttcgaggacaagatcaacgccggcagcaacacccccggcagcatcagaagatacagcctgggccaggtgagcaaggaggagagaaagaacatcagattcaacagaagcaagagcctggccttccacaccatgctgaccaagggcgtgggcagcgacgacggcgaggacgagaacagaggcgacatccccgccagcatcagcctgagcgagatcgaccccctgggccagggcaacgacaagctgcccttcaagaccgacaccgagagaagccagctgggcgagagcagcgtgagctaccccaacatcatccacatcgacagcgagaacctgagcgagaccgtgaaggagaacagccaggaggagacccccgagaccaccgccagccccatcgagtaccaggacaagctgtacctgcacctgaagaagaacctgagcaaggtgaaggcctacgccatggagatcggcaagaagatccccgtgcccgaccagtgcaccatcgaggacaccgtgagaagctgcgtggccaagctgttcttcacctgcagcctgaagggccactactgcctgtacagcaagagcagcttcatcctgatcagccaggagccccagccctggatccagatcatgttcctgttccagcaggacctggaccaggtgcagctgcacctggaggaggtgagattcttcgacgtgttcggcttcagcgagaccgccggcgcctggcagtgcttcatgtgcaacaaccccgagaaggccaccgtggtgaaccaggacggccagcccctgatcgagggcaagctgaaggagaagcaggtgagatggaagttcatcaagagatggaagaccagatacttcaccctggccggcaaccagctgctgttccagaagggcaagagcaaggacgaccccgacgactgccccatcgagctgagcaaggtgcagagcgtgaaggccgtggccaagaagagaagagacagaagcctgcccagagccttcgagatcttcaccgacaacaagacctacgtgttcaaggccaaggacgagaagaacgccgaggagtggctgcagtgcatcaacgtggccgtggcccaggccaaggagagagagagcagagaggtgaccacctacctgtag

SEQ ID NO: 105017 - DNA, 192 bp, synthetic construct
  misc_feature 1..192: note = Description of Artificial Sequence: Synthetic coding sequence
  source 1..192: mol_type = other DNA
atgcaccagctgttcagactggtgctgggccagaaggacctgagcagagccggcgacctgttcagcctggacgacagcgagatcgaggacagcctgaccgaggccctggagcagatcaagatcatcagcagcagcagcgactaccagaccaacaacaacgaccaggccgtggtggagatctgcatcacctag

SEQ ID NO: 105018 - DNA, 642 bp, synthetic construct
  misc_feature 1..642: note = Description of Artificial Sequence: Synthetic coding sequence
  source 1..642: mol_type = other DNA
atgcaccagctgttcagactggtgctgggccagaaggacctgagcagagccggcgacctgttcagcctggacgacagcgagatcgaggacagcctgaccgaggccctggagcagatcaagatcatcagcagcagcagcgactaccagaccaacaacaacgaccaggccgtggtggagatctgcatcaccagaatcaccaccgccatcagagagaccgagagcatcgagaagcacgccaaggccctggtgggcctgtgggacagctgcctggagcacaacctgagacccttcggcaaggacgaggacaccccccacgccaagatcgccagcgacatcatgagctgcatcctgcagaactacaacagaccccccgtgatggccctggccatccccatcgccgtgaagttcctgcacagaggcaacaaggagctgtgcagaaacatgagcaactacctgagcctggccgccatcaccaaggccgacctgctggccgaccacaccgaggtgatcgtgaagagcatcctgcagggcatggtgagaaagctgagcctgggcacctgcttcggcagatacctgaaggtgttcagcagcagcatctacggcctgtgggaggccagacccagagtgctggaggccaactag

SEQ ID NO: 105019 - DNA, 498 bp, synthetic construct
  misc_feature 1..498: note = Description of Artificial Sequence: Synthetic coding sequence
  source 1..498: mol_type = other DNA
atgcaccagctgttcagactggtgctgggccagaaggacctgagcagagccggcgacctgttcagcctggacgacagcgagatcgaggacagcctgaccgaggccctggagcagatcaagatcatcagcagcagcagcgactaccagaccaacaacaacgaccaggccgtggtggagatctgcatcaccagaatcaccaccgccatcagagagaccgagagcatcgagaagcacgccaaggccctggtgggcctgtgggacagctgcctggagcacaacctgagacccttcggcaaggacgaggacaccccccacgccaagatcgccagcgacatcatgagctgcatcctgcagaactacaacagaccccccgtgatggccctggccatccccatcgccgtgaagttcctgcacagaggcaacaaggagctgtgcagaaacatgagcaactacctgagcctggccgccatcaccaaggccgacctgctggccgactag

SEQ ID NO: 105020 - DNA, 168 bp, synthetic construct
  misc_feature 1..168: note = Description of Artificial Sequence: Synthetic coding sequence
  source 1..168: mol_type = other DNA
atgcaccagctgttcagactggtgctgggccagaaggacctgagcagagccggcgacctgttcagcctggacgacagcgagatcgaggacagcctgaccgaggccctggagcagatcaagatcatcagcagcagcagcgactaccagaccaacaacaacgaccagtag

SEQ ID NO: 105021 - DNA, 642 bp, synthetic construct; identical to SEQ ID NO: 105018
  misc_feature 1..642: note = Description of Artificial Sequence: Synthetic coding sequence
  source 1..642: mol_type = other DNA

SEQ ID NO: 105022 - DNA, 534 bp, synthetic construct
  misc_feature 1..534: note = Description of Artificial Sequence: Synthetic coding sequence
  source 1..534: mol_type = other DNA
atgcaccagctgttcagactggtgctgggccagaaggacctgagcagagccggcgacctgttcagcctggacgacagcgagatcgaggacagcctgaccgaggccctggagcagatcaagatcatcagcagcagcagcgactaccagaccaacaacaacgaccaggccgtggtggagatctgcatcaccagaatcaccaccgccatcagagagaccgagagcatcgagaagcacgccaaggccctggtgggcctgtgggacagctgcctggagcacaacctgagacccttcggcaaggacgaggacaccccccacgccaagatcgccagcgacatcatgagctgcatcctgcagaactacaacagaccccccgtgatggccctggccatccccatcgccgtgaagttcctgcacagaggcaacaaggagctgtgcagaaacatgagcaactacctgagcctggccgccatcaccaaggccgacctgctggccgaccacaccgaggtgatcgtgaagagcatcctgcaggtgtag

SEQ ID NO: 105023 - DNA, 2367 bp, synthetic construct; identical to SEQ ID NO: 105016
  misc_feature 1..2367: note = Description of Artificial Sequence: Synthetic coding sequence
  source 1..2367: mol_type = other DNA

SEQ ID NO: 105024 - DNA, 3768 bp, synthetic construct
  misc_feature 1..3768: note = Description of Artificial Sequence: Synthetic coding sequence
  source 1..3768: mol_type = other DNA
atggagctggccgccctgtgcagatggggcctgctgctggccctgctgccccccggcgccgccagcacccaggtgtgcaccggcaccgacatgaagctgagactgcccgccagccccgagacccacctggacatgctgagacacctgtaccagggctgccaggtggtgcagggcaacctggagctgacctacctgcccaccaacgccagcctgagcttcctgcaggacatccaggaggtgcagggctacgtgctgatcgcccacaaccaggtgagacaggtgcccctgcagagactgagaatcgtgagaggcacccagctgttcgaggacaactacgccctggccgtgctggacaacggcgaccccctgaacaacaccacccccgtgaccggcgccagccccggcggcctgagagagctgcagctgagaagcctgaccgagatcctgaagggcggcgtgctgatccagagaaacccccagctgtgctaccaggacaccatcctgtggaaggacatcttccacaagaacaaccagctggccctgaccctgatcgacaccaacagaagcagagcctgccacccctgcagccccatgtgcaagggcagcagatgctggggcgagagcagcgaggactgccagagcctgaccagaaccgtgtgcgccggcggctgcgccagatgcaagggccccctgcccaccgactgctgccacgagcagtgcgccgccggctgcaccggccccaagcacagcgactgcctggcctgcctgcacttcaaccacagcggcatctgcgagctgcactgccccgccctggtgacctacaacaccgacaccttcgagagcatgcccaaccccgagggcagatacaccttcggcgccagctgcgtgaccgcctgcccctacaactacctgagcaccgacgtgggcagctgcaccctggtgtgccccctgcacaaccaggaggtgaccgccgaggacggcacccagagatgcgagaagtgcagcaagccctgcgccagagtgtgctacggcctgggcatggagcacctgagagaggtgagagccgtgaccagcgccaacatccaggagttcgccggctgcaagaagatcttcggcagcctggccttcctgcccgagagcttcgacggcgaccccgccagcaacaccgcccccctgcagcccgagcagctgcaggtgttcgagaccctggaggagatcaccggctacctgtacatcagcgcctggcccgacagcctgcccgacctgagcgtgttccagaacctgcaggtgatcagaggcagaatcctgcacaacggcgcctacagcctgaccctgcagggcctgggcatcagctggctgggcctgagaagcctgagagagctgggcagcggcctggccctgatccaccacaacacccacctgtgcttcgtgcacaccgtgccctgggaccagctgttcagaaacccccaccaggccctgctgcacaccgccaacagacccgaggacgagtgcgtgggcgagggcctggcctgccaccagctgtgcgccagaggccactgctggggccccggccccacccagtgcgtgaactgcagccagttcctgagaggccaggagtgcgtggaggagtgcagagtgctgcagggcctgcccagagagtacgtgaacgccagacactgcctgccctgccaccccgagtgccagccccagaacggcagcgtgacctgcttcggccccgaggccgaccagtgcgtggcctgcgcccactacaaggacccccccttctgcgtggccagatgccccagcggcgtgaagcccgacctgagctacatgcccatctggaagttccccgacgaggagggcgcctgccagccctgccccatcaactgcacccacagctgcgtggacctggacgacaagggctgccccgccgagcagagagccagccccctgaccagcatcatcagcgccgtggtgggcatcctgctggtggtggtgctgggcgtggtgttcggcatcctgatcaagagaagacagcagaagatcagaaagtacaccatgagaagactgctgcaggagaccgagctggtggagcccctgacccccagcggcgccatgcccaaccaggcccagatgagaatcctgaaggagaccgagctgagaaaggtgaaggtgctgggcagcggcgccttcggcaccgtgtacaagggcatctggatccccgacggcgagaacgtgaagatccccgtggccatcaaggtgctgagagagaacaccagccccaaggccaacaaggagatcctggacgaggcctacgtgatggccggcgtgggcagcccctacgtgagcagactgctgggcatctgcctgaccagcaccgtgcagctggtgacccagctgatgccctacggctgcctgctggaccacgtgagagagaacagaggcagactgggcagccaggacctgctgaactggtgcatgcagatcgccaagggcatgagctacctggaggacgtgagactggtgcacagagacctggccgccagaaacgtgctggtgaagagccccaaccacgtgaagatcaccgacttcggcctggccagactgctggacatcgacgagaccgagtaccacgccgacggcggcaaggtgcccatcaagtggatggccctggagagcatcctgagaagaagattcacccaccagagcgacgtgtggagctacggcgtgaccgtgtgggagctgatgaccttcggcgccaagccctacgacggcatccccgccagagagatccccgacctgctggagaagggcgagagactgccccagccccccatctgcaccatcgacgtgtacatgatcatggtgaagtgctggatgatcgacagcgagtgcagacccagattcagagagctggtgagcgagttcagcagaatggccagagacccccagagattcgtggtgatccagaacgaggacctgggccccgccagccccctggacagcaccttctacagaagcctgctggaggacgacgacatgggcgacctggtggacgccgaggagtacctggtgccccagcagggcttcttctgccccgaccccgcccccggcgccggcggcatggtgcaccacagacacagaagcagcagcaccagaagcggcggcggcgacctgaccctgggcctggagcccagcgaggaggaggcccccagaagccccctggcccccagcgagggcgccggcagcgacgtgttcgacggcgacctgggcatgggcgccgccaagggcctgcagagcctgcccacccacgaccccagccccctgcagagatacagcgaggaccccaccgtgcccctgcccagcgagaccgacggctacgtggcccccctgacctgcagcccccagcccgagtacgtgaaccagcccgacgtgagaccccagccccccagccccagagagggccccctgcccgccgccagacccgccggcgccaccctggagagacccaagaccctgagccccggcaagaacggcgtggtgaaggacgtgttcgccttcggcggcgccgtggagaaccccgagtacctgaccccccagggcggcgccgccccccagccccaccccccccccgccttcagccccgccttcgacaacctgtactactgggaccaggacccccccgagagaggcgccccccccagcaccttcaagggcacccccaccgccgagaaccccgagtacctgggcctggacgtgcccgtgtag

SEQ ID NO: 105025 - DNA, 3678 bp, synthetic construct
  misc_feature 1..3678: note = Description of Artificial Sequence: Synthetic coding sequence
  source 1..3678: mol_type = other DNA
atgaagctgagactgcccgccagccccgagacccacctggacatgctgagacacctgtaccagggctgccaggtggtgcagggcaacctggagctgacctacctgcccaccaacgccagcctgagcttcctgcaggacatccaggaggtgcagggctacgtgctgatcgcccacaaccaggtgagacaggtgcccctgcagagactgagaatcgtgagaggcacccagctgttcgaggacaactacgccctggccgtgctggacaacggcgaccccctgaacaacaccacccccgtgaccggcgccagccccggcggcctgagagagctgcagctgagaagcctgaccgagatcctgaagggcggcgtgctgatccagagaaacccccagctgtgctaccaggacaccatcctgtggaaggacatcttccacaagaacaaccagctggccctgaccctgatcgacaccaacagaagcagagcctgccacccctgcagccccatgtgcaagggcagcagatgctggggcgagagcagcgaggactgccagagcctgaccagaaccgtgtgcgccggcggctgcgccagatgcaagggccccctgcccaccgactgctgccacgagcagtgcgccgccggctgcaccggccccaagcacagcgactgcctggcctgcctgcacttcaaccacagcggcatctgcgagctgcactgccccgccctggtgacctacaacaccgacaccttcgagagcatgcccaaccccgagggcagatacaccttcggcgccagctgcgtgaccgcctgcccctacaactacctgagcaccgacgtgggcagctgcaccctggtgtgccccctgcacaaccaggaggtgaccgccgaggacggcacccagagatgcgagaagtgcagcaagccctgcgccagagtgtgctacggcctgggcatggagcacctgagagaggtgagagccgtgaccagcgccaacatccaggagttcgccggctgcaagaagatcttcggcagcctggccttcctgcccgagagcttcgacggcgaccccgccagcaacaccgcccccctgcagcccgagcagctgcaggtgttcgagaccctggaggagatcaccggctacctgtacatcagcgcctggcccgacagcctgcccgacctgagcgtgttccagaacctgcaggtgatcagaggcagaatcctgcacaacggcgcctacagcctgaccctgcagggcctgggcatcagctggctgggcctgagaagcctgagagagctgggcagcggcctggccctgatccaccacaacacccacctgtgcttcgtgcacaccgtgccctgggaccagctgttcagaaacccccaccaggccctgctgcacaccgccaacagacccgaggacgagtgcgtgggcgagggcctggcctgccaccagctgtgcgccagaggccactgctggggccccggccccacccagtgcgtgaactgcagccagttcctgagaggccaggagtgcgtggaggagtgcagagtgctgcagggcctgcccagagagtacgtgaacgccagacactgcctgccctgccaccccgagtgccagccccagaacggcagcgtgacctgcttcggccccgaggccgaccagtgcgtggcctgcgcccactacaaggacccccccttctgcgtggccagatgccccagcggcgtgaagcccgacctgagctacatgcccatctggaagttccccgacgaggagggcgcctgccagccctgccccatcaactgcacccacagctgcgtggacctggacgacaagggctgccccgccgagcagagagccagccccctgaccagcatcatcagcgccgtggtgggcatcctgctggtggtggtgctgggcgtggtgttcggcatcctgatcaagagaagacagcagaagatcagaaagtacaccatgagaagactgctgcaggagaccgagctggtggagcccctgacccccagcggcgccatgcccaaccaggcccagatgagaatcctgaaggagaccgagctgagaaaggtgaaggtgctgggcagcggcgccttcggcaccgtgtacaagggcatctggatccccgacggcgagaacgtgaagatccccgtggccatcaaggtgctgagagagaacaccagccccaaggccaacaaggagatcctggacgaggcctacgtgatggccggcgtgggcagcccctacgtgagcagactgctgggcatctgcctgaccagcaccgtgcagctggtgacccagctgatgccctacggctgcctgctggaccacgtgagagagaacagaggcagactgggcagccaggacctgctgaactggtgcatgcagatcgccaagggcatgagctacctggaggacgtgagactggtgcacagagacctggccgccagaaacgtgctggtgaagagccccaaccacgtgaagatcaccgacttcggcctggccagactgctggacatcgacgagaccgagtaccacgccgacggcggcaaggtgcccatcaagtggatggccctggagagcatcctgagaagaagattcacccaccagagcgacgtgtggagctacggcgtgaccgtgtgggagctgatgaccttcggcgccaagccctacgacggcatccccgccagagagatccccgacctgctggagaagggcgagagactgccccagccccccatctgcaccatcgacgtgtacatgatcatggtgaagtgctggatgatcgacagcgagtgcagacccagattcagagagctggtgagcgagttcagcagaatggccagagacccccagagattcgtggtgatccagaacgaggacctgggccccgccagccccctggacagcaccttctacagaagcctgctggaggacgacgacatgggcgacctggtggacgccgaggagtacctggtgccccagcagggcttcttctgccccgaccccgcccccggcgccggcggcatggtgcaccacagacacagaagcagcagcaccagaagcggcggcggcgacctgaccctgggcctggagcccagcgaggaggaggcccccagaagccccctggcccccagcgagggcgccggcagcgacgtgttcgacggcgacctgggcatgggcgccgccaagggcctgcagagcctgcccacccacgaccccagccccctgcagagatacagcgaggaccccaccgtgcccctgcccagcgagaccgacggctacgtggcccccctgacctgcagcccccagcccgagtacgtgaaccagcccgacgtgagaccccagccccccagccccagagagggccccctgcccgccgccagacccgccggcgccaccctggagagacccaagaccctgagccccggcaagaacggcgtggtgaaggacgtgttcgccttcggcggcgccgtggagaaccccgagtacctgaccccccagggcggcgccgccccccagccccaccccccccccgccttcagccccgccttcgacaacctgtactactgggaccaggacccccccgagagaggcgccccccccagcaccttcaagggcacccccaccgccgagaaccccgagtacctgggcctggacgtgcccgtgtag

SEQ ID NO: 105026 - DNA, 2940 bp, synthetic construct
  misc_feature 1..2940: note = Description of Artificial Sequence: Synthetic coding sequence
  source 1..2940: mol_type = other DNA
atggagctggccgccctgtgcagatggggcctgctgctggccctgctgccccccggcgccgccagcacccaggacaactacctgagcaccgacgtgggcagctgcaccctggtgtgccccctgcacaaccaggaggtgaccgccgaggacggcacccagagatgcgagaagtgcagcaagccctgcgccagagtgtgctacggcctgggcatggagcacctgagagaggtgagagccgtgaccagcgccaacatccaggagttcgccggctgcaagaagatcttcggcagcctggccttcctgcccgagagcttcgacggcgaccccgccagcaacaccgcccccctgcagcccgagcagctgcaggtgttcgagaccctggaggagatcaccggctacctgtacatcagcgcctggcccgacagcctgcccgacctgagcgtgttccagaacctgcaggtgatcagaggcagaatcctgcacaacggcgcctacagcctgaccctgcagggcctgggcatcagctggctgggcctgagaagcctgagagagctgggcagcggcctggccctgatccaccacaacacccacctgtgcttcgtgcacaccgtgccctgggaccagctgttcagaaacccccaccaggccctgctgcacaccgccaacagacccgaggacgagtgcgtgggcgagggcctggcctgccaccagctgtgcgccagaggccactgctggggccccggccccacccagtgcgtgaactgcagccagttcctgagaggccaggagtgcgtggaggagtgcagagtgctgcagggcctgcccagagagtacgtgaacgccagacactgcctgccctgccaccccgagtgccagccccagaacggcagcgtgacctgcttcggccccgaggccgaccagtgcgtggcctgcgcccactacaaggacccccccttctgcgtggccagatgccccagcggcgtgaagcccgacctgagctacatgcccatctggaagttccccgacgaggagggcgcctgccagccctgccccatcaactgcacccacagctgcgtggacctggacgacaagggctgccccgccgagcagagagccagccccctgaccagcatcatcagcgccgtggtgggcatcctgctggtggtggtgctgggcgtggtgttcggcatcctgatcaagagaagacagcagaagatcagaaagtacaccatgagaagactgctgcaggagaccgagctggtggagcccctgacccccagcggcgccatgcccaaccaggcccagatgagaatcctgaaggagaccgagctgagaaaggtgaaggtgctgggcagcggcgccttcggcaccgtgtacaagggcatctggatccccgacggcgagaacgtgaagatccccgtggccatcaaggtgctgagagagaacaccagccccaaggccaacaaggagatcctggacgaggcctacgtgatggccggcgtgggcagcccctacgtgagcagactgctgggcatctgcctgaccagcaccgtgcagctggtgacccagctgatgccctacggctgcctgctggaccacgtgagagagaacagaggcagactgggcagccaggacctgctgaactggtgcatgcagatcgccaagggcatgagctacctggaggacgtgagactggtgcacagagacctggccgccagaaacgtgctggtgaagagccccaaccacgtgaagatcaccgacttcggcctggccagactgctggacatcgacgagaccgagtaccacgccgacggcggcaaggtgcccatcaagtggatggccctggagagcatcctgagaagaagattcacccaccagagcgacgtgtggagctacggcgtgaccgtgtgggagctgatgaccttcggcgccaagccctacgacggcatccccgccagagagatccccgacctgctggagaagggcgagagactgccccagccccccatctgcaccatcgacgtgtacatgatcatggtgaagtgctggatgatcgacagcgagtgcagacccagattcagagagctggtgagcgagttcagcagaatggccagagacccccagagattcgtggtgatccagaacgaggacctgggccccgccagccccctggacagcaccttctacagaagcctgctggaggacgacgacatgggcgacctggtggacgccgaggagtacctggtgccccagcagggcttcttctgccccgaccccgcccccggcgccggcggcatggtgcaccacagacacagaagcagcagcaccagaagcggcggcggcgacctgaccctgggcctggagcccagcgaggaggaggcccccagaagccccctggcccccagcgagggcgccggcagcgacgtgttcgacggcgacctgggcatgggcgccgccaagggcctgcagagcctgcccacccacgaccccagccccctgcagagatacagcgaggaccccaccgtgcccctgcccagcgagaccgacggctacgtggcccccctgacctgcagcccccagcccgagtacgtgaaccagcccgacgtgagaccccagccccccagccccagagagggccccctgcccgccgccagacccgccggcgccaccctggagagacccaagaccctgagccccggcaagaacggcgtggtgaaggacgtgttcgccttcggcggcgccgtggagaaccccgagtacctgaccccccagggcggcgccgccccccagccccaccccccccccgccttcagccccgccttcgacaacctgtactactgggaccaggacccccccgagagaggcgccccccccagcaccttcaagggcacccccaccgccgagaaccccgagtacctgggcctggacgtgcccgtgtag

SEQ ID NO: 105027 - DNA, 1812 bp, synthetic construct
  misc_feature 1..1812: note = Description of Artificial Sequence: Synthetic coding sequence
  source 1..1812: mol_type = other DNA
atgaagctgagactgcccgccagccccgagacccacctggacatgctgagacacctgtaccagggctgccaggtggtgcagggcaacctggagctgacctacctgcccaccaacgccagcctgagcttcctgcaggacatccaggaggtgcagggctacgtgctgatcgcccacaaccaggtgagacaggtgcccctgcagagactgagaatcgtgagaggcacccagctgttcgaggacaactacgccctggccgtgctggacaacggcgaccccctgaacaacaccacccccgtgaccggcgccagccccggcggcctgagagagctgcagctgagaagcctgaccgagatcctgaagggcggcgtgctgatccagagaaacccccagctgtgctaccaggacaccatcctgtggaaggacatcttccacaagaacaaccagctggccctgaccctgatcgacaccaacagaagcagagcctgccacccctgcagccccatgtgcaagggcagcagatgctggggcgagagcagcgaggactgccagagcctgaccagaaccgtgtgcgccggcggctgcgccagatgcaagggccccctgcccaccgactgctgccacgagcagtgcgccgccggctgcaccggccccaagcacagcgactgcctggcctgcctgcacttcaaccacagcggcatctgcgagctgcactgccccgccctggtgacctacaacaccgacaccttcgagagcatgcccaaccccgagggcagatacaccttcggcgccagctgcgtgaccgcctgcccctacaactacctgagcaccgacgtgggcagctgcaccctggtgtgccccctgcacaaccaggaggtgaccgccgaggacggcacccagagatgcgagaagtgcagcaagccctgcgccagagtgtgctacggcctgggcatggagcacctgagagaggtgagagccgtgaccagcgccaacatccaggagttcgccggctgcaagaagatcttcggcagcctggccttcctgcccgagagcttcgacggcgaccccgccagcaacaccgcccccctgcagcccgagcagctgcaggtgttcgagaccctggaggagatcaccggctacctgtacatcagcgcctggcccgacagcctgcccgacctgagcgtgttccagaacctgcaggtgatcagaggcagaatcctgcacaacggcgcctacagcctgaccctgcagggcctgggcatcagctggctgggcctgagaagcctgagagagctgggcagcggcctggccctgatccaccacaacacccacctgtgcttcgtgcacaccgtgccctgggaccagctgttcagaaacccccaccaggccctgctgcacaccgccaacagacccgaggacgagtgcgtgggcgagggcctggcctgccaccagctgtgcgccagaggccactgctggggccccggccccacccagtgcgtgaactgcagccagttcctgagaggccaggagtgcgtggaggagtgcagagtgctgcagggcctgcccagagagtacgtgaacgccagacactgcctgccctgccaccccgagtgccagccccagaacggcagcgtgacctgcttcggccccgaggccgaccagtgcgtggcctgcgcccactacaaggacccccccttctgcgtggccagatgccccagcggcgtgaagcccgacctgagctacatgcccatctggaagttccccgacgaggagggcgcctgccagccctgccccatcaactgcacccacagctag

SEQ ID NO: 105028 - DNA, 3678 bp, synthetic construct; identical to SEQ ID NO: 105025
  misc_feature 1..3678: note = Description of Artificial Sequence: Synthetic coding sequence
  source 1..3678: mol_type = other DNA

SEQ ID NO: 105029 - DNA, 3723 bp, synthetic construct
  misc_feature 1..3723: note = Description of Artificial Sequence: Synthetic coding sequence
  source 1..3723: mol_type = other DNA
atgcccagaggcagctggaagccccaggtgtgcaccggcaccgacatgaagctgagactgcccgccagccccgagacccacctggacatgctgagacacctgtaccagggctgccaggtggtgcagggcaacctggagctgacctacctgcccaccaacgccagcctgagcttcctgcaggacatccaggaggtgcagggctacgtgctgatcgcccacaaccaggtgagacaggtgcccctgcagagactgagaatcgtgagaggcacccagctgttcgaggacaactacgccctggccgtgctggacaacggcgaccccctgaacaacaccacccccgtgaccggcgccagccccggcggcctgagagagctgcagctgagaagcctgaccgagatcctgaagggcggcgtgctgatccagagaaacccccagctgtgctaccaggacaccatcctgtggaaggacatcttccacaagaacaaccagctggccctgaccctgatcgacaccaacagaagcagagcctgccacccctgcagccccatgtgcaagggcagcagatgctggggcgagagcagcgaggactgccagagcctgaccagaaccgtgtgcgccggcggctgcgccagatgcaagggccccctgcccaccgactgctgccacgagcagtgcgccgccggctgcaccggccccaagcacagcgactgcctggcctgcctgcacttcaaccacagcggcatctgcgagctgcactgccccgccctggtgacctacaacaccgacaccttcgagagcatgcccaaccccgagggcagatacaccttcggcgccagctgcgtgaccgcctgcccctacaactacctgagcaccgacgtgggcagctgcaccctggtgtgccccctgcacaaccaggaggtgaccgccgaggacggcacccagagatgcgagaagtgcagcaagccctgcgccagagtgtgctacggcctgggcatggagcacctgagagaggtgagagccgtgaccagcgccaacatccaggagttcgccggctgcaagaagatcttcggcagcctggccttcctgcccgagagcttcgacggcgaccccgccagcaacaccgcccccctgcagcccgagcagctgcaggtgttcgagaccctggaggagatcaccggctacctgtacatcagcgcctggcccgacagcctgcccgacctgagcgtgttccagaacctgcaggtgatcagaggcagaatcctgcacaacggcgcctacagcctgaccctgcagggcctgggcatcagctggctgggcctgagaagcctgagagagctgggcagcggcctggccctgatccaccacaacacccacctgtgcttcgtgcacaccgtgccctgggaccagctgttcagaaacccccaccaggccctgctgcacaccgccaacagacccgaggacgagtgcgtgggcgagggcctggcctgccaccagctgtgcgccagaggccactgctggggccccggccccacccagtgcgtgaactgcagccagttcctgagaggccaggagtgcgtggaggagtgcagagtgctgcagggcctgcccagagagtacgtgaacgccagacactgcctgccctgccaccccgagtgccagccccagaacggcagcgtgacctgcttcggccccgaggccgaccagtgcgtggcctgcgcccactacaaggacccccccttctgcgtggccagatgccccagcggcgtgaagcccgacctgagctacatgcccatctggaagttccccgacgaggagggcgcctgccagccctgccccatcaactgcacccacagctgcgtggacctggacgacaagggctgccccgccgagcagagagccagccccctgaccagcatcatcagcgccgtggtgggcatcctgctggtggtggtgctgggcgtggtgttcggcatcctgatcaagagaagacagcagaagatcagaaagtacaccatgagaagactgctgcaggagaccgagctggtggagcccctgacccccagcggcgccatgcccaaccaggcccagatgagaatcctgaaggagaccgagctgagaaaggtgaaggtgctgggcagcggcgccttcggcaccgtgtacaagggcatctggatccccgacggcgagaacgtgaagatccccgtggccatcaaggtgctgagagagaacaccagccccaaggccaacaaggagatcctggacgaggcctacgtgatggccggcgtgggcagcccctacgtgagcagactgctgggcatctgcctgaccagcaccgtgcagctggtgacccagctgatgccctacggctgcctgctggaccacgtgagagagaacagaggcagactgggcagccaggacctgctgaactggtgcatgcagatcgccaagggcatgagctacctggaggacgtgagactggtgcacagagacctggccgccagaaacgtgctggtgaagagccccaaccacgtgaagatcaccgacttcggcctggccagactgctggacatcgacgagaccgagtaccacgccgacggcggcaaggtgcccatcaagtggatggccctggagagcatcctgagaagaagattcacccaccagagcgacgtgtggagctacggcgtgaccgtgtgggagctgatgaccttcggcgccaagccctacgacggcatccccgccagagagatccccgacctgctggagaagggcgagagactgccccagccccccatctgcaccatcgacgtgtacatgatcatggtgaagtgctggatgatcgacagcgagtgcagacccagattcagagagctggtgagcgagttcagcagaatggccagagacccccagagattcgtggtgatccagaacgaggacctgggccccgccagccccctggacagcaccttctacagaagcctgctggaggacgacgacatgggcgacctggtggacgccgaggagtacctggtgccccagcagggcttcttctgccccgaccccgcccccggcgccggcggcatggtgcaccacagacacagaagcagcagcaccagaagcggcggcggcgacctgaccctgggcctggagcccagcgaggaggaggcccccagaagccccctggcccccagcgagggcgccggcagcgacgtgttcgacggcgacctgggcatgggcgccgccaagggcctgcagagcctgcccacccacgaccccagccccctgcagagatacagcgaggaccccaccgtgcccctgcccagcgagaccgacggctacgtggcccccctgacctgcagcccccagcccgagtacgtgaaccagcccgacgtgagaccccagccccccagccccagagagggccccctgcccgccgccagacccgccggcgccaccctggagagacccaagaccctgagccccggcaagaacggcgtggtgaaggacgtgttcgccttcggcggcgccgtggagaaccccgagtacctgaccccccagggcggcgccgccccccagccccaccccccccccgccttcagccccgccttcgacaacctgtactactgggaccaggacccccccgagagaggcgccccccccagcaccttcaagggcacccccaccgccgagaaccccgagtacctgggcctggacgtgcccgtgtag

SEQ ID NO: 105030 - DNA, 2259 bp, synthetic construct
  misc_feature 1..2259: note = Description of Artificial Sequence: Synthetic coding sequence
  source 1..2259: mol_type = other DNA
atgggcaccagcgccctgtgggccctgtggctgctgctggccctgtgctgggcccccagagagagcggcgccaccggcaccggcagaaaggccaagtgcgagcccagccagttccagtgcaccaacggcagatgcatcaccctgctgtggaagtgcgacggcgacgaggactgcgtggacggcagcgacgagctggactgcgccccccccacctgcggcgcccacgagttccagtgcagcaccagcagctgcatccccatcagctgggtgtgcgacgacgacgccgactgcagcgaccagagcgacgagagcctggagcagtgcggcagacagcccgtgatccacaccaagtgccccgccagcgagatccagtgcggcagcggcgagtgcatccacaagaagtggagatgcgacggcgaccccgactgcaaggacggcagcgacgaggtgaactgccccagcagaacctgcagacccgaccagttcgagtgcgaggacggcagctgcatccacggcagcagacagtgcaacggcatcagagactgcgtggacggcagcgacgaggtgaactgcaagaacgtgaaccagtgcctgggccccggcaagttcaagtgcagaagcggcgagtgcatcgacatcagcaaggtgtgcaaccaggagcaggactgcagagactggagcgacgagcccctgaaggagtgccacatcaacgagtgcctggtgaacaacggcggctgcagccacatctgcaaggacctggtgatcggctacgagtgcgactgcgccgccggcttcgagctgatcgacagaaagacctgcggcgacatcgacgagtgccagaaccccggcatctgcagccagatctgcatcaacctgaagggcggctacaagtgcgagtgcagcagaggctaccagatggacctggccaccggcgtgtgcaaggccgtgggcaaggagcccagcctgatcttcaccaacagaagagacatcagaaagatcggcctggagagaaaggagtacatccagctggtggagcagctgagaaacaccgtggccctggacgccgacatcgccgcccagaagctgttctgggccgacctgagccagaaggccatcttcagcgccagcatcgacgacaaggtgggcagacacgtgaagatgatcgacaacgtgtacaaccccgccgccatcgccgtggactgggtgtacaagaccatctactggaccgacgccgccagcaagaccatcagcgtggccaccctggacggcaccaagagaaagttcctgttcaacagcgacctgagagagcccgccagcatcgccgtggaccccctgagcggcttcgtgtactggagcgactggggcgagcccgccaagatcgagaaggccggcatgaacggcttcgacagaagacccctggtgaccgccgacatccagtggcccaacggcatcaccctggacctgatcaagagcagactgtactggctggacagcaagctgcacatgctgagcagcgtggacctgaacggccaggacagaagaatcgtgctgaagagcctggagttcctggcccaccccctggccctgaccatcttcgaggacagagtgtactggatcgacggcgagaacgaggccgtgtacggcgccaacaagttcaccggcagcgagctggccaccctggtgaacaacctgaacgacgcccaggacatcatcgtgtaccacgagctggtgcagcccagcggcaagaactggtgcgaggaggacatggagaacggcggctgcgagtacctgtgcctgcccgccccccagatcaacgaccacagccccaagtacacctgcagctgccccagcggctacaacgtggaggagaacggcagagactgccagagcaccgccaccaccgtgacctacagcgagaccaaggacaccaacaccaccgagatcagcgccaccagcggcctggtgcccggcggcatcaacgtgaccaccgccgtgagcgaggtgagcgtgccccccaagggcaccagcgccgcctgggccatcctgcccctgctgctgctggtgatggccgccgtgggcggctacctgatgtggagaaactggcagcacaagaacatgaagagcatgaacttcgacaaccccgtgtacctgaagaccaccgaggaggacctgagcatcgacatcggcagacacagcgccagcgtgggccacacctaccccgccatcagcgtggtgagcaccgacgacgacctggcctag

SEQ ID NO: 105031 - DNA, 522 bp, synthetic construct
  misc_feature 1..522: note = Description of Artificial Sequence: Synthetic coding sequence
  source 1..522: mol_type = other DNA
atgggcaccagcgccctgtgggccctgtggctgctgctggccctgtgctgggcccccagagagagcggcgccaccggcaccggcagaaaggccaagtgcgagcccagccagttccagtgcaccaacggcagatgcatcaccctgctgtggaagtgcgacggcgacgaggactgcgtggacggcagcgacgagaagaactgcgtgaagaagacctgcgccgagagcgacttcgtgtgcaacaacggccagtgcgtgcccagcagatggaagtgcgacggcgaccccgactgcgaggacggcagcgacgagagccccgagcagtgcagaaacatcacctgcagccccgacgagttcacctgcagcagcggcagatgcatcagcagaaacttcgtgtgcaacggccaggacgactgcagcgacggcagcgacgagctggactgcgccccccccacctgcggcgcccacgagttccagtgcagcaccagcagctgcatccccatcagctgggtgtgcgacgactag

SEQ ID NO: 105032 - DNA, 2538 bp, synthetic construct
  misc_feature 1..2538: note = Description of Artificial Sequence: Synthetic coding sequence
  source 1..2538: mol_type = other DNA
atgggcaccagcgccctgtgggccctgtggctgctgctggccctgtgctgggcccccagagagagcggcgccaccggcaccggcagaaaggccaagtgcgagcccagccagttccagtgcaccaacggcagatgcatcaccctgctgtggaagtgcgacggcgacgaggactgcgtggacggcagcgacgagaagaactgcgtgaagaagacctgcgccgagagcgacttcgtgtgcaacaacggccagtgcgtgcccagcagatggaagtgcgacggcgaccccgactgcgaggacggcagcgacgagagccccgagcagtgccacatgagaacctgcagaatccacgagatcagctgcggcgcccacagcacccagtgcatccccgtgagctggagatgcgacggcgagaacgactgcgacagcggcgaggacgaggagaactgcggcaacatcacctgcagccccgacgagttcacctgcagcagcggcagatgcatcagcagaaacttcgtgtgcaacggccaggacgactgcagcgacggcagcgacgagctggactgcgccccccccacctgcggcgcccacgagttccagtgcagcaccagcagctgcatccccatcagctgggtgtgcgacgacgacgccgactgcagcgaccagagcgacgagagcctggagcagtgcggcagacagcccgtgatccacaccaagtgccccgccagcgagatccagtgcggcagcggcgagtgcatccacaagaagtggagatgcgacggcgaccccgactgcaaggacggcagcgacgaggtgaactgccccagcagaacctgcagacccgaccagttcgagtgcgaggacggcagctgcatccacggcagcagacagtgcaacggcatcagagactgcgtggacggcagcgacgaggtgaactgcaagaacgtgaaccagtgcctgggccccggcaagttcaagtgcagaagcggcgagtgcatcgacatcagcaaggtgtgcaaccaggagcaggactgcagagactggagcgacgagcccctgaaggagtgccacatcaacgagtgcctggtgaacaacggcggctgcagccacatctgcaaggacctggtgatcggctacgagtgcgactgcgccgccggcttcgagctgatcgacagaaagacctgcggcgacatcgacgagtgccagaaccccggcatctgcagccagatctgcatcaacctgaagggcggctacaagtgcgagtgcagcagaggctaccagatggacctggccaccggcgtgtgcaaggccgtgggcaaggagcccagcctgatcttcaccaacagaagagacatcagaaagatcggcctggagagaaaggagtacatccagctggtggagcagctgagaaacaccgtggccctggacgccgacatcgccgcccagaagctgttctgggccgacctgagccagaaggccatcttcagcgccagcatcgacgacaaggtgggcagacacgtgaagatgatcgacaacgtgtacaaccccgccgccatcgccgtggactgggtgtacaagaccatctactggaccgacgccgccagcaagaccatcagcgtggccaccctggacggcaccaagagaaagttcctgttcaacagcgacctgagagagcccgccagcatcgccgtggaccccctgagcggcttcgtgtactggagcgactggggcgagcccgccaagatcgagaaggccggcatgaacggcttcgacagaagacccctggtgaccgccgacatccagtggcccaacggcatcaccctggacctgatcaagagcagactgtactggctggacagcaagctgcacatgctgagcagcgtggacctgaacggccaggacagaagaatcgtgctgaagagcctggagttcctggcccaccccctggccctgaccatcttcgaggacagagtgtactggatcgacggcgagaacgaggccgtgtacggcgccaacaagttcaccggcagcgagctggccaccctggtgaacaacctgaacgacgcccaggacatcatcgtgtaccacgagctggtgcagcccagcggcaagaactggtgcgaggaggacatggagaacggcggctgcgagtacctgtgcctgcccgccccccagatcaacgaccacagccccaagtacacctgcagctgccccagcggctacaacgtggaggagaacggcagagactgccagagaatcaacgtgaccaccgccgtgagcgaggtgagcgtgccccccaagggcaccagcgccgcctgggccatcctgcccctgctgctgctggtgatggccgccgtgggcggctacctgatgtggagaaactggcagcacaagaacatgaagagcatgaacttcgacaaccccgtgtacctgaagaccaccgaggaggacctgagcatcgacatcggcagacacagcgccagcgtgggccacacctaccccgccatcagcgtggtgagcaccgacgacgacctggcctag

SEQ ID NO: 105033 - DNA, 2622 bp, synthetic construct
  misc_feature 1..2622: note = Description of Artificial Sequence: Synthetic coding sequence
  source 1..2622: mol_type = other DNA
atgggcaccagcgccctgtgggccctgtggctgctgctggccctgtgctgggcccccagagagagcggcgccaccggcaccggcagaaaggccaagtgcgagcccagccagttccagtgcaccaacggcagatgcatcaccctgctgtggaagtgcgacggcgacgaggactgcgtggacggcagcgacgagaagaactgcgtgaagaagacctgcgccgagagcgacttcgtgtgcaacaacggccagtgcgtgcccagcagatggaagtgcgacggcgaccccgactgcgaggacggcagcgacgagagccccgagcagtgccacatgagaacctgcagaatccacgagatcagctgcggcgcccacagcacccagtgcatccccgtgagctggagatgcgacggcgagaacgactgcgacagcggcgaggacgaggagaactgcggcaacatcacctgcagccccgacgagttcacctgcagcagcggcagatgcatcagcagaaacttcgtgtgcaacggccaggacgactgcagcgacggcagcgacgagctggactgcgccccccccacctgcggcgcccacgagttccagtgcagcaccagcagctgcatccccatcagctgggtgtgcgacgacgacgccgactgcagcgaccagagcgacgagagcctggagcagtgcggcagacagcccgtgatccacaccaagtgccccgccagcgagatccagtgcggcagcggcgagtgcatccacaagaagtggagatgcgacggcgaccccgactgcaaggacggcagcgacgaggtgaactgccccagcagaacctgcagacccgaccagttcgagtgcgaggacggcagctgcatccacggcagcagacagtgcaacggcatcagagactgcgtggacggcagcgacgaggtgaactgcaagaacgtgaaccagtgcctgggccccggcaagttcaagtgcagaagcggcgagtgcatcgacatcagcaaggtgtgcaaccaggagcaggactgcagagactggagcgacgagcccctgaaggagtgccacatcaacgagtgcctggtgaacaacggcggctgcagccacatctgcaaggacctggtgatcggctacgagtgcgactgcgccgccggcttcgagctgatcgacagaaagacctgcggcgacatcgacgagtgccagaaccccggcatctgcagccagatctgcatcaacctgaagggcggctacaagtgcgagtgcagcagaggctaccagatggacctggccaccggcgtgtgcaaggccgtgggcaaggagcccagcctgatcttcaccaacagaagagacatcagaaagatcggcctggagagaaaggagtacatccagctggtggagcagctgagaaacaccgtggccctggacgccgacatcgccgcccagaagctgttctgggccgacctgagccagaaggccatcttcagcgccagcatcgacgacaaggtgggcagacacgtgaagatgatcgacaacgtgtacaaccccgccgccatcgccgtggactgggtgtacaagaccatctactggaccgacgccgccagcaagaccatcagcgtggccaccctggacggcaccaagagaaagttcctgttcaacagcgacctgagagagcccgccagcatcgccgtggaccccctgagcggcttcgtgtactggagcgactggggcgagcccgccaagatcgagaaggccggcatgaacggcttcgacagaagacccctggtgaccgccgacatccagtggcccaacggcatcaccctggacctgatcaagagcagactgtactggctggacagcaagctgcacatgctgagcagcgtggacctgaacggccaggacagaagaatcgtgctgaagagcctggagttcctggcccaccccctggccctgaccatcttcgaggacagagtgtactggatcgacggcgagaacgaggccgtgtacggcgccaacaagttcaccggcagcgagctggccaccctggtgaacaacctgaacgacgcccaggacatcatcgtgtaccacgagctggtgcagcccagcggcaagaactggtgcgaggaggacatggagaacggcggctgcgagtacctgtgcctgcccgccccccagatcaacgaccacagccccaagtacacctgcagctgccccagcggctacaacgtggaggagaacggcagagactgccagagcaccgccaccaccgtgacctacagcgagaccaaggacaccaacaccaccgagatcagcgccaccagcggcctggtgcccggcggcatcaacgtgaccaccgccgtgagcgaggtgagcgtgccccccaagggcaccagcgccgcctgggccatcctgcccctgctgctgctggtgatggccgccgtgggcggctacctgatgtggagaaactggcagcacaagaacatgaagagcatgaacttcgacaaccccgtgtacctgaagaccaccgaggaggacctgagcatcgacatcggcagacacagcgccagcgtgggccacacctaccccgccatcagcgtggtgagcaccgacgacgacctggcctag

SEQ ID NO: 105034 - DNA, 729 bp, synthetic construct
  misc_feature 1..729: note = Description of Artificial Sequence: Synthetic coding sequence
  source 1..729: mol_type = other DNA
atgagcgacgagagagaggtggccgaggccgccaccggcgaggacgccagcagccccccccccaagaccgaggccgccagcgacccccagcaccccgccgccagcgagggcgccgccgccgccgccgccagcccccccctgctgagatgcctggtgctgaccggcttcggcggctacgacaaggtgaagctgcagagcagacccgccgccccccccgcccccggccccggccagctgaccctgagactgagagcctgcggcctgaacttcgccgacctgatggccagacagggcctgtacgacagactgccccccctgcccgtgacccccggcatggagggcgccggcgtggtgatcgccgtgggcgagggcgtgagcgacagaaaggccggcgacagagtgatggtgctgaacagaagcggcatgtggcaggaggaggtgaccgtgcccagcgtgcagaccttcctgatccccgaggccatgaccttcgaggaggccgccgccctgctggtgaactacatcaccgcctacatggtgctgttcgacttcggcaacctgcagcccggccacagcgtgctggtgcacatggccgccggcggcgtgggcatggccgccgtgcagctgccctacagcggcgagtgcgacagcgtgagaaacggcctgggccagcaggccagaggcaccgagggcgagtggggccacaccagccacagactgagccacgactag

SEQ ID NO: 105035 - DNA, 1182 bp, synthetic construct
  misc_feature 1..1182: note = Description of Artificial Sequence: Synthetic coding sequence
  source 1..1182: mol_type = other DNA
atgagcgacgagagagaggtggccgaggccgccaccggcgaggacgccagcagccccccccccaagaccgaggccgccagcgacccccagcaccccgccgccagcgagggcgccgccgccgccgccgccagcccccccctgctgagatgcctggtgctgaccggcttcggcggctacgacaaggtgaagctgcagagcagacccgccgccccccccgcccccggccccggccagctgaccctgagactgagagcctgcggcctgaacttcgccgacctgatggccagacagggcctgtacgacagactgccccccctgcccgtgacccccggcatggagggcgccggcgtggtgatcgccgtgggcgagggcgtgagcgacagaaaggccggcgacagagtgatggtgctgaacagaagcggcatgtggcaggaggaggtgaccgtgcccagcgtgcagaccttcctgatccccgaggccatgaccttcgaggaggccgccgccctgctggtgaactacatcaccgcctacatggtgctgttcgacttcggcaacctgcagcccggccacagcgtgctggtgcacatggccgccggcggcgtgggcatggccgccgtgcagctgtgcagaaccgtggagaacgtgaccgtgttcggcaccgccagcgccagcaagcacgaggccctgaaggagaacggcgtgacccaccccatcgactaccacaccaccgactacgtggacgagatcaagaagatcagccccaagggcgtggacatcgtgatggaccccctgggcggcagcgacaccgccaagggctacaacctgctgaagcccatgggcaaggtggtgacctacggcatggccaacctgctgaccggccccaagagaaacctgatggccctggccagaacctggtggaaccagttcagcgtgaccgccctgcagctgctgcaggccaacagagccgtgtgcggcttccacctgggctacctggacggcgaggtggagctggtgagcggcgtggtggccagactgctggccctgtacaaccagggccacatcaagccccacatcgacagcgtgtggcccttcgagaaggtggccgacgccatgaagcagatgcaggagaagaagaacgtgggcaaggtgctgctggtgcccggccccgagaaggagaactag

SEQ ID NO: 105036 - DNA, 780 bp, synthetic construct
  misc_feature 1..780: note = Description of Artificial Sequence: Synthetic coding sequence
  source 1..780: mol_type = other DNA
atggtgctgaacagaagcggcatgtggcaggaggaggtgaccgtgcccagcgtgcagaccttcctgatccccgaggccatgaccttcgaggaggccgccgccctgctggtgaactacatcaccgcctacatggtgctgttcgacttcggcaacctgcagcccggccacagcgtgctggtgcacatggccgccggcggcgtgggcatggccgccgtgcagctgtgcagaaccgtggagaacgtgaccgtgttcggcaccgccagcgccagcaagcacgaggccctgaaggagaacggcgtgacccaccccatcgactaccacaccaccgactacgtggacgagatcaagaagatcagccccaagggcgtggacatcgtgatggaccccctgggcggcagcgacaccgccaagggctacaacctgctgaagcccatgggcaaggtggtgacctacggcatggccaacctgctgaccggccccaagagaaacctgatggccctggccagaacctggtggaaccagttcagcgtgaccgccctgcagctgctgcaggccaacagagccgtgtgcggcttccacctgggctacctggacggcgaggtggagctggtgagcggcgtggtggccagactgctggccctgtacaaccagggccacatcaagccccacatcgacagcgtgtggcccttcgagaaggtggccgacgccatgaagcagatgcaggagaagaagaacgtgggcaaggtgctgctggtgcccggccccgagaaggagaactag

SEQ ID NO: 105037 - DNA, 903 bp, synthetic construct
  misc_feature 1..903: note = Description of Artificial Sequence: Synthetic coding sequence
  source 1..903: mol_type = other DNA
atggccagacagggcctgtacgacagactgccccccctgcccgtgacccccggcatggagggcgccggcgtggtgatcgccgtgggcgagggcgtgagcgacagaaaggccggcgacagagtgatggtgctgaacagaagcggcatgtggcaggaggaggtgaccgtgcccagcgtgcagaccttcctgatccccgaggccatgaccttcgaggaggccgccgccctgctggtgaactacatcaccgcctacatggtgctgttcgacttcggcaacctgcagcccggccacagcgtgctggtgcacatggccgccggcggcgtgggcatggccgccgtgcagctgtgcagaaccgtggagaacgtgaccgtgttcggcaccgccagcgccagcaagcacgaggccctgaaggagaacggcgtgacccaccccatcgactaccacaccaccgactacgtggacgagatcaagaagatcagccccaagggcgtggacatcgtgatggaccccctgggcggcagcgacaccgccaagggctacaacctgctgaagcccatgggcaaggtggtgacctacggcatggccaacctgctgaccggccccaagagaaacctgatggccctggccagaacctggtggaaccagttcagcgtgaccgccctgcagctgctgcaggccaacagagccgtgtgcggcttccacctgggctacctggacggcgaggtggagctggtgagcggcgtggtggccagactgctggccctgtacaaccagggccacatcaagccccacatcgacagcgtgtggcccttcgagaaggtggccgacgccatgaagcagatgcaggagaagaagaacgtgggcaaggtgctgctggtgcccggccccgagaaggagaactag

SEQ ID NO: 105038 - DNA, 654 bp, synthetic construct
  misc_feature 1..654: note = Description of Artificial Sequence: Synthetic coding sequence
  source 1..654: mol_type = other DNA
atgagcagcgacttcgagggctacgagcaggacttcgccgtgctgaccgccgagatcaccagcaagatcgccagagtgcccagactgccccccgacgagaagaagcagatggtggccaacgtggagaagcagctggaggaggccaaggagctgctggagcagatggacctggaggtgagagagatccccccccagagcagaggcatgtacagcaacagaatgagaagctacaagcaggagatgggcaagctggagaccgacttcaagagaagcagaatcgcctacagcgacgaggtgagaaacgagctgctgggcgacgacggcaacagcagcgagaaccagagagcccacctgctggacaacaccgagagactggagagaagcagcagaagactggaggccggctaccagatcgccgtggagaccgagcagatcggccaggagatgctggagaacctgagccacgacagagagaagatccagagagccagagagagactgagagagaccgacgccaacctgggcaagagcagcagaatcctgaccggcatgctgagaagaatcatccagaacagaatcctgctggtgatcctgggcatcatcgtggtgatcaccatcctgatggccatcaccttcagcgtgagaagacactag

SEQ ID NO: 105039 - DNA, 612 bp, synthetic construct
  misc_feature 1..612: note = Description of Artificial Sequence: Synthetic coding sequence
  source 1..612: mol_type = other DNA
atgagcagcgacttcgagggctacgagcaggacttcgccgtgctgaccgccgagatcaccagcaagatcgccagagtgcccagactgccccccgacgagaagaagcagatggtggccaacgtggagaagcagctggaggaggccaaggagctgctggagcagatggacctggaggtgagagagatccccccccagagcagaggcatgtacagcaacagaatgagaagctacaagcaggagatgggcaagctggagaccgacttcaagagaagcagaatcgcctacagcgacgaggtgagaaacgagctgctgggcgacgacggcaacagcagcgagaaccagagagcccacctgctggacaacaccgagagactggagagaagcagcagaagactggaggccggctaccagatcgccgtggagaccgagcagatcggccaggagatgctggagaacctgagccacgacagagagaagatccagagagccagagagagactgagagagaccgacgccaacctgggcaagagcagcagaatcctgaccggcatgctgagaagaggctgcagcgtgaagaagcagtgcaacctgagcctggcccccaaggcctag

SEQ ID NO: 105040 - DNA, 432 bp, synthetic construct
  misc_feature 1..432: note = Description of Artificial Sequence: Synthetic coding sequence
  source 1..432: mol_type = other DNA
atgagcgcccccgcccagccccccgccgagggcaccgagggcaccgcccccggcggcggcccccccggccccccccccaacatgaccagcaacagaagactgcagcagacccaggcccaggtggaggaggtggtggacatcatcagagtgaacgtggacaaggtgctggagagagaccagaagctgagcgagctggacgacagagccgacgccctgcaggccggcgccagccagttcgagagcagcgccgccaagctgaagagaaagtactggtggaagaactgcaagatgatgatcatgctgggcagatggcagctgacccagtactgcctggtgatgtggagcttccccagctggaccagacccgaggagggccccggcggcggccccaagagcaacctggtgagcgtgcagtaccccttcagaaagtag

SEQ ID NO: 105041 - DNA, 354 bp, synthetic construct
  misc_feature 1..354: note = Description of Artificial Sequence: Synthetic coding sequence
  source 1..354: mol_type = other DNA
atgagcgcccccgcccagccccccgccgagggcaccgagggcaccgcccccggcggcggcccccccggccccccccccaacatgaccagcaacagaagactgcagcagacccaggcccaggtggaggaggtggtggacatcatcagagtgaacgtggacaaggtgctggagagagaccagaagctgagcgagctggacgacagagccgacgccctgcaggccggcgccagccagttcgagagcagcgccgccaagctgaagagaaagtactggtggaagaactgcaagatgatgatcatgctgggcgccatctgcgccatcatcgtggtggtgatcgtgagcaagtacagatag

SEQ ID NO: 105042 - DNA, 357 bp, synthetic construct
  misc_feature 1..357: note = Description of Artificial Sequence: Synthetic coding sequence
  source 1..357: mol_type = other DNA
atgagcgcccccgcccagccccccgccgagggcaccgagggcaccgcccccggcggcggcccccccggccccccccccaacatgaccagcaacagaagactgcagcagacccaggcccaggtggaggaggtggtggacatcatcagagtgaacgtggacaaggtgctggagagagaccagaagctgagcgagctggacgacagagccgacgccctgcaggccggcgccagccagttcgagagcagcgccgccaagctgaagagaaagtactggtggaagaactgcaagatgatgatcatgctgggcgccatctgcgccatcatcgtggtggtgatcgtgatctacttcttcacctag

SEQ ID NO: 105043 - DNA, 744 bp, synthetic construct
  misc_feature 1..744: note = Description of Artificial Sequence: Synthetic coding sequence
  source 1..744: mol_type = other DNA
atgagcgcccccgcccagccccccgccgagggcaccgagggcaccgcccccggcggcggcccccccggccccccccccaacatgaccagcaacagaagactgcagcagacccaggcccaggtggaggaggtggtggacatcatcagagtgaacgtggacaaggtgctggagagagaccagaagctgagcgagctggacgacagagccgacgccctgcaggccggcgccagccagttcgagagcagcgccgccaagctgaagagaaagtactggtggaagaactgcaagatgatgatcatgctgggcgccatctgcgccatcatcgtggtggtgatcgtgatctacttctacctgagaatgtaccaccccttccccgtggtgcactgccacccccacagctgccccctgcccagcgtgtgcagcctgaacaccctgccccacccccccagcagcatccccgcccaggccagccccagccccatcccccccttcagcctgagaagcttcgccctgtgccccagcaccctggagatgctgctggtggcccagagcaagagcctgcccgaggagcagcagctggccccccccccctgcctgctgttcctgtacagccaggtgccccccaagccccagagagtgggcggccagggcaagggccagggcggcgagtggctgagaagaagcacccacgaggccgcccagacctgggaggagaagagcatcggcgcccacggcgacttctag

SEQ ID NO: 105044 - DNA, 351 bp, synthetic construct
  misc_feature 1..351: note = Description of Artificial Sequence: Synthetic coding sequence
  source 1..351: mol_type = other DNA
atgagcgcccccgcccagccccccgccgagggcaccgagggcaccgcccccggcggcggcccccccggccccccccccaacatgaccagcaacagaagactgcagcagacccaggcccaggtggaggaggtggtggacatcatcagagtgaacgtggacaaggtgctggagagagaccagaagctgagcgagctggacgacagagccgacgccctgcaggccggcgccagccagttcgagagcagcgccgccaagctgaagagaaagtactggtggaagaactgcaagatgatgatcatgctgggcgccatctgcgccatcatcgtggtggtgatcgtgagaagagactag

SEQ ID NO: 105045 - DNA, 351 bp, synthetic construct
  misc_feature 1..351: note = Description of Artificial Sequence: Synthetic coding sequence
  source 1..351: mol_type = other DNA
atgagcgccaccgccgccaccgccccccccgccgcccccgccggcgagggcggcccccccgcccccccccccaacctgaccagcaacagaagactgcagcagacccaggcccaggtggacgaggtggtggacatcatgagagtgaacgtggacaaggtgctggagagagaccagaagctgagcgagctggacgacagagccgacgccctgcaggccggcgccagccagttcgagaccagcgccgccaagctgaagagaaagtactggtggaagaacctgaagatgatgatcatcctgggcgtgatctgcgccatcatcctgatcatcatcatcgtgtacttcagcacctag

SEQ ID NO: 105046 - DNA, 303 bp, synthetic construct
  misc_feature 1..303: note = Description of Artificial Sequence: Synthetic coding sequence
  source 1..303: mol_type = other DNA
atgagcaccggccccaccgccgccaccggcagcaacagaagactgcagcagacccagaaccaggtggacgaggtggtggacatcatgagagtgaacgtggacaaggtgctggagagagaccagaagctgagcgagctggacgacagagccgacgccctgcaggccggcgccagccagttcgagaccagcgccgccaagctgaagagaaagtactggtggaagaactgcaagatgtgggccatcggcatcaccgtgctggtgatcttcatcatcatcatcatcgtgtgggtggtgagcagctag

SEQ ID NO: 105047 - DNA, 351 bp, synthetic construct
  misc_feature 1..351: note = Description of Artificial Sequence: Synthetic coding sequence
  source 1..351: mol_type = other DNA
atggccggcatcgagctggagagatgccagcagcaggccaacgaggtgaccgagatcatgagaaacaacttcggcaaggtgctggagagaggcgtgaagctggccgagctgcagcagagaagcgaccagctgctggacatgagcagcaccttcaacaagaccacccagaacctggcccagaagaagtgctgggagaacatcagatacagaatctgcgtgggcctggtggtggtgggcgtgctgctgatcatcctgatcgtgctgctggtggtgttcctgccccagagcagcgacagcagcagcgcccccagaacccaggacgccggcatcgccagcggccccggcaactag

SEQ ID NO: 105048 - DNA, 783 bp, synthetic construct
  misc_feature 1..783: note = Description of Artificial Sequence: Synthetic coding sequence
  source 1..783: mol_type = other DNA
atggccatcctgttcgccgtggtggccagaggcaccaccatcctggccaagcacgcctggtgcggcggcaacttcctggaggtgaccgagcagatcctggccaagatccccagcgagaacaacaagctgacctacagccacggcaactacctgttccactacatctgccaggacagaatcgtgtacctgtgcatcaccgacgacgacttcgagagaagcagagccttcaacttcctgaacgagatcaagaagagattccagaccacctacggcagcagagcccagaccgccctgccctacgccatgaacagcgagttcagcagcgtgctggccgcccagctgaagcaccacagcgagaacaagggcctggacaaggtgatggagacccaggcccaggtggacgagctgaagggcatcatggtgagaaacatcgtgtgccacctgcagaactaccagcagaagagctgcagcagccacgtgtacgaggagccccaggcccactactaccaccaccacagaatcaactgcgtgcacctgtaccactgcttcaccagcctgtggtggatctacatggccaagctgtgcgaggagatcggcaagaagaagctgcccctgaccaaggacatgagagagcagggcgtgaagagcaacccctgcgacagcagcctgagccacaccgacagatggtacctgcccgtgagcagcaccctgttcagcctgttcaagatcctgttccacgccagcagattcatcttcgtgctgagcaccagcctgttcctgtag

SEQ ID NO: 105049 - DNA, 663 bp, synthetic construct
  misc_feature 1..663: note = Description of Artificial Sequence: Synthetic coding sequence
  source 1..663: mol_type = other DNA
atggccatcctgttcgccgtggtggccagaggcaccaccatcctggccaagcacgcctggtgcggcggcaacttcctggaggtgaccgagcagatcctggccaagatccccagcgagaacaacaagctgacctacagccacggcaactacctgttccactacatctgccaggacagaatcgtgtacctgtgcatcaccgacgacgacttcgagagaagcagagccttcaacttcctgaacgagatcaagaagagattccagaccacctacggcagcagagcccagaccgccctgccctacgccatgaacagcgagttcagcagcgtgctggccgcccagctgaagcaccacagcgagaacaagggcctggacaaggtgatggagacccaggcccaggtggacgagctgaagggcatcatggtgagaaacatcgacctggtggcccagagaggcgagagactggagctgctgatcgacaagaccgagaacctggtggacagcagcgtgaccttcaagaccaccagcagaaacctggccagagccatgtgcatgaagaacctgaagctgaccatcatcatcatcatcgtgagcatcgtgttcatctacatcatcgtgagccccctgtgcggcggcttcacctggcccagctgcgtgaagaagtag

SEQ ID NO: 105050 - DNA, 540 bp, synthetic construct
  misc_feature 1..540: note = Description of Artificial Sequence: Synthetic coding sequence
  source 1..540: mol_type = other DNA
atggccatcctgttcgccgtggtggccagaggcaccaccatcctggccaagcacgcctggtgcggcggcaacttcctggaggacttcgagagaagcagagccttcaacttcctgaacgagatcaagaagagattccagaccacctacggcagcagagcccagaccgccctgccctacgccatgaacagcgagttcagcagcgtgctggccgcccagctgaagcaccacagcgagaacaagggcctggacaaggtgatggagacccaggcccaggtggacgagctgaagggcatcatggtgagaaacatcgacctggtggcccagagaggcgagagactggagctgctgatcgacaagaccgagaacctggtggacagcagcgtgaccttcaagaccaccagcagaaacctggccagagccatgtgcatgaagaacctgaagctgaccatcatcatcatcatcgtgagcatcgtgttcatctacatcatcgtgagccccctgtgcggcggcttcacctggcccagctgcgtgaagaagtag

SEQ ID NO: 105051 - DNA, 303 bp, synthetic construct
  misc_feature 1..303: note = Description of Artificial Sequence: Synthetic coding sequence
  source 1..303: mol_type = other DNA
atggaggaggccagcgagggcggcggcaacgacagagtgagaaacctgcagagcgaggtggagggcgtgaagaacatcatgacccagaacgtggagagaatcctggccagaggcgagaacctggagcacctgagaaacaagaccgaggacctggaggccaccagcgagcacttcaagaccaccagccagaaggtggccagaaagttctggtggaagaacgtgaagatgatcgtgctgatctgcgtgatcgtgttcatcatcatcctgttcatcgtgctgttcgccaccggcgccttcagctag

SEQ ID NO: 105052 - DNA, 777 bp, synthetic construct
  misc_feature 1..777: note = Description of Artificial Sequence: Synthetic coding sequence
  source 1..777: mol_type = other DNA
atggaggagatgaagaagaccgccatcagactgcccaagggcaagcagaagcccatcaagaccgagtggaacagcagatgcgtgctgttcacctacttccagggcgacatcagcagcgtggtggacgagcacttcagcagagccctgagcaacatcaagagcccccaggagctgacccccagcagccagagcgagggcgtgatgctgaagaacgacgacagcatgagccccaaccagtggagatacagcagcccctggaccaagccccagcccgaggtgcccgtgaccaacagagccgccaactgcaacctgcacgtgcccggccccatggccgtgaaccagttcagccccagcctggccagaagagccagcgtgagacccggcgagctgtggcacttcagcagcctggccggcaccagcagcctggagcccggctacagccaccccttccccgccagacacctggtgcccgagccccagcccgacggcaagagagagcccctgctgagcctgctgcagcaggacagatgcctggccagaccccaggagagcgccgccagagagaacggcaaccccggccagatcgccggcagcaccggcctgctgttcaacctgccccccggcagcgtgcactacaagaagctgtacgtgagcagaggcagcgccagcaccagcctgcccaacgagaccctgagcgagctggagacccccggcaagtacagcctgaccccccccaaccactggggccacccccacagatacctgcagcacctgtag

SEQ ID NO: 105053 - DNA, 348 bp, synthetic construct
  misc_feature 1..348: note = Description of Artificial Sequence: Synthetic coding sequence
  source 1..348: mol_type = other DNA
atgaagaagaccgccatcagactgcccaagggcaagcagaagcccatcaagaccgagtggaacagcagatgcgtgctgttcacctacttccagggcgacatcagcagcgtggtggacgagcacttcagcagagccctgagcaacatcaagagcccccaggagctgacccccagcagccagagcgagggcgtgatgctgaagaacgacaagaagctgtacgtgagcagaggcagcgccagcaccagcctgcccaacgagaccctgagcgagctggagacccccggcaagtacagcctgaccccccccaaccactggggccacccccacagatacctgcagcacctgtag

SEQ ID NO: 105054 - DNA, 492 bp, synthetic construct
  misc_feature 1..492: note = Description of Artificial Sequence: Synthetic coding sequence
  source 1..492: mol_type = other DNA
tgaatcagcagcgtggtggacgagcacttcagcagagccctgagcaacatcaagagcccccaggagctgacccccagcagccagagcgagggcgtgatgctgaagaacgacgacagcatgagccccaaccagtggagatacagcagcccctggaccaagccccagcccgaggtgcccgtgaccaacagagccgccaactgcaacctgcacgtgcccggccccatggccgtgaaccagttcagccccagcctggccagaagagccagcgtgagacccggcgagctgtggcacttcagcagcctggccggcaccagcagcctggagcccggctacagccaccccttccccgccagacacctggtgcccgagccccagcccgacggcaagcacaagaagctgtacgtgagcagaggcagcgccagcaccagcctgcccaacgagaccctgagcgagctggagacccccggcaagtacagcctgacccccccctag

SEQ ID NO: 105055 - DNA, 183 bp, synthetic construct
  misc_feature 1..183: note = Description of Artificial Sequence: Synthetic coding sequence
  source 1..183: mol_type = other DNA
acccccagcagccagagcgagggcgtgatgctgaagaacgacaagaagctgtacgtgagcagaggcagcgccagcaccagcctgcccaacgagaccctgagcgagctggagacccccggcaagtacagcctgaccccccccaaccactggggccacccccacagatacctgcagcacctgtag

SEQ ID NO: 105056 - DNA, 954 bp, synthetic construct
  misc_feature 1..954: note = Description of Artificial Sequence: Synthetic coding sequence
  source 1..954: mol_type = other DNA
atgagctgcctggacgtgatgtaccaggtgtacggccccccccagccctacttcgccgccgcctacaccccctaccaccagaagctggcctactacagcaagatgcaggaggcccaggagtgcaacgccagccccagcagcagcggcagcggcagcagcagcttcagcagccagacccccgccagcatcaaggaggaggagggcagccccgagaaggagagaccccccgaggccgagtacatcaacagcagatgcgtgctgttcacctacttccagggcgacatcagcagcgtggtggacgagcacttcagcagagccctgagccagcccagcagctacagccccagctgcaccagcagcaaggcccccagaagcagcggcccctggagagactgcagcttccccatgagccagagaagcttccccgccagcttctggaacagcgcctaccaggcccccgtgcccccccccctgggcagccccctggccaccgcccacagcgagctgcccttcgccgccgccgacccctacagccccgccgccctgcacggccacctgcaccagggcgccaccgagccctggcaccacgcccacccccaccacgcccacccccaccacccctacgccctgggcggcgccctgggcgcccaggccgccccctaccccagacccgccgccgtgcacgaggtgtacgccccccacttcgaccccagatacggccccctgctgatgcccgccgccagcggcagacccgccagactggccaccgcccccgcccccgcccccggcagccccccctgcgagctgagcggcaagggcgagcccgccggcgccgcctgggccggccccggcggccccttcgccagccccagcggcgacgtggcccagggcctgggcctgagcgtggacagcgccagaagatacagcctgtgcggcgccagcctgctgagctag

SEQ ID NO: 105057 - DNA, 432 bp, synthetic construct
  misc_feature 1..432: note = Description of Artificial Sequence: Synthetic coding sequence
  source 1..432: mol_type = other DNA
atgagctgcctggacgtgatgtaccaggtgtacggccccccccagccctacttcgccgccgcctacaccccctaccaccagaagctggcctactacagcaagatgcaggaggcccaggagtgcaacgccagccccagcagcagcggcagcggcagcagcagcttcagcagccagacccccgccagcatcaaggaggaggagggcagccccgagaaggagagaccccccgaggccgagtacatcaacagcagatgcgtgctgttcacctacttccagggcgacatcagcagcgtggtggacgagcacttcagcagagccctgagccagcccagcagctacagccccagctgcaccagcagcaaggcccccagaagcagcggcccctggagagccagaagatacagcctgtgcggcgccagcctgctgagctag

SEQ ID NO: 105058 - DNA, 963 bp, synthetic construct
  misc_feature 1..963: note = Description of Artificial Sequence: Synthetic coding sequence
  source 1..963: mol_type = other DNA
atgagctgcgccgaggtgatgtaccacccccagccctacggcgccagccagtacctgcccaaccccatggccgccaccacctgccccaccgcctactaccagcccgccccccagcccggccagcagaagaagctggccgtgttcagcaagatgcaggacagcctggaggtgaccctgcccagcaagcaggaggaggaggacgaggaggaggaggaggaggagaaggaccagcccgccgagatggagtacctgaacagcagatgcgtgctgttcacctacttccagggcgacatcggcagcgtggtggacgagcacttcagcagagccctgggccaggccatcaccctgcaccccgagagcgccatcagcaagagcaagatgggcctgacccccctgtggagagacagcagcgccctgagcagccagagaaacagcttccccaccagcttctggaccagcagctaccagcccccccccgccccctgcctgggcggcgtgcaccccgacttccaggtgaccggcccccccggcaccttcagcgccgccgaccccagcccctggcccggccacaacctgcaccagaccggccccgcccccccccccgccgtgagcgagagctggccctaccccctgaccagccaggtgagccccagctacagccacatgcacgacgtgtacatgagacaccaccacccccacgcccacatgcaccacagacacagacaccaccaccaccaccaccacccccccgccggcagcgccctggaccccagctacggccccctgctgatgcccagcgtgcacgccgccagaatccccgccccccagtgcgacatcaccaagaccgagcccaccaccgtgaccagcgccaccagcgcctgggccggcgccttccacggcaccgtggacatcgtgcccagcgtgggcttcgacaccggctggagcgccatggccagaagctag

SEQ ID NO: 105059 - DNA, 981 bp, synthetic construct
  misc_feature 1..981: note = Description of Artificial Sequence: Synthetic coding sequence
  source 1..981: mol_type = other DNA
atgagctgcgccgaggtgatgtaccacccccagccctacggcgccagccagtacctgcccaaccccatggccgccaccacctgccccaccgcctactaccagcccgccccccagcccggccagcagaagaagctggccgtgttcagcaagatgcaggacagcctggaggtgaccctgcccagcaagcaggaggaggaggacgaggaggaggaggaggaggagaaggaccagcccgccgagatggagtacctgaacagcagatgcgtgctgttcacctacttccagggcgacatcggcagcgtggtggacgagcacttcagcagagccctgggccaggccatcaccctgcaccccgagagcgccatcagcaagagcaagatgggcctgacccccctgtggagagacagcagcgccctgagcagccagagaaacagcttccccaccagcttctggaccagcagctaccagcccccccccgccccctgcctgggcggcgtgcaccccgacttccaggtgaccggcccccccggcaccttcagcgccgccgaccccagcccctggcccggccacaacctgcaccagaccggccccgcccccccccccgccgtgagcgagagctggccctaccccctgaccagccaggtgagccccagctacagccacatgcacgacgtgtacatgagacaccaccacccccacgcccacatgcaccacagacacagacaccaccaccaccaccaccacccccccgccggcagcgccctggaccccagctacggccccctgctgatgcccagcgtgcacgccgccagaatccccgccccccagtgcgacatcaccaagaccgagcccaccaccgtgaccagcgccaccagcgcctgggccggcgccttccacggcaccgtggacatcgtgcccagcgtgggcttcgacaccggcctgcagcaccaggacaagagcaaggagagcccctggtactag

SEQ ID NO: 105060 - DNA, 1326 bp, synthetic construct
  misc_feature 1..1326: note = Description of Artificial Sequence: Synthetic coding sequence
  source 1..1326: mol_type = other DNA
atgaaggccgccgtggacctgaagcccaccctgaccatcatcaagaccgagaaggtggacctggagctgttccccagccccgacatggagtgcgccgacgtgcccctgctgacccccagcagcaaggagatgatgagccaggccctgaaggccaccttcagcggcttcaccaaggagcagcagagactgggcatccccaaggaccccagacagtggaccgagacccacgtgagagactgggtgatgtgggccgtgaacgagttcagcctgaagggcgtggacttccagaagttctgcatgaacggcgccgccctgtgcgccctgggcaaggactgcttcctggagctggcccccgacttcgtgggcgacatcctgtgggagcacctggagatcctgcagaaggaggacgtgaagccctaccaggtgaacggcgtgaaccccgcctaccccgagagcagatacaccagcgactacttcatcagctacggcatcgagcacgcccagtgcgtgccccccagcgagttcagcgagcccagcttcatcaccgagagctaccagaccctgcaccccatcagcagcgaggagctgctgagcctgaagtacgagaacgactaccccagcgtgatcctgagagaccccctgcagaccgacaccctgcagaacgactacttcgccatcaagcaggaggtggtgacccccgacaacatgtgcatgggcagaaccagcagaggcaagctgggcggccaggacagcttcgagagcatcgagagctacgacagctgcgacagactgacccagagctggagcagccagagcagcttcaacagcctgcagagagtgcccagctacgacagcttcgacagcgaggactaccccgccgccctgcccaaccacaagcccaagggcaccttcaaggactacgtgagagacagagccgacctgaacaaggacaagcccgtgatccccgccgccgccctggccggctacaccggcagcggccccatccagctgtggcagttcctgctggagctgctgaccgacaagagctgccagagcttcatcagctggaccggcgacggctgggagttcaagctgagcgaccccgacgaggtggccagaagatggggcaagagaaagaacaagcccaagatgaactacgagaagctgagcagaggcctgagatactactacgacaagaacatcatccacaagaccgccggcaagagatacgtgtacagattcgtgtgcgacctgcagagcctgctgggctacacccccgaggagctgcacgccatgctggacgtgaagcccgacgccgacgagtag

SEQ ID NO: 105061 - DNA, 1065 bp, synthetic construct
  misc_feature 1..1065: note = Description of Artificial Sequence: Synthetic coding sequence
  source 1..1065: mol_type = other DNA
atgaaggccgccgtggacctgaagcccaccctgaccatcatcaagaccgagaaggtggacctggagctgttccccagccccgacatggagtgcgccgacgtgcccctgctgacccccagcagcaaggagatgatgagccaggccctgaaggccaccttcagcggcttcaccaaggagcagcagagactgggcatccccaaggaccccagacagtggaccgagacccacgtgagagactgggtgatgtgggccgtgaacgagttcagcctgaagggcgtggacttccagaagttctgcatgaacggcgccgccctgtgcgccctgggcaaggactgcttcctggagctggcccccgacttcgtgggcgacatcctgtgggagcacctggagatcctgcagaaggaggacgtgaagccctaccaggtgaacggcgtgaaccccgcctaccccgagagcagatacaccagcgactacttcatcagctacggcatcgagcacgcccagtgcgtgccccccagcgagttcagcgagcccagcttcatcaccgagagctaccagaccctgcaccccatcagcagcgaggagctgctgagcctgaagtacgagaacgactaccccagcgtgatcctgagagaccccctgcagaccgacaccctgcagaacgactacttcgccatcaagcaggaggtggtgacccccgacaacatgtgcatgggcagaaccagcagaggcagcggccccatccagctgtggcagttcctgctggagctgctgaccgacaagagctgccagagcttcatcagctggaccggcgacggctgggagttcaagctgagcgaccccgacgaggtggccagaagatggggcaagagaaagaacaagcccaagatgaactacgagaagctgagcagaggcctgagatactactacgacaagaacatcatccacaagaccgccggcaagagatacgtgtacagattcgtgtgcgacctgcagagcctgctgggctacacccccgaggagctgcacgccatgctggacgtgaagcccgacgccgacgagtag

SEQ ID NO: 105062 - DNA, 1458 bp, synthetic construct
  misc_feature 1..1458: note = Description of Artificial Sequence: Synthetic coding sequence
  source 1..1458: mol_type = other DNA
atgagctacttcgtggacagcgccggcagcagccccgtgccctacagcgcccccagacccgccgtggtgagacagggccccagcaacacctacgaggaccccagaatgaactgcggcttccagagcaactaccaccagcagagaccctgctaccccttctgggacgagatggccacccaggaggtgcccaccggcctggagcactgcgtgagcgacatggagtgcgccgacgtgcccctgctgacccccagcagcaaggagatgatgagccaggccctgaaggccaccttcagcggcttcaccaaggagcagcagagactgggcatccccaaggaccccagacagtggaccgagacccacgtgagagactgggtgatgtgggccgtgaacgagttcagcctgaagggcgtggacttccagaagttctgcatgaacggcgccgccctgtgcgccctgggcaaggactgcttcctggagctggcccccgacttcgtgggcgacatcctgtgggagcacctggagatcctgcagaaggaggacgtgaagccctaccaggtgaacggcgtgaaccccgcctaccccgagagcagatacaccagcgactacttcatcagctacggcatcgagcacgcccagtgcgtgccccccagcgagttcagcgagcccagcttcatcaccgagagctaccagaccctgcaccccatcagcagcgaggagctgctgagcctgaagtacgagaacgactaccccagcgtgatcctgagagaccccctgcagaccgacaccctgcagaacgactacttcgccatcaagcaggaggtggtgacccccgacaacatgtgcatgggcagaaccagcagaggcaagctgggcggccaggacagcttcgagagcatcgagagctacgacagctgcgacagactgacccagagctggagcagccagagcagcttcaacagcctgcagagagtgcccagctacgacagcttcgacagcgaggactaccccgccgccctgcccaaccacaagcccaagggcaccttcaaggactacgtgagagacagagccgacctgaacaaggacaagcccgtgatccccgccgccgccctggccggctacaccggcagcggccccatccagctgtggcagttcctgctggagctgctgaccgacaagagctgccagagcttcatcagctggaccggcgacggctgggagttcaagctgagcgaccccgacgaggtggccagaagatggggcaagagaaagaacaagcccaagatgaactacgagaagctgagcagaggcctgagatactactacgacaagaacatcatccacaagaccgccggcaagagatacgtgtacagattcgtgtgcgacctgcagagcctgctgggctacacccccgaggagctgcacgccatgctggacgtgaagcccgacgccgacgagtag

SEQ ID NO: 105063 - DNA, 1065 bp, synthetic construct; identical to SEQ ID NO: 105061
  misc_feature 1..1065: note = Description of Artificial Sequence: Synthetic coding sequence
  source 1..1065: mol_type = other DNA

SEQ ID NO: 105064 - DNA, 819 bp, synthetic construct
  misc_feature 1..819: note = Description of Artificial Sequence: Synthetic coding sequence
  source 1..819: mol_type = other DNA
atgaaggccgccgtggacctgaagcccaccctgaccatcatcaagaccgagaaggtggacctggagctgttccccagccccgacatggagtgcgccgacgtgcccctgctgacccccagcagcaaggagatgatgagccaggccctgaaggccaccttcagcggcttcaccaaggagcagcagagactgggcatccccaaggaccccagacagtggaccgagacccacgtgagagactgggtgatgtgggccgtgaacgagttcagcctgaagggcgtggacttccagaagttctgcatgaacggcgccgccctgtgcgccctgggcaaggactgcttcctggagctggcccccgacttcgtgggcgacatcctgtgggagcacctggagatcctgcagaaggaggacgtgaagccctaccaggtgaacggcgtgaaccccgcctaccccgagagcagatacaccagcgactacttcatcagctacggcatcgagcacgcccagtgcgtgccccccagcgagttcagcgagcccagcttcatcaccgagagctaccagaccctgcaccccatcagcagcgaggagctgctgagcctgaagtacgagaacgactaccccagcgtgatcctgagagaccccctgcagaccgacaccctgcagaacgactacttcgccatcaagcaggaggtggtgacccccgacaacatgtgcatgggcagaaccagcagaggcaagctgggcggccaggacagcttcgagagcatcgagagctacgacagctgcggccaggagatgggcaaggaggagaagcagacctag

SEQ ID NO: 105065 - DNA, 678 bp, synthetic construct
  misc_feature 1..678: note = Description of Artificial Sequence: Synthetic coding sequence
  source 1..678: mol_type = other DNA
atgaaggccgccgtggacctgaagcccaccctgaccatcatcaagaccgagaaggtggacctggagctgttccccagccccggcaagctgggcggccaggacagcttcgagagcatcgagagctacgacagctgcgacagactgacccagagctggagcagccagagcagcttcaacagcctgcagagagtgcccagctacgacagcttcgacagcgaggactaccccgccgccctgcccaaccacaagcccaagggcaccttcaaggactacgtgagagacagagccgacctgaacaaggacaagcccgtgatccccgccgccgccctggccggctacaccggcagcggccccatccagctgtggcagttcctgctggagctgctgaccgacaagagctgccagagcttcatcagctggaccggcgacggctgggagttcaagctgagcgaccccgacgaggtggccagaagatggggcaagagaaagaacaagcccaagatgaactacgagaagctgagcagaggcctgagatactactacgacaagaacatcatccacaagaccgccggcaagagatacgtgtacagattcgtgtgcgacctgcagagcctgctgggctacacccccgaggagctgcacgccatgctggacgtgaagcccgacgccgacgagtag

SEQ ID NO: 105066 - DNA, 1848 bp, synthetic construct
  misc_feature 1..1848: note = Description of Artificial Sequence: Synthetic coding sequence
  source 1..1848: mol_type = other DNA
atgaaggccctgagactgagcgccagcgccctgttctgcctgctgctgatcaacggcctgggcgccgccccccccggcagacccgaggcccagcccccccccctgagcagcgagcacaaggagcccgtggccggcgacgccgtgcccggccccaaggacggcagcgcccccgaggtgagaggcgccagaaacagcgagccccaggacgagggcgagctgttccagggcgtggaccccagagccctggccgccgtgctgctgcaggccctggacagacccgccagcccccccgcccccagcggcagccagcagggccccgaggaggaggccgccgaggccctgctgaccgagaccgtgagaagccagacccacagcctgcccgcccccgagagccccgagcccgccgccccccccagaccccagacccccgagaacggccccgaggccagcgaccccagcgaggagctggaggccctggccagcctgctgcaggagctgagagacttcagccccagcagcgccaagagacagcaggagaccgccgccgccgagaccgagaccagaacccacaccctgaccagagtgaacctggagagccccggccccgagagagtgtggagagccagctggggcgagttccaggccagagtgcccgagagagcccccctgcccccccccgcccccagccagttccaggccagaatgcccgacagcggccccctgcccgagacccacaagttcggcgagggcgtgagcagccccaagacccacctgggcgaggccctggcccccctgagcaaggcctaccagggcgtggccgcccccttccccaaggccagaagacccgagagcgccctgctgggcggcagcgaggccggcgagagactgctgcagcagggcctggcccaggtggaggccggcagaagacaggccgaggccaccagacaggccgccgcccaggaggagagactggccgacctggccagcgacctgctgctgcagtacctgctgcagggcggcgccagacagagaggcctgggcggcagaggcctgcaggaggccgccgaggagagagagagcgccagagaggaggaggaggccgagcaggagagaagaggcggcgaggagagagtgggcgaggaggacgaggaggccgccgaggccgaggccgaggccgaggaggccgagagagccagacagaacgccctgctgttcgccgaggaggaggacggcgaggccggcgccgaggacaagagaagccaggaggagacccccggccacagaagaaaggaggccgagggcaccgaggagggcggcgaggaggaggacgacgaggagatggacccccagaccatcgacagcctgatcgagctgagcaccaagctgcacctgcccgccgacgacgtggtgagcatcatcgaggaggtggaggagaagagaaagagaaagaagaacgccccccccgagcccgtgcccccccccagagccgcccccgcccccacccacgtgagaagcccccagccccccccccccgcccccgcccccgccagagacgagctgcccgactggaacgaggtgctgcccccctgggacagagaggaggacgaggtgtacccccccggcccctaccaccccttccccaactacatcagacccagaaccctgcagccccccagcgccctgagaagaagacactaccaccacgccctgccccccagcagacactaccccggcagagaggcccaggccagaagagcccaggaggaggccgaggccgaggagagaagactgcaggagcaggaggagctggagaactacatcgagcacgtgctgctgagaagaccctag

SEQ ID NO: 105067 - DNA, 1848 bp, synthetic construct; identical to SEQ ID NO: 105066
  misc_feature 1..1848: note = Description of Artificial Sequence: Synthetic coding sequence
  source 1..1848: mol_type = other DNA

SEQ ID NO: 105068 - DNA, 1134 bp, synthetic construct
  misc_feature 1..1134: note = Description of Artificial Sequence: Synthetic coding sequence
  source 1..1134: mol_type = other DNA
atgaaggccctgagactgagcgccagcgccctgttctgcctgctgctgatcaacggcctgggcgccgccccccccggcagacccgaggcccagcccccccccctgagcagcgagcacaaggagcccgtggccggcgacgccgtgcccggccccaaggacggcagcgcccccgaggtgagaggcgccagaaacagcgagccccaggacgagggcgagctgttccagggcgtggaccccagagccctggccgccgtgctgctgcaggccctggacagacccgccagcccccccgcccccagcggcagccagcagggccccgaggaggaggccgccgaggccctgctgaccgagaccgtgagaagccagacccacagcctgcccgcccccgagagccccgagcccgccgccccccccagaccccagacccccgagaacggccccgaggccagcgaccccagcgaggagctggaggccctggccagcctgctgcaggagctgagagacttcagccccagcagcgccaagagacagcaggagaccgccgccgccgagaccgagaccagaacccacaccctgaccagagtgaacctggagagccccggccccgagagagtgtggagagccagctggggcgagttccaggccagagtgcccgagagagcccccctgcccccccccgcccccagccagttccaggccagaatgcccgacagcggccccctgcccgagacccacaagttcggcgagggcgtgagcagccccaagacccacctgggcgaggccctggcccccctgagcaaggcctaccagggcgtggccgcccccttccccaaggccagaagacccgagagcgccctgctgggcggcagcgaggccggcgagagactgctgcagcagggcctggcccaggtggaggccggcagaagacaggccgaggccaccagacaggccgccgcccaggaggagagactggccgacctggccagcgacctgctgctgcagttcgccgccggcagaggccccgccgccagaccctgccccctggccctgcccctgagccccggctgcgtgggcacctgccagacccccctgcccggccccgagcccgagctgcccgagctgaccagaggctag

SEQ ID NO: 105069 - DNA, 2484 bp, synthetic construct
  misc_feature 1..2484: note = Description of Artificial Sequence: Synthetic coding sequence
  source 1..2484: mol_type = other DNA
atgaccaagctgagcgcccaggtgaagggcagcctgaacatcaccacccccggcctgcagatctggagaatcgaggccatgcagatggtgcccgtgcccagcagcaccttcggcagcttcttcgacggcgactgctacatcatcctggccatccacaagaccgccagcagcctgagctacgacatccactactggatcggccaggacagcagcctggacgagcagggcgccgccgccatctacaccacccagatggacgacttcctgaagggcagagccgtgcagcacagagaggtgcagggcaacgagagcgaggccttcagaggctacttcaagcagggcctggtgatcagaaagggcggcgtggccagcggcatgaagcacgtggagaccaacagctacgacgtgcagagactgctgcacgtgaagggcaagagaaacgtggtggccggcgaggtggagatgagctggaagagcttcaacagaggcgacgtgttcctgctggacctgggcaagctgatcatccagtggaacggccccgagagcaccagaatggagagactgagaggcatgaccctggccaaggagatcagagaccaggagagaggcggcagaacctacgtgggcgtggtggacggcgagaacgagctggccagccccaagctgatggaggtgatgaaccacgtgctgggcaagagaagagagctgaaggccgccgtgcccgacaccgtggtggagcccgccctgaaggccgccctgaagctgtaccacgtgagcgacagcgagggcaacctggtggtgagagaggtggccaccagacccctgacccaggacctgctgagccacgaggactgctacatcctggaccagggcggcctgaagatctacgtgtggaagggcaagaaggccaacgagcaggagaagaagggcgccatgagccacgccctgaacttcatcaaggccaagcagtacccccccagcacccaggtggaggtgcagaacgacggcgccgagagcgccgtgttccagcagctgttccagaagtggaccgccagcaacagaaccagcggcctgggcaagacccacaccgtgggcagcgtggccaaggtggagcaggtgaagttcgacgccaccagcatgcacgtgaagccccaggtggccgcccagcagaagatggtggacgacggcagcggcgaggtgcaggtgtggagaatcgagaacctggagctggtgcccgtggacagcaagtggctgggccacttctacggcggcgactgctacctgctgctgtacacctacctgatcggcgagaagcagcactacctgctgtacgtgtggcagggcagccaggccagccaggacgagatcaccgccagcgcctaccaggccgtgatcctggaccagaagtacaacggcgagcccgtgcagatcagagtgcccatgggcaaggagcccccccacctgatgagcatcttcaagggcagaatggtggtgtaccagggcggcaccagcagaaccaacaacctggagaccggccccagcaccagactgttccaggtgcagggcaccggcgccaacaacaccaaggccttcgaggtgcccgccagagccaacttcctgaacagcaacgacgtgttcgtgctgaagacccagagctgctgctacctgtggtgcggcaagggctgcagcggcgacgagagagagatggccaagatggtggccgacaccatcagcagaaccgagaagcaggtggtggtggagggccaggagcccgccaacttctggatggccctgggcggcaaggccccctacgccaacaccaagagactgcaggaggagaacctggtgatcacccccagactgttcgagtgcagcaacaagaccggcagattcctggccaccgagatccccgacttcaaccaggacgacctggaggaggacgacgtgttcctgctggacgtgtgggaccaggtgttcttctggatcggcaagcacgccaacgaggaggagaagaaggccgccgccaccaccgcccaggagtacctgaagacccaccccagcggcagagaccccgagacccccatcatcgtggtgaagcagggccacgagccccccaccttcaccggctggttcctggcctgggaccccttcaagtggagcaacaccaagagctacgaggacctgaaggccgagctgggcaacagcagagactggagccagatcaccgccgaggtgaccagccccaaggtggacgtgttcaacgccaacagcaacctgagcagcggccccctgcccatcttccccctggagcagctggtgaacaagcccgtggaggagctgcccgagggcgtggaccccagcagaaaggaggagcacctgagcatcgaggacttcacccaggccttcggcatgacccccgccgccttcagcgccctgcccagatggaagcagcagaacctgaagaaggagaagggcctgttctag

SEQ ID NO: 105070 - DNA, 1551 bp, synthetic construct
  misc_feature 1..1551: note = Description of Artificial Sequence: Synthetic coding sequence
  source 1..1551: mol_type = other DNA
atgagccacgccctgaacttcatcaaggccaagcagtacccccccagcacccaggtggaggtgcagaacgacggcgccgagagcgccgtgttccagcagctgttccagaagtggaccgccagcaacagaaccagcggcctgggcaagacccacaccgtgggcagcgtggccaaggtggagcaggtgaagttcgacgccaccagcatgcacgtgaagccccaggtggccgcccagcagaagatggtggacgacggcagcggcgaggtgcaggtgtggagaatcgagaacctggagctggtgcccgtggacagcaagtggctgggccacttctacggcggcgactgctacctgctgctgtacacctacctgatcggcgagaagcagcactacctgctgtacgtgtggcagggcagccaggccagccaggacgagatcaccgccagcgcctaccaggccgtgatcctggaccagaagtacaacggcgagcccgtgcagatcagagtgcccatgggcaaggagcccccccacctgatgagcatcttcaagggcagaatggtggtgtaccagggcggcaccagcagaaccaacaacctggagaccggccccagcaccagactgttccaggtgcagggcaccggcgccaacaacaccaaggccttcgaggtgcccgccagagccaacttcctgaacagcaacgacgtgttcgtgctgaagacccagagctgctgctacctgtggtgcggcaagggctgcagcggcgacgagagagagatggccaagatggtggccgacaccatcagcagaaccgagaagcaggtggtggtggagggccaggagcccgccaacttctggatggccctgggcggcaaggccccctacgccaacaccaagagactgcaggaggagaacctggtgatcacccccagactgttcgagtgcagcaacaagaccggcagattcctggccaccgagatccccgacttcaaccaggacgacctggaggaggacgacgtgttcctgctggacgtgtgggaccaggtgttcttctggatcggcaagcacgccaacgaggaggagaagaaggccgccgccaccaccgcccaggagtacctgaagacccaccccagcggcagagaccccgagacccccatcatcgtggtgaagcagggccacgagccccccaccttcaccggctggttcctggcctgggaccccttcaagtggagcaacaccaagagctacgaggacctgaaggccgagctgggcaacagcagagactggagccagatcaccgccgaggtgaccagccccaaggtggacgtgttcaacgccaacagcaacctgagcagcggccccctgcccatcttccccctggagcagctggtgaacaagcccgtggaggagctgcccgagggcgtggaccccagcagaaaggaggagcacctgagcatcgaggacttcacccaggccttcggcatgacccccgccgccttcagcgccctgcccagatggaagcagcagaacctgaagaaggagaagggcctgttctag

SEQ ID NO: 105071 - DNA, 1266 bp, synthetic construct
  misc_feature 1..1266: note = Description of Artificial Sequence: Synthetic coding sequence
  source 1..1266: mol_type = other DNA
atgaccaagctgagcgcccaggtgaagggcagcctgaacatcaccacccccggcctgcagatctggagaatcgaggccatgcagatggtgcccgtgcccagcagcaccttcggcagcttcttcgacggcgactgctacatcatcctggccatccacaagaccgccagcagcctgagctacgacatccactactggatcggccaggacagcagcctggacgagcagggcgccgccgccatctacaccacccagatggacgacttcctgaagggcagagccgtgcagcacagagaggtgcagggcaacgagagcgaggccttcagaggctacttcaagcagggcctggtgatcagaaagggcggcgtggccagcggcatgaagcacgtggagaccaacagctacgacgtgcagagactgctgcacgtgaagggcaagagaaacgtggtggccggcgaggtggagatgagctggaagagcttcaacagaggcgacgtgttcctgctggacctgggcaagctgatcatccagtggaacggccccgagagcaccagaatggagagactgagaggcatgaccctggccaaggagatcagagaccaggagagaggcggcagaacctacgtgggcgtggtggacggcgagaacgagctggccagccccaagctgatggaggtgatgaaccacgtgctgggcaagagaagagagctgaaggccgccgtgcccgacaccgtggtggagcccgccctgaaggccgccctgaagctgtaccacgtgagcgacagcgagggcaacctggtggtgagagaggtggccaccagacccctgacccaggacctgctgagccacgaggactgctacatcctggaccagggcggcctgaagatctacgtgtggaagggcaagaaggccaacgagcaggagaagaagggcgccatgagccacgccctgaacttcatcaaggccaagcagtacccccccagcacccaggtggaggtgcagaacgacggcgccgagagcgccgtgttccagcagctgttccagaagtggaccgccagcaacagaaccagcggcctgggcaagacccacaccgtgggcagcgtgggcgagggccaggccggcgccgtgagagagcccggcagcagaagctgggccagaagagccacctggagcaccacccacccccccagcctgacctgcatcttcaacgaggacttctacgccggcagcggcctggtgctggccgacggcgacgtggacaagctgtag

SEQ ID NO: 105072 - DNA, 576 bp, synthetic construct
  misc_feature 1..576: note = Description of Artificial Sequence: Synthetic coding sequence
  source 1..576: mol_type = other DNA
atgggcaagcagaacagcaagctggcccccgaggtgatggaggacctggtgaagagcaccgagttcaacgagcacgagctgaagcagtggtacaagggcttcctgaaggactgccccagcggcagactgaacctggaggagttccagcagctgtacgtgaagttcttcccctacggcgacgccagcaagttcgcccagcacgccttcagaaccttcgacaagaacggcgacggcaccatcgacttcagagagttcatctgcgccctgagcatcaccagcagaggcagcttcgagcagaagctgaactgggccttcaacatgtacgacctggacggcgacggcaagatcaccagagtggagatgctggagatcatcgaggccatctacaagatggtgggcaccgtgatcatgatgaagatgaacgaggacggcctgacccccgagcagagagtggacaagatcttcagcaagatggacaagaacaaggacgaccagatcaccctggacgagttcaaggaggccgccaagagcgaccccagcatcgtgctgctgctgcagtgcgacatccagaagtag

SEQ ID NO: 105073 - DNA, 576 bp, synthetic construct; identical to SEQ ID NO: 105072
  misc_feature 1..576: note = Description of Artificial Sequence: Synthetic coding sequence
  source 1..576: mol_type = other DNA

SEQ ID NO: 105074 - DNA, 576 bp, synthetic construct; identical to SEQ ID NO: 105072
  misc_feature 1..576: note = Description of Artificial Sequence: Synthetic coding sequence
  source 1..576: mol_type = other DNA

SEQ ID NO: 105075 - DNA, 315 bp, synthetic construct
  misc_feature 1..315: note = Description of Artificial Sequence: Synthetic coding sequence
  source 1..315: mol_type = other DNA
atgggcaagcagaacagcaagctggcccccgaggtgatggaggacctggtgaagagcaccgagttcaacgagcacgagctgaagcagtggtacaagggcttcctgaaggactgccccagcggcagactgaacctggaggagttccagcagctgtacgtgaagttcttcccctacggcgacgccagcaagttcgcccagcacgccttcagaaccttcgacaagaacggcgacggcaccatcgacttcagagagttcatctgcgccctgagcatcaccagcagaggcagcttcgagcagaagctgaactgggcctag

SEQ ID NO: 105076 - DNA, 357 bp, synthetic construct
  misc_feature 1..357: note = Description of Artificial Sequence: Synthetic coding sequence
  source 1..357: mol_type = other DNA
atgggcaagcagaacagcaagctggcccccgaggtgatggaggacctggtgaagagcaccgagttcaacgagcacgagctgaagcagtggtacaagggcttcctgaaggactgccccagcggcagactgaacctggaggagttccagcagctgtacgtgaagttcttcccctacggcgacgccagcaagttcgcccagcacgccttcagaaccttcgacaagaacggcgacggcaccatcgacttcagagagttcatctgcgccctgagcatcaccagcagaggcagcttcgagcagaagctgaactgggccttcaacatgtacgacctggacggcgacggcaagatcaccagatag

SEQ ID NO: 105077 - DNA, 720 bp, synthetic construct
  misc_feature 1..720: note = Description of Artificial Sequence: Synthetic coding sequence
  source 1..720: mol_type = other DNA
atgaccggcagagacagcctgagcgacggcagaaccagcagcagagccctggtgcccggcggcagccccagaggcagcagacccagaggcttcgccatcaccgacctgctgggcctggaggccgagctgcccgcccccgccggccccggccagggcagcggctgcgagggccccgccgtggccccctgccccggccccggcctggacggcagcagcctggccagaggcgccctgcccctgggcctgggcctgctgtgcggcttcggcacccagccccccgccgccgccagagccccctgcctgctgctggccgacgtgcccttcctgccccccagaggccccgagcccgccgcccccctggcccccagcagacccccccccgccctgggcagacagaagagaagcgacagcgtgagcaccagcgacgaggacagccagagcgaggacagaaacgacctgaaggccagccccaccctgggcaagagaaagaagagaagacacagaaccgtgttcaccgcccaccagctggaggagctggagaaggccttcagcgaggcccactaccccgacgtgtacgccagagagatgctggccgtgaagaccgagctgcccgaggacagaatccaggtgagcggcgtgcccttcctgagaagcaaggacaccaccgagaacgtgagcttcccccacagcgtgagccagagcgccgtgcccagcctgtag

SEQ ID NO: 105078 - DNA, 1098 bp, synthetic construct
  misc_feature 1..1098: note = Description of Artificial Sequence: Synthetic coding sequence
  source 1..1098: mol_type = other DNA
atgaccggcagagacagcctgagcgacggcagaaccagcagcagagccctggtgcccggcggcagccccagaggcagcagacccagaggcttcgccatcaccgacctgctgggcctggaggccgagctgcccgcccccgccggccccggccagggcagcggctgcgagggccccgccgtggccccctgccccggccccggcctggacggcagcagcctggccagaggcgccctgcccctgggcctgggcctgctgtgcggcttcggcacccagccccccgccgccgccagagccccctgcctgctgctggccgacgtgcccttcctgccccccagaggccccgagcccgccgcccccctggcccccagcagacccccccccgccctgggcagacagaagagaagcgacagcgtgagcaccagcgacgaggacagccagagcgaggacagaaacgacctgaaggccagccccaccctgggcaagagaaagaagagaagacacagaaccgtgttcaccgcccaccagctggaggagctggagaaggccttcagcgaggcccactaccccgacgtgtacgccagagagatgctggccgtgaagaccgagctgcccgaggacagaatccaggtgtggttccagaacagaagagccaagtggagaaagagagagaagagatggggcggcagcagcgtgatggccgagtacggcctgtacggcgccatggtgagacactgcatccccctgcccgacagcgtgctgaacagcgccgagggcggcctgctgggcagctgcgccccctggctgctgggcatgcacaagaagagcatgggcatgatcagaaagcccggcagcgaggacaagctggccggcctgtggggcagcgaccacttcaaggagggcagcagccagagcgagagcggcagccagagaggcagcgacaaggtgagccccgagaacggcctggaggacgtggccatcgacctgagcagcagcgccagacaggagaccaagaaggtgcaccccggcgccggcgcccagggcggcagcaacagcaccgccctggagggcccccagcccggcaaggtgggcgccacctag

SEQ ID NO: 105079 - DNA, 432 bp, synthetic construct
  misc_feature 1..432: note = Description of Artificial Sequence: Synthetic coding sequence
  source 1..432: mol_type = other DNA
atgaccggcagagacagcctgagcgacggcagaaccagcagcagagccctggtgcccggcggcagccccagaggcagcagacccagaggcttcgccatcaccgacctgctgggcctggaggccgagctgcccgcccccgccggccccggccagggcagcggctgcgagggccccgccgtggccccctgccccggccccggcctggacggcagcagcctggccagaggcgccctgcccctgggcctgggcctgctgtgcggcttcggcacccagccccccgccgccgccagagccccctgcctgctgctggccgacgtgcccttcctgccccccagaggccccgagcccgccgcccccctggcccccagcagacccccccccgccctgggcagacagaagagaagcgacagcgtgagcaccagcgccatgtag

SEQ ID NO: 105080 - DNA, 843 bp, synthetic construct
  misc_feature 1..843: note = Description of Artificial Sequence: Synthetic coding sequence
  source 1..843: mol_type = other DNA
atgaccggcagagacagcctgagcgacggcagaaccagcagcagagccctggtgcccggcggcagccccagaggcagcagacccagaggcttcgccatcaccgacctgctgggcctggaggccgagctgcccgcccccgccggccccggccagggcagcggctgcgagggccccgccgtggccccctgccccggccccggcctggacggcagcagcctggccagaggcgccctgcccctgggcctgggcctgctgtgcggcttcggcacccagccccccgccgccgccagagccccctgcctgctgctggccgacgtgcccttcctgccccccagaggccccgagcccgccgcccccctggcccccagcagacccccccccgccctgggcagacagaagagaagcgacagcgtgagcaccagcgacgaggacagccagagcgaggacagaaacgacctgaaggccagccccaccctgggcaagagaaagaagagaagacacagaaccgtgttcaccgcccaccagctggaggagctggagaaggccttcagcgaggcccactaccccgacgtgtacgccagagagatgctggccgtgaagaccgagctgcccgaggacagaatccaggtgtggttccagaacagaagagccaagtggagaaagagagagaagagatggggcggcagcagcgtgatggccgagtacggcctgtacggcgccatggtgagacactgcatccccctgcccgacagcgtgctgaacagcgccgagggcggcctgctgggcagctgcgccccctggctgctggagggcgagaccctgggctgcagagagatgaagtag

SEQ ID NO: 105081 - DNA, 657 bp, synthetic construct
  misc_feature 1..657: note = Description of Artificial Sequence: Synthetic coding sequence
  source 1..657: mol_type = other DNA
atgaccggcagagacagcctgagcgacggcagaaccagcagcagagccctggtgcccggcggcagccccagaggcagcagacccagaggcttcgccatcaccgacctgctgggcctggaggccgagctgcccgcccccgccggccccggccagggcagcggctgcgagggccccgccgtggccccctgccccggccccggcctggacggcagcagcctggccagaggcgccctgcccctgggcctgggcctgctgtgcggcttcggcacccagccccccgccgccgccagagccccctgcctgctgctggccgacgtgcccttcctgccccccagaggccccgagcccgccgcccccctggcccccagcagacccccccccgccctgggcagacagaagagaagcgacagcgtgagcaccagcgacgaggacagccagagcgaggacagaaacgacctgaaggccagccccaccctgggcaagagaaagaagagaagacacagaaccgtgttcaccgcccaccagctggaggagctggagaaggccttcagcgaggcccactaccccgacgtgtacgccagagagatgctggccgtgaagaccgagctgcccgaggacagaatccagagagtgagacactgggccgccgagaagtag

SEQ ID NO: 105082 - DNA, 906 bp, synthetic construct
  misc_feature 1..906: note = Description of Artificial Sequence: Synthetic coding sequence
  source 1..906: mol_type = other DNA
atgaccggcagagacagcctgagcgacggcagaaccagcagcagagccctggtgcccggcggcagccccagaggcagcagacccagaggcttcgccatcaccgacctgctgggcctggaggccgagctgcccgcccccgccggccccggccagggcagcggctgcgagggccccgccgtggccccctgccccggccccggcctggacggcagcagcctggccagaggcgccctgcccctgggcctgggcctgctgtgcggcttcggcacccagccccccgccgccgccagagccccctgcctgctgctggccgacgtgcccttcctgccccccagaggccccgagcccgccgcccccctggcccccagcagacccccccccgccctgggcagacagaagagaagcgacagcgtgagcaccagcgacgaggacagccagagcgaggacagaaacgacctgaaggccagccccaccctgggcaagagaaagaagagaagacacagaaccgtgttcaccgcccaccagctggaggagctggagaaggccttcagcgaggcccactaccccgacgtgtacgccagagagatgctggccgtgaagaccgagctgcccgaggacagaatccaggtgtggttccagaacagaagagccaagtggagaaagagagagaagagatggggcggcagcagcgtgatggccgagtacggcctgtacggcgccatggtgagacactgcatccccctgcccgacagcgtgctgaacagcgccgagggcggcctgctgggcagctgcgccccctggctgctggtgcagaccagcgcccccggcggcagcagaagcctggacttcgccggcgacacccaggccccccagaccccctggtggtgcctgatgaccttcagctag

SEQ ID NO: 105083 - DNA, 711 bp, synthetic construct
  misc_feature 1..711: note = Description of Artificial Sequence: Synthetic coding sequence
  source 1..711: mol_type = other DNA
atgaccggcagagacagcctgagcgacggcagaaccagcagcagagccctggtgcccggcggcagccccagaggcagcagacccagaggcttcgccatcaccgacctgctgggcctggaggccgagctgcccgcccccgccggccccggccagggcagcggctgcgagggccccgccgtggccccctgccccggccccggcctggacggcagcagcctggccagaggcgccctgcccctgggcctgggcctgctgtgcggcttcggcacccagccccccgccgccgccagagccccctgcctgctgctggccgacgtgcccttcctgccccccagaggccccgagcccgccgcccccctggcccccagcagacccccccccgccctgggcagacagaagagaagcgacagcgtgagcaccagcgacgaggacagccagagcgaggacagaaacgacctgaaggccagccccaccctgggcaagagaaagaagagaagacacagaaccgtgttcaccgcccaccagctggaggagctggagaaggccttcagcgaggcccactaccccgacgtgtacgccagagagatgctggccgtgaagaccgagctgcccgaggacagaatccagtgcaagctgctgctgctggaggcccccgtgcactggaccctgcaggagacccacagactgcccagacccagaggcggcgcctag

SEQ ID NO: 105084 - DNA, 1110 bp, synthetic construct
  misc_feature 1..1110: note = Description of Artificial Sequence: Synthetic coding sequence
  source 1..1110: mol_type = other DNA
atgagagcctgcatcagcctggtgctggccgtgctgtgcggcctggcctgggccgaggaccacaaggagagcgagcccctgccccagctggaggaggagaccgaggaggccctggccagcaacctgtacagcgcccccaccagctgccagggcagatgctacgaggccttcgacaagcaccaccagtgccactgcaacgccagatgccaggagttcggcaactgctgcaaggacttcgagagcctgtgcagcgaccacgaggtgagccacagcagcgacgccatcaccaaggaggagatccagagcatcagcgagaagatctacagagccgacaccaacaaggcccagaaggaggacatcgtgctgaacagccagaactgcatcagccccagcgagaccagaaaccaggtggacagatgccccaagcccctgttcacctacgtgaacgagaagctgttcagcaagcccacctacgccgccttcatcaacctgctgaacaactaccagagagccaccggccacggcgagcacttcagcgcccaggagctggccgagcaggacgccttcctgagagagatcatgaagaccgccgtgatgaaggagctgtacagcttcctgcaccaccagaacagatacggcagcgagcaggagttcgtggacgacctgaagaacatgtggttcggcctgtacagcagaggcaacgaggagggcgacagcagcggcttcgagcacgtgttcagcggcgaggtgaagaagggcaaggtgaccggcttccacaactggatcagattctacctggaggagaaggagggcctggtggactactacagccacatctacgacggcccctgggacagctaccccgacgtgctggccatgcagttcaactgggacggctactacaaggaggtgggcagcgccttcatcggcagcagccccgagttcgagttcgccctgtacagcctgtgcttcatcgccagacccggcaaggtgtgccagctgagcctgggcggctaccccctggccgtgagaacctacacctgggacaagagcacctacggcaacggcaagaagtacatcgccaccgcctacatcgtgagcagcacctag

SEQ ID NO: 105085 - DNA, 1284 bp, synthetic construct; identical to SEQ ID NO: 82100
  misc_feature 1..1284: note = Description of Artificial Sequence: Synthetic coding sequence
  source 1..1284: mol_type = other DNA

SEQ ID NO: 105086 - DNA, 1188 bp, synthetic construct
  misc_feature 1..1188: note = Description of Artificial Sequence: Synthetic coding sequence
  source 1..1188: mol_type = other DNA
atgagcatggagcacgccgccctgaccgccaccggcgccggcggcagctggagaagcatgaagagaaaggccctgttcacctgccccttcaacggcgactgcagaatcaccaaggacaacagaagacactgccaggcctgcagactgaagagatgcgtggacatcggcatgatgaaggagttcatcctgaccgacgaggaggtgcagagaaagagagagatgatcctgaagagaaaggaggaggaggccctgaaggacagcctgagacccaagctgagcgaggagcagcagagaatcatcgccatcctgctggacgcccaccacaagacctacgaccccacctacagcgacttctgccagttcagaccccccgtgagagtgaacgacggcggcggcagccaccccagcagacccaacagcagacacacccccagcttcagcggcgacagcagcagcagctgcagcgaccactgcatcaccagcagcgacatgatggacagcagcagcttcagcaacctggacctgagcgaggaggacagcgacgaccccagcgtgaccctggagctgagccagctgagcatgctgccccacctggccgacctggtgagctacagcatccagaaggtgatcggcttcgccaagatgatccccggcttcagagacctgaccagcgaggaccagatcgtgctgctgaagagcagcgccatcgaggtgatcatgctgagaagcaacgagagcttcaccatggacgacatgagctggacctgcggcaaccaggactacaagtacagagtgagcgacgtgaccaaggccggccacagcctggagctgatcgagcccctgatcaagttccaggtgggcctgaagaagctgaacctgcacgaggaggagcacgtgctgctgatggccatctgcatcgtgagccccgacagacccggcgtgcaggacgccgccctgatcgaggccatccaggacagactgagcaacaccctgcagacctacatcagatgcagacaccccccccccggcagccacctgctgtacgccaagatgatccagaagctggccgacctgagaagcctgaacgaggagcacagcaagcagtacagatgcctgagcttccagcccgagtgcagcatgaagctgacccccctggtgctggaggtgttcggcaacgagatcagctag

SEQ ID NO: 105087 - DNA, 753 bp, synthetic construct
  misc_feature 1..753: note = Description of Artificial Sequence: Synthetic coding sequence
  source 1..753: mol_type = other DNA
atggaggccatggccgccagcaccagcctgcccgaccccggcgacttcgacagaaacgtgcccagaatctgcggcgtgtgcggcgacagagccaccggcttccacttcaacgccatgacctgcgagggctgcaagggcttcttcagaagaagcatgaagagaaaggccctgttcacctgccccttcaacggcgactgcagaatcaccaaggacaacagaagacactgccaggcctgcagactgaagagatgcgtggacatcggcatgatgaaggagttcatcctgaccgacgaggaggtgcagagaaagagagagatgatcctgaagagaaaggaggaggaggccctgaaggacagcctgagacccaagctgagcgaggagcagcagagaatcatcgccatcctgctggacgcccaccacaagacctacgaccccacctacagcgacttctgccagttcagaccccccgtgagagtgaacgacggcggcggcagccaccccagcagacccaacagcagacacacccccagcttcagcggcgacagcagcagcagctgcagcgaccactgcatcaccagcagcgacatgatggacagcagcagcttcagcaacctggacctgagcgaggaggacagcgacgaccccagcgtgaccctggagctgagccagctgagcatgctgccccacctggccgacctggtgagctacagcatccagaaggtgatcggcttcgccaagatgatccccggctag

SEQ ID NO: 105088 - DNA, 306 bp, synthetic construct
  misc_feature 1..306: note = Description of Artificial Sequence: Synthetic coding sequence
  source 1..306: mol_type = other DNA
atggaggccatggccgccagcaccagcctgcccgaccccggcgacttcgacagaaacgtgcccagaatctgcggcgtgtgcggcgacagagccaccggcttccacttcaacgccatgacctgcgagggctgcaagggcttcttcagaagaagcatgaagagaaaggccctgttcacctgccccttcaacggcgactgcagaatcaccaaggacaacagaagacactgccaggcctgcagactgaagagatgcgtggacatcggcatgatgaaggagttcatcctgaccgacgaggaggtgcagtag

SEQ ID NO: 105089 - DNA, 1284 bp, synthetic construct; identical to SEQ ID NO: 82100
  misc_feature 1..1284: note = Description of Artificial Sequence: Synthetic coding sequence
  source 1..1284: mol_type = other DNA

SEQ ID NO: 105090 - DNA, 321 bp, synthetic construct
  misc_feature 1..321: note = Description of Artificial Sequence: Synthetic coding sequence
  source 1..321: mol_type = other DNA
atggaggccatggccgccagcaccagcctgcccgaccccggcgacttcgacagaaacgtgcccagaatctgcggcgtgtgcggcgacagagccaccggcttccacttcaacgccatgacctgcgagggctgcaagggcttcttcagaagaagcatgaagagaaaggccctgttcacctgccccttcaacggcgactgcagaatcaccaaggacaacagaagacactgccaggcctgcagactgaagagatgcgtggacatcggcatgatgaaggagttcatcctgaccgacgaggaggtgcagagaaagagagagatgtag

SEQ ID NO: 105091 - DNA, 1434 bp, synthetic construct
  misc_feature 1..1434: note = Description of Artificial Sequence: Synthetic coding sequence
  source 1..1434: mol_type = other DNA
atggagtggagaaacaagaagagaagcgactggctgagcatggtgctgagaaccgccggcgtggaggaggccttcggcagcgaggtgagcgtgagaccccacagaagagcccccctgggcagcacctacctgccccccgcccccagcggcatggaggccatggccgccagcaccagcctgcccgaccccggcgacttcgacagaaacgtgcccagaatctgcggcgtgtgcggcgacagagccaccggcttccacttcaacgccatgacctgcgagggctgcaagggcttcttcagaagaagcatgaagagaaaggccctgttcacctgccccttcaacggcgactgcagaatcaccaaggacaacagaagacactgccaggcctgcagactgaagagatgcgtggacatcggcatgatgaaggagttcatcctgaccgacgaggaggtgcagagaaagagagagatgatcctgaagagaaaggaggaggaggccctgaaggacagcctgagacccaagctgagcgaggagcagcagagaatcatcgccatcctgctggacgcccaccacaagacctacgaccccacctacagcgacttctgccagttcagaccccccgtgagagtgaacgacggcggcggcagccaccccagcagacccaacagcagacacacccccagcttcagcggcgacagcagcagcagctgcagcgaccactgcatcaccagcagcgacatgatggacagcagcagcttcagcaacctggacctgagcgaggaggacagcgacgaccccagcgtgaccctggagctgagccagctgagcatgctgccccacctggccgacctggtgagctacagcatccagaaggtgatcggcttcgccaagatgatccccggcttcagagacctgaccagcgaggaccagatcgtgctgctgaagagcagcgccatcgaggtgatcatgctgagaagcaacgagagcttcaccatggacgacatgagctggacctgcggcaaccaggactacaagtacagagtgagcgacgtgaccaaggccggccacagcctggagctgatcgagcccctgatcaagttccaggtgggcctgaagaagctgaacctgcacgaggaggagcacgtgctgctgatggccatctgcatcgtgagccccgacagacccggcgtgcaggacgccgccctgatcgaggccatccaggacagactgagcaacaccctgcagacctacatcagatgcagacaccccccccccggcagccacctgctgtacgccaagatgatccagaagctggccgacctgagaagcctgaacgaggagcacagcaagcagtacagatgcctgagcttccagcccgagtgcagcatgaagctgacccccctggtgctggaggtgttcggcaacgagatcagctag

SEQ ID NO: 105092 - DNA, 279 bp, synthetic construct
  misc_feature 1..279: note = Description of Artificial Sequence: Synthetic coding sequence
  source 1..279: mol_type = other DNA
atgggcagcacctggggcagccccggctgggtgagactggccctgtgcctgaccggcctggtgctgagcctgtacgccctgcacgtgaaggccgccagagccagagacagagactacagagccctgtgcgacgtgggcaccgccatcagctgcagcagagtgttcagcagcagactgcccgccgacaccctgggcctgtgccccgacgccgccgagctgcccggcgtgagcagatggttctgcctgcccggcctggaccccgtgctgagagccctgtag

SEQ ID NO: 105093 - DNA, 492 bp, synthetic construct
  misc_feature 1..492: note = Description of Artificial Sequence: Synthetic coding sequence
  source 1..492: mol_type = other DNA
atgggcagcacctggggcagccccggctgggtgagactggccctgtgcctgaccggcctggtgctgagcctgtacgccctgcacgtgaaggccgccagagccagagacagagactacagagccctgtgcgacgtgggcaccgccatcagctgcagcagagtgttcagcagcagatggggcagaggcttcggcctggtggagcacgtgctgggccaggacagcatcctgaaccagagcaacagcatcttcggctgcatcttctacaccctgcagctgctgctgggctgcctgagaaccagatgggccagcgtgctgatgctgctgagcagcctggtgagcctggccggcagcgtgtacctggcctggatcctgttcttcgtgctgtacgacttctgcatcgtgtgcatcaccacctacgccatcaacgtgagcctgatgtggctgagcttcagaaaggtgcaggagccccagggcaaggccaagagacactag

SEQ ID NO: 105094 - DNA, 5823 bp, synthetic construct; identical to SEQ ID NO: 89974
  misc_feature 1..5823: note = Description of Artificial Sequence: Synthetic coding sequence
  source 1..5823: mol_type = other DNA

SEQ ID NO: 105095 - DNA, 357 bp, synthetic construct
  misc_feature 1..357: note = Description of Artificial Sequence: Synthetic coding sequence
  source 1..357: mol_type = other DNA
atggcccccctgagacccctgctgatcctggccctgctggcctgggtggccctggccgaccaggagagctgcaagggcagatgcaccgagggcttcaacgtggacaagaagtgccagtgcgacgagctgtgcagctactaccagagctgctgcaccgactacaccgccgagtgcaagccccaggtgaccagaggcgacgtgttcaccatgcccgaggacgagtacaccgtgtacgacgacggcgaggagaagaacaacgccaccgtgcacgagcaggtgggcggccccagcctgaccagcgacctgcaggcccagagcaagggcaaccccgagcagacccccgtgctgaagccctag

SEQ ID NO: 105096 - DNA, 495 bp, synthetic construct
  misc_feature 1..495: note = Description of Artificial Sequence: Synthetic coding sequence
  source 1..495: mol_type = other DNA
atgagcgtggaccccctgagcagcaaggccctgaagatcaagagagagctgagcgagaacaccccccacctgagcgacgaggccctgatgggcctgagcgtgagagagctgaacagacacctgagaggcctgagcgccgaggaggtgaccagactgaagcagagaagaagaaccctgaagaacagaggctacgccgccagctgcagagtgaagagagtgtgccagaaggaggagctgcagaagcagaagagcgagctggagagagaggtggacaagctggccagagagaacgccgccatgagactggagctggacgccctgagaggcaagtgcgaggccctgcagggcttcgccagaagcgtggccgccgccagaggccccgccaccctggtggcccccgccagcgtgatcaccatcgtgaagagcacccccggcagcggcagcggccccgcccacggccccgaccccgcccacggccccgccagctgcagctag

SEQ ID NO: 105097 - DNA, 495 bp, synthetic construct; identical to SEQ ID NO: 105096
  misc_feature 1..495: note = Description of Artificial Sequence: Synthetic coding sequence
  source 1..495: mol_type = other DNA

SEQ ID NO: 105098 - DNA, 381 bp, synthetic construct
  misc_feature 1..381: note = Description of Artificial Sequence: Synthetic coding sequence
  source 1..381: mol_type = other DNA
atgagcgtggaccccctgagcagcaaggccctgaagatcaagagagagctgagcgagaacaccccccacctgagcgacgaggccctgatgggcctgagcgtgagagagctgaacagacacctgagaggcctgagcgccgaggaggtgaccagactgaagcagagaagaagaaccctgaagaacagaggctacgccgccagctgcagagtgaagagagtgtgccagaaggaggagctgcagaagcagaagagcgagctggagagagaggtggacaagctggccagagagaacgccgccatgagactggagctggacgccctgagaggcaagtgcgaggccctgcagggcttcgccagaagcgtggccgccgccagaggctag

SEQ ID NO: 105099 - DNA, 495 bp, synthetic construct; identical to SEQ ID NO: 105096
  misc_feature 1..495: note = Description of Artificial Sequence: Synthetic coding sequence
  source 1..495: mol_type = other DNA

SEQ ID NO: 105100 - DNA, 282 bp, synthetic construct
  misc_feature 1..282: note = Description of Artificial Sequence: Synthetic coding sequence
  source 1..282: mol_type = other DNA
atgggcctgagcgtgagagagctgaacagacacctgagaggcctgagcgccgaggaggtgaccagactgaagcagagaagaagaaccctgaagaacagaggctacgccgccagctgcagagtgaagagagtgtgccagaaggaggagctgcagaagcagaagagcgagctggagagagaggtggacaagctggccagagagaacgccgccatgagactggagctggacgccctgagaggcaagtgcgaggccctgcagggcttcgccagaagcgtggcctag

SEQ ID NO: 105101 - DNA, 495 bp, synthetic construct; identical to SEQ ID NO: 105096
  misc_feature 1..495: note = Description of Artificial Sequence: Synthetic coding sequence
  source 1..495: mol_type = other DNA

SEQ ID NO: 105102 - DNA, 408 bp, synthetic construct
  misc_feature 1..408: note = Description of Artificial Sequence: Synthetic coding sequence
  source 1..408: mol_type = other DNA
atgggcctgagcgtgagagagctgaacagacacctgagaggcctgagcgccgaggaggtgaccagactgaagcagagaagaagaaccctgaagaacagaggctacgccgccagctgcagagtgaagagagtgtgccagaaggaggagctgcagaagcagaagagcgagctggagagagaggtggacaagctggccagagagaacgccgccatgagactggagctggacgccctgagaggcaagtgcgaggccctgcagggcttcgccagaagcgtggccgccgccagaggccccgccaccctggtggcccccgccagcgtgatcaccatcgtgaagagcacccccggcagcggcagcggccccgcccacggccccgaccccgcccacggccccgccagctgcagctag

SEQ ID NO: 105103 - DNA, 489 bp, synthetic construct
  misc_feature 1..489: note = Description of Artificial Sequence: Synthetic coding sequence
  source 1..489: mol_type = other DNA
atgaccacccccaacaagggcaacaaggccctgaaggtgaagagagagcccggcgagaacggcaccagcctgaccgacgaggagctggtgaccatgagcgtgagagagctgaaccagcacctgagaggcctgagcaaggaggagatcgtgcagctgaagcagagaagaagaaccctgaagaacagaggctacgccgccagctgcagagtgaagagagtgacccagaaggaggagctggagaagcagaaggccgagctgcagcaggaggtggagaagctggccagcgagaacgccagcatgaagctggagctggacgccctgagaagcaagtacgaggccctgcagaccttcgccagaaccgtggccagaagccccgtggcccccgccagaggccccctggccgccggcctgggccccctggtgcccggcaaggtggccgccaccagcgtgatcaccatcgtgaagagcaagaccgacgccagaagctag

SEQ ID NO: 105104 - DNA, 489 bp, synthetic construct; identical to SEQ ID NO: 105103
  misc_feature 1..489: note = Description of Artificial Sequence: Synthetic coding sequence
  source 1..489: mol_type = other DNA

SEQ ID NO: 105105 - DNA, 471 bp, synthetic construct
  misc_feature 1..471: note = Description of Artificial Sequence: Synthetic coding sequence
  source 1..471: mol_type = other DNA
atgaccaccaaccccaagcccaacaaggccctgaaggtgaagaaggaggccggcgagaacgcccccgtgctgagcgacgacgagctggtgagcatgagcgtgagagagctgaaccagcacctgagaggcctgaccaaggaggaggtgaccagactgaagcagagaagaagaaccctgaagaacagaggctacgccgccagctgcagaatcaagagagtgacccagaaggaggagctggagagacagagagtggagctgcagcaggaggtggagaagctggccagagagaacagcagcatgagactggagctggacgccctgagaagcaagtacgaggccctgcagaccttcgccagaaccgtggccagaggccccgtggcccccagcaaggtggccaccaccagcgtgatcaccatcgtgaagagcaccgagctgagcagcaccagcgtgcccttcagcgccgccagctag

SEQ ID NO: 105106 - DNA, 471 bp, synthetic construct; identical to SEQ ID NO: 105105
  misc_feature 1..471: note = Description of Artificial Sequence: Synthetic coding sequence
  source 1..471: mol_type = other DNA

SEQ ID NO: 105107 - DNA, 471 bp, synthetic construct; identical to SEQ ID NO: 105105
  misc_feature 1..471: note = Description of Artificial Sequence: Synthetic coding sequence
  source 1..471: mol_type = other DNA

SEQ ID NO: 105108 - DNA, 1041 bp, synthetic construct
  misc_feature 1..1041: note = Description of Artificial Sequence: Synthetic coding sequence
  source 1..1041: mol_type = other DNA
atgcccagccccctggccctgagaccctacctgagaagcgagttcagccccagcgtggacgccagaccctgcagcagccccagcgagctgcccgccaagctgctgctgggcgccaccctgcccagagcccccagactgcccagaagactggcctggtgcagcatcgactgggagcaggtgtgcctgctgcagagactgggcgccggcggcttcggcagcgtgtacaaggccacctacagaggcgtgcccgtggccatcaagcaggtgaacaagtgcaccaagaacagactggccagcagaagaagcttctgggccgagctgaacgtggccagactgagacacgacaacatcgtgagagtggtggccgccagcaccagaacccccgccggcagcaacagcctgggcaccatcatcatggagttcggcggcaacgtgaccctgcaccaggtgatctacggcgccgccggccaccccgagggcgacgccggcgagccccactgcagaaccggcggccagctgagcctgggcaagtgcctgaagtacagcctggacgtggtgaacggcctgctgttcctgcacagccagagcatcgtgcacctggacctgaagcccgccaacatcctgatcagcgagcaggacgtgtgcaagatcagcgacttcggctgcagcgagaagctggaggacctgctgtgcttccagacccccagctaccccctgggcggcacctacacccacagagcccccgagctgctgaagggcgagggcgtgacccccaaggccgacatctacagcttcgccatcaccctgtggcagatgaccaccaagcaggccccctacagcggcgagagacagcacatcctgtacgccgtggtggcctacgacctgagacccagcctgagcgccgccgtgttcgaggacagcctgcccggccagagactgggcgacgtgatccagagatgctggagacccagcgccgcccagagacccagcgccagactgctgctggtggacctgaccagcctgaaggccgagctgggctag

SEQ ID NO: 105109 - DNA, 1839 bp, synthetic construct
  misc_feature 1..1839: note = Description of Artificial Sequence: Synthetic coding sequence
  source 1..1839: mol_type = other DNA
atggccagaagacccagacacagcatctacagcagcgacgaggacgacgaggacttcgagatgtgcgaccacgactacgacggcctgctgcccaagagcggcaagagacacctgggcaagaccagatggaccagagaggaggacgagaagctgaagaagctggtggagcagaacggcaccgacgactggaaggtgatcgccaactacctgcccaacagaaccgacgtgcagtgccagcacagatggcagaaggtgctgaaccccgagctgatcaagggcccctggaccaaggaggaggaccagagagtgatcgagctggtgcagaagtacggccccaagagatggagcgtgatcgccaagcacctgaagggcagaatcggcaagcagtgcagagagagatggcacaaccacctgaaccccgaggtgaagaagaccagctggaccgaggaggaggacagaatcatctaccaggcccacaagagactgggcaacagatgggccgagatcgccaagctgctgcccggcagaaccgacaacgccatcaagaaccactggaacagcaccatgagaagaaaggtggagcaggagggctacctgcaggagagcagcaaggccagccagcccgccgtggccaccagcttccagaagaacagccacctgatgggcttcgcccaggccccccccaccgcccagctgcccgccaccggccagcccaccgtgaacaacgactacagctactaccacatcagcgaggcccagaacgtgagcagccacgtgccctaccccgtggccctgcacgtgaacatcgtgaacgtgccccagcccgccgccgccgccatccagagacactacaacgacgaggaccccgagaaggagaagagaatcaaggagctggagctgctgctgatgagcaccgagaacgagctgaagggccagcaggtgctgcccacccagaaccacacctgcagctaccccggctggcacagcaccaccatcgccgaccacaccagaccccacggcgacagcgcccccgtgagctgcctgggcgagcaccacagcacccccagcctgcccgccgaccccggcagcctgcccgaggagagcgccagccccgccagatgcatgatcgtgcaccagggcaccatcctggacaacgtgaagaacctgctggagttcgccgagaccctgcagttcatcgacagcttcctgaacaccagcagcaaccacgagaacagcgacctggagatgcccagcctgaccagcacccccctgatcggccacaagctgaccgtgaccacccccttccacagagaccagaccgtgaagacccagaaggagaacaccgtgttcagaacccccgccatcaagagaagcatcctggagagcagccccagaacccccacccccttcaagcacgccctggccgcccaggagatcaagtacggccccctgaagatgctgccccagacccccagccacctggtggaggacctgcaggacgtgatcaagcaggagagcgacgagagcggcatcgtggccgagttccaggagaacggcccccccctgctgaagaagatcaagcaggaggtggagagccccaccgacaagagcggcaacttcttctgcagccaccactgggagggcgacagcctgaacacccagctgttcacccagaccagccccgtggccgacgcccccaacatcctgaccagcagcgtgctgatggcccccgccagcgaggacgaggacaacgtgctgaaggccttcaccgtgcccaagaacagaagcctggccagccccctgcaggccaccaaggcccagagactgttccagttctag

SEQ ID NO: 105110 - DNA, 2181 bp, synthetic construct
  misc_feature 1..2181: note = Description of Artificial Sequence: Synthetic coding sequence
  source 1..2181: mol_type = other DNA
atggccagaagacccagacacagcatctacagcagcgacgaggacgacgaggacttcgagatgtgcgaccacgactacgacggcctgctgcccaagagcggcaagagacacctgggcaagaccagatggaccagagaggaggacgagaagctgaagaagctggtggagcagaacggcaccgacgactggaaggtgatcgccaactacctgcccaacagaaccgacgtgcagtgccagcacagatggcagaaggtgctgaaccccgagctgatcaagggcccctggaccaaggaggaggaccagagagtgatcgagctggtgcagaagtacggccccaagagatggagcgtgatcgccaagcacctgaagggcagaatcggcaagcagtgcagagagagatggcacaaccacctgaaccccgaggtgaagaagaccagctggaccgaggaggaggacagaatcatctaccaggcccacaagagactgggcaacagatgggccgagatcgccaagctgctgcccggcagaaccgacaacgccatcaagaaccactggaacagcaccatgagaagaaaggtggagcaggagggctacctgcaggagagcagcaaggccagccagcccgccgtggccaccagcttccagaagaacagccacctgatgggcttcgcccaggccccccccaccgcccagctgcccgccaccggccagcccaccgtgaacaacgactacagctactaccacatcagcgaggcccagaacgtgagcagccacgtgccctaccccgtggccctgcacgtgaacatcgtgaacgtgccccagcccgccgccgccgccatccagagacactacaacgacgaggaccccgagaaggagaagagaatcaaggagctggagctgctgctgatgagcaccgagaacgagctgaagggccagcaggtgctgcccacccagaaccacacctgcagctaccccggctggcacagcaccaccatcgccgaccacaccagaccccacggcgacagcgcccccgtgagctgcctgggcgagcaccacagcacccccagcctgcccgccgaccccggcagcctgcccgaggagagcgccagccccgccagatgcatgatcgtgcaccagggcaccatcctggacaacgtgaagaacctgctggagttcgccgagaccctgcagttcatcgacagcttcctgaacaccagcagcaaccacgagaacagcgacctggagatgcccagcctgaccagcacccccctgatcggccacaagctgaccgtgaccacccccttccacagagaccagaccgtgaagacccagaaggagaacaccgtgttcagaacccccgccatcaagagaagcatcctggagagcagccccagaacccccacccccttcaagcacgccctggccgcccaggagatcaagtacggccccctgaagatgctgccccagacccccagccacctggtggaggacctgcaggacgtgatcaagcaggagagcgacgagagcggcatcgtggccgagttccaggagaacggcccccccctgctgaagaagatcaagcaggaggtggagagccccaccgacaagagcggcaacttcttctgcagccaccactgggagggcgacagcctgaacacccagctgttcacccagaccagccccgtggccgacgcccccaccggcgtgcagtggcacgacttcggcagcctgcagcccctgccccccggcttcaagagattcagctgcctgagcctgcccagaagctgggactacagacaccccccccccagacccgccaacttcgagttcctggtggagaccggcttcctgcacgtgggccaggccggcctggagctgctgaccagcggcgacctgcccgccagcgccagccagagcgccagaatcaccggcgtgagccacagagccagacccgacaacatcctgaccagcagcgtgctgatggcccccgccagcgaggacgaggacaacgtgctgaaggccttcaccgtgcccaagaacagaagcctggccagccccctgcagccctgcagcagcacctgggagcccgccagctgcggcaagatggaggagcagatgaccagcagcagccaggccagaaagtacgtgaacgccttcagcgccagaaccctggtgatgtag

SEQ ID NO: 105111 - DNA, 2286 bp, synthetic construct
  misc_feature 1..2286: note = Description of Artificial Sequence: Synthetic coding sequence
  source 1..2286: mol_type = other DNA
atggccagaagacccagacacagcatctacagcagcgacgaggacgacgaggacttcgagatgtgcgaccacgactacgacggcctgctgcccaagagcggcaagagacacctgggcaagaccagatggaccagagaggaggacgagaagctgaagaagctggtggagcagaacggcaccgacgactggaaggtgatcgccaactacctgcccaacagaaccgacgtgcagtgccagcacagatggcagaaggtgctgaaccccgagctgatcaagggcccctggaccaaggaggaggaccagagagtgatcgagctggtgcagaagtacggccccaagagatggagcgtgatcgccaagcacctgaagggcagaatcggcaagcagtgcagagagagatggcacaaccacctgaaccccgaggtgaagaagaccagctggaccgaggaggaggacagaatcatctaccaggcccacaagagactgggcaacagatgggccgagatcgccaagctgctgcccggcagaaccgacaacgccatcaagaaccactggaacagcaccatgagaagaaaggtggagcaggagggctacctgcaggagagcagcaaggccagccagcccgccgtggccaccagcttccagaagaacagccacctgatgggcttcgcccaggccccccccaccgcccagctgcccgccaccggccagcccaccgtgaacaacgactacagctactaccacatcagcgaggcccagaacgtgagcagccacgtgccctaccccgtggccctgcacgtgaacatcgtgaacgtgccccagcccgccgccgccgccatccagagacactacaacgacgaggaccccgagaaggagaagagaatcaaggagctggagctgctgctgatgagcaccgagaacgagctgaagggccagcaggtgctgcccacccagaaccacacctgcagctaccccggctggcacagcaccaccatcgccgaccacaccagaccccacggcgacagcgcccccgtgagctgcctgggcgagcaccacagcacccccagcctgcccgccgaccccggcagcctgcccgaggagagcgccagccccgccagatgcatgatcgtgcaccagggcaccatcctggacaacgtgaagaacctgctggagttcgccgagaccctgcagttcatcgacagcgacagcagcagctggtgcgacctgagcagcttcgagttcttcgaggaggccgacttcagccccagccagcaccacaccggcaaggccctgcagctgcagcagagagagggcaacggcaccaagcccgccggcgagcccagccccagagtgaacaagagaatgctgagcgagagcagcctggacccccccaaggtgctgccccccgccagacacagcaccatccccctggtgatcctgagaaagaagagaggccaggccagccccctggccaccggcgactgcagcagcttcatcttcgccgacgtgagcagcagcacccccaagagaagccccgtgaagagcctgcccttcagccccagccagttcctgaacaccagcagcaaccacgagaacagcgacctggagatgcccagcctgaccagcacccccctgatcggccacaagctgaccgtgaccacccccttccacagagaccagaccgtgaagacccagaaggagaacaccgtgttcagaacccccgccatcaagagaagcatcctggagagcagccccagaacccccacccccttcaagcacgccctggccgcccaggagatcaagtacggccccctgaagatgctgccccagacccccagccacctggtggaggacctgcaggacgtgatcaagcaggagagcgacgagagcggcatcgtggccgagttccaggagaacggcccccccctgctgaagaagatcaagcaggaggtggagagccccaccgacaagagcggcaacttcttctgcagccaccactgggagggcgacagcctgaacacccagctgttcacccagaccagccccgtggccgacgcccccaacatcctgaccagcagcgtgctgatggcccccgccagcgaggacgaggacaacgtgctgaaggccttcaccgtgcccaagaacagaagcctggccagccccctgcagccctgcagcagcacctgggagcccgccagctgcggcaagatggaggagcagatgaccagcagcagccaggccagaaagtacgtgaacgccttcagcgccagaaccctggtgatgtag

SEQ ID NO: 105112 - DNA, 1923 bp, synthetic construct
  misc_feature 1..1923: note = Description of Artificial Sequence: Synthetic coding sequence
  source 1..1923: mol_type = other DNA
atggccagaagacccagacacagcatctacagcagcgacgaggacgacgaggacttcgagatgtgcgaccacgactacgacggcctgctgcccaagagcggcaagagacacctgggcaagaccagatggaccagagaggaggacgagaagctgaagaagctggtggagcagaacggcaccgacgactggaaggtgatcgccaactacctgcccaacagaaccgacgtgcagtgccagcacagatggcagaaggtgctgaaccccgagctgatcaagggcccctggaccaaggaggaggaccagagagtgatcgagctggtgcagaagtacggccccaagagatggagcgtgatcgccaagcacctgaagggcagaatcggcaagcagtgcagagagagatggcacaaccacctgaaccccgaggtgaagaagaccagctggaccgaggaggaggacagaatcatctaccaggcccacaagagactgggcaacagatgggccgagatcgccaagctgctgcccggcagaaccgacaacgccatcaagaaccactggaacagcaccatgagaagaaaggtggagcaggagggctacctgcaggagagcagcaaggccagccagcccgccgtggccaccagcttccagaagaacagccacctgatgggcttcgcccaggccccccccaccgcccagctgcccgccaccggccagcccaccgtgaacaacgactacagctactaccacatcagcgaggcccagaacgtgagcagccacgtgccctaccccgtggccctgcacgtgaacatcgtgaacgtgccccagcccgccgccgccgccatccagagacactacaacgacgaggaccccgagaaggagaagagaatcaaggagctggagctgctgctgatgagcaccgagaacgagctgaagggccagcaggtgctgcccacccagaaccacacctgcagctaccccggctggcacagcaccaccatcgccgaccacaccagaccccacggcgacagcgcccccgtgagctgcctgggcgagcaccacagcacccccagcctgcccgccgaccccggcagcctgcccgaggagagcgccagccccgccagatgcatgatcgtgcaccagggcaccatcctggacaacgtgaagaacctgctggagttcgccgagaccctgcagttcatcgacagcttcctgaacaccagcagcaaccacgagaacagcgacctggagatgcccagcctgaccagcacccccctgatcggccacaagctgaccgtgaccacccccttccacagagaccagaccgtgaagacccagaaggagaacaccgtgttcagaacccccgccatcaagagaagcatcctggagagcagccccagaacccccacccccttcaagcacgccctggccgcccaggagatcaagtacggccccctgaagatgctgccccagacccccagccacctggtggaggacctgcaggacgtgatcaagcaggagagcgacgagagcggcatcgtggccgagttccaggagaacggcccccccctgctgaagaagatcaagcaggaggtggagagccccaccgacaagagcggcaacttcttctgcagccaccactgggagggcgacagcctgaacacccagctgttcacccagaccagccccgtggccgacgcccccaacatcctgaccagcagcgtgctgatggcccccgccagcgaggacgaggacaacgtgctgaaggccttcaccgtgcccaagaacagaagcctggccagccccctgcagccctgcagcagcacctgggagcccgccagctgcggcaagatggaggagcagatgaccagcagcagccaggccagaaagtacgtgaacgccttcagcgccagaaccctggtgatgtag

SEQ ID NO: 105113 - DNA, 1914 bp, synthetic construct
  misc_feature 1..1914: note = Description of Artificial Sequence: Synthetic coding sequence
  source 1..1914: mol_type = other DNA
atggccagaagacccagacacagcatctacagcagcgacgaggacgacgaggacttcgagatgtgcgaccacgactacgacggcctgctgcccaagagcggcaagagacacctgggcaagaccagatggaccagagaggaggacgagaagctgaagaagctggtggagcagaacggcaccgacgactggaaggtgatcgccaactacctgcccaacagaaccgacgtgcagtgccagcacagatggcagaaggtgctgaaccccgagctgatcaagggcccctggaccaaggaggaggaccagagagtgatcgagctggtgcagaagtacggccccaagagatggagcgtgatcgccaagcacctgaagggcagaatcggcaagcagtgcagagagagatggcacaaccacctgaaccccgaggtgaagaagaccagctggaccgaggaggaggacagaatcatctaccaggcccacaagagactgggcaacagatgggccgagatcgccaagctgctgcccggcagaaccgacaacgccatcaagaaccactggaacagcaccatgagaagaaaggtggagcaggagggctacctgcaggagagcagcaaggccagccagcccgccgtggccaccagcttccagaagaacagccacctgatgggcttcgcccaggccccccccaccgcccagctgcccgccaccggccagcccaccgtgaacaacgactacagctactaccacatcagcgaggcccagaacgtgagcagccacgtgccctaccccgtggccctgcacgtgaacatcgtgaacgtgccccagcccgccgccgccgccatccagagacactacaacgacgaggaccccgagaaggagaagagaatcaaggagctggagctgctgctgatgagcaccgagaacgagctgaagggccagcagacccagaaccacacctgcagctaccccggctggcacagcaccaccatcgccgaccacaccagaccccacggcgacagcgcccccgtgagctgcctgggcgagcaccacagcacccccagcctgcccgccgaccccggcagcctgcccgaggagagcgccagccccgccagatgcatgatcgtgcaccagggcaccatcctggacaacgtgaagaacctgctggagttcgccgagaccctgcagttcatcgacagcttcctgaacaccagcagcaaccacgagaacagcgacctggagatgcccagcctgaccagcacccccctgatcggccacaagctgaccgtgaccacccccttccacagagaccagaccgtgaagacccagaaggagaacaccgtgttcagaacccccgccatcaagagaagcatcctggagagcagccccagaacccccacccccttcaagcacgccctggccgcccaggagatcaagtacggccccctgaagatgctgccccagacccccagccacctggtggaggacctgcaggacgtgatcaagcaggagagcgacgagagcggcatcgtggccgagttccaggagaacggcccccccctgctgaagaagatcaagcaggaggtggagagccccaccgacaagagcggcaacttcttctgcagccaccactgggagggcgacagcctgaacacccagctgttcacccagaccagccccgtggccgacgcccccaacatcctgaccagcagcgtgctgatggcccccgccagcgaggacgaggacaacgtgctgaaggccttcaccgtgcccaagaacagaagcctggccagccccctgcagccctgcagcagcacctgggagcccgccagctgcggcaagatggaggagcagatgaccagcagcagccaggccagaaagtacgtgaacgccttcagcgccagaaccctggtgatgtag

SEQ ID NO: 105114 - DNA, 240 bp, synthetic construct
  misc_feature 1..240: note = Description of Artificial Sequence: Synthetic coding sequence
  source 1..240: mol_type = other DNA
atggccagaagacccagacacagcatctacagcagcgacgaggacgacgaggacttcgagatgtgcgaccacgactacgacggcctgctgcccaagagcggcaagagacacctgggcaagaccagatggaccagagaggagaacagaaccgacgtgcagtgccagcacagatggcagaaggtgctgaaccccgagctgatcaagggcccctggaccaaggaggaggaccagagaaactag

SEQ ID NO: 105115 - DNA, 312 bp, synthetic construct
  misc_feature 1..312: note = Description of Artificial Sequence: Synthetic coding sequence
  source 1..312: mol_type = other DNA
atggccagaagacccagacacagcatctacagcagcgacgaggacgacgaggacttcgagatgtgcgaccacgactacgacggcctgctgcccaagagcggcaagagacacctgggcaagaccagatggaccagagaggaggacgagaagctgaagaagctggtggagcagaacggcaccgacgactggaaggtgatcgccaactacctgcccaacagaaccgacgtgcagtgccagcacagatggcagaaggtgctgaaccccgagctgatcaagggcccctggaccaaggaggaggaccagagaaactag

SEQ ID NO: 105116 - DNA, 1818 bp, synthetic construct
  misc_feature 1..1818: note = Description of Artificial Sequence: Synthetic coding sequence
  source 1..1818: mol_type = other DNA
atggccagaagacccagacacagcatctacagcagcgacgaggacgacgaggacttcgagatgtgcgaccacgactacgacggcctgctgcccaagagcggcaagagacacctgggcaagaccagatggaccagagaggaggacgagaagctgaagaagctggtggagcagaacggcaccgacgactggaaggtgatcgccaactacctgcccaacagaaccgacgtgcagtgccagcacagatggcagaaggtgctgaaccccgagctgatcaagggcccctggaccaaggaggaggaccagagagtgatcgagctggtgcagaagtacggccccaagagatggagcgtgatcgccaagcacctgaagggcagaatcggcaagcagtgcagagagagatggcacaaccacctgaaccccgaggtgaagaagaccagctggaccgaggaggaggacagaatcatctaccaggcccacaagagactgggcaacagatgggccgagatcgccaagctgctgcccggcagaaccgacaacgccatcaagaaccactggaacagcaccatgagaagaaaggtggagcaggagggctacctgcaggagagcagcaaggccagccagcccgccgtggccaccagcttccagaagaacagccacctgatgggcttcgcccaggccccccccaccgcccagctgcccgccaccggccagcccaccgtgaacaacgactacagctactaccacatcagcgaggcccagaacgtgagcagccacgtgccctaccccgtggccctgcacgtgaacatcgtgaacgtgccccagcccgccgccgccgccatccagacccagaaccacacctgcagctaccccggctggcacagcaccaccatcgccgaccacaccagaccccacggcgacagcgcccccgtgagctgcctgggcgagcaccacagcacccccagcctgcccgccgaccccggcagcctgcccgaggagagcgccagccccgccagatgcatgatcgtgcaccagggcaccatcctggacaacgtgaagaacctgctggagttcgccgagaccctgcagttcatcgacagcttcctgaacaccagcagcaaccacgagaacagcgacctggagatgcccagcctgaccagcacccccctgatcggccacaagctgaccgtgaccacccccttccacagagaccagaccgtgaagacccagaaggagaacaccgtgttcagaacccccgccatcaagagaagcatcctggagagcagccccagaacccccacccccttcaagcacgccctggccgcccaggagatcaagtacggccccctgaagatgctgccccagacccccagccacctggtggaggacctgcaggacgtgatcaagcaggagagcgacgagagcggcatcgtggccgagttccaggagaacggcccccccctgctgaagaagatcaagcaggaggtggagagccccaccgacaagagcggcaacttcttctgcagccaccactgggagggcgacagcctgaacacccagctgttcacccagaccagccccgtggccgacgcccccaacatcctgaccagcagcgtgctgatggcccccgccagcgaggacgaggacaacgtgctgaaggccttcaccgtgcccaagaacagaagcctggccagccccctgcagccctgcagcagcacctgggagcccgccagctgcggcaagatggaggagcagatgaccagcagcagccaggccagaaagtacgtgaacgccttcagcgccagaaccctggtgatgtag

SEQ ID NO: 105117 - DNA, 717 bp, synthetic construct; identical to SEQ ID NO: 95026
  misc_feature 1..717: note = Description of Artificial Sequence: Synthetic coding sequence
  source 1..717: mol_type = other DNA

SEQ ID NO: 105118 - DNA, 2031 bp, synthetic construct
  misc_feature 1..2031: note = Description of Artificial Sequence: Synthetic coding sequence
  source 1..2031: mol_type = other DNA
atgagcagaagaaccagatgcgaggacctggacgagctgcactaccaggacaccgacagcgacgtgcccgagcagagagacagcaagtgcaaggtgaagtggacccacgaggagaacagaaccgaccagcagtgccagtacagatggctgagagtgctgaaccccgacctggtgaagggcccctggaccaaggaggaggaccagaaggtgatcgagctggtgaagaagtacggcaccaagcagtggaccctgatcgccaagcacctgaagggcagactgggcaagcagtgcagagagagatggcacaaccacctgaaccccgaggtgaagaagagctgctggaccgaggaggaggacagaatcatctgcgaggcccacaaggtgctgggcaacagatgggccgagatcgccaagatgctgcccggcagaaccgacaacgccgtgaagaaccactggaacagcaccatcaagagaaaggtggacaccggcggcttcctgagcgagagcaaggactgcaagccccccgtgtacctgctgctggagctggaggacaaggacggcctgcagagcgcccagcccaccgagggccagggcagcctgctgaccaactggcccagcgtgccccccaccatcaaggaggaggagaacagcgaggaggagctggccgccgccaccaccagcaaggagcaggagcccatcggcaccgacctggacgccgtgagaacccccgagcccctggaggagttccccaagagagaggaccaggagggcagcccccccgagaccagcctgccctacaagtgggtggtggaggccgccaacctgctgatccccgccgtgggcagcagcctgagcgaggccctggacctgatcgagagcgaccccgacgcctggtgcgacctgagcaagttcgacctgcccgaggagcccagcgccgaggacagcatcaacaacagcctggtgcagctgcaggccagccaccagcagcaggtgctgccccccagacagcccagcgccctggtgcccagcgtgaccgagtacagactggacggccacaccatcagcgacctgagcagaagcagcagaggcgagctgatccccatcagccccagcaccgaggtgggcggcagcggcatcggcaccccccccagcgtgctgaagagacagagaaagagaagagtggccctgagccccgtgaccgagaacagcaccagcctgagcttcctggacagctgcaacagcctgacccccaagagcacccccgtgaagaccctgcccttcagccccagccagttcctgaacttctggaacaagcaggacaccctggagctggagagccccagcctgaccagcacccccgtgtgcagccagaaggtggtggtgaccacccccctgcacagagacaagacccccctgcaccagaagcacgccgccttcgtgacccccgaccagaagtacagcatggacaacaccccccacacccccacccccttcaagaacgccctggagaagtacggccccctgaagcccctgccccagaccccccacctggaggaggacctgaaggaggtgctgagaagcgaggccggcatcgagctgatcatcgaggacgacatcagacccgagaagcagaagagaaagcccggcctgagaagaagccccatcaagaaggtgagaaagagcctggccctggacatcgtggacgaggacgtgaagctgatgatgagcaccctgcccaagagcctgagcctgcccaccaccgcccccagcaacagcagcagcctgaccctgagcggcatcaaggaggacaacagcctgctgaaccagggcttcctgcaggccaagcccgagaaggccgccgtggcccagaagcccagaagccacttcaccacccccgcccccatgagcagcgcctggaagaccgtggcctgcggcggcaccagagaccagctgttcatgcaggagaaggccagacagctgctgggcagactgaagcccagccacaccagcagaaccctgatcctgagctag

SEQ ID NO: 105119 - DNA, 1395 bp, synthetic construct
  misc_feature 1..1395: note = Description of Artificial Sequence: Synthetic coding sequence
  source 1..1395: mol_type = other DNA
atgcccagctgcagcaccagcaccatgcccggcatgatctgcaagaaccccgacctggagttcgacagcctgcagccctgcttctaccccgacgaggacgacttctacttcggcggccccgacagcaccccccccggcgaggacatctggaagaagttcgagctgctgcccaccccccccctgagccccagcagaggcttcgccgagcacagcagcgagccccccagctgggtgaccgagatgctgctggagaacgagctgtggggcagccccgccgaggaggacgccttcggcctgggcggcctgggcggcctgacccccaaccccgtgatcctgcaggactgcatgtggagcggcttcagcgccagagagaagctggagagagccgtgagcgagaagctgcagcacggcagaggcccccccaccgccggcagcaccgcccagagccccggcgccggcgccgccagccccgccggcagaggccacggcggcgccgccggcgccggcagagccggcgccgccctgcccgccgagctggcccaccccgccgccgagtgcgtggaccccgccgtggtgttccccttccccgtgaacaagagagagcccgcccccgtgcccgccgcccccgccagcgcccccgccgccggccccgccgtggccagcggcgccggcatcgccgcccccgccggcgcccccggcgtggccccccccagacccggcggcagacagaccagcggcggcgaccacaaggccctgagcaccagcggcgaggacaccctgagcgacagcgacgacgaggacgacgaggaggaggacgaggaggaggagatcgacgtggtgaccgtggagaagagaagaagcagcagcaacaccaaggccgtgaccaccttcaccatcaccgtgagacccaagaacgccgccctgggccccggcagagcccagagcagcgagctgatcctgaagagatgcctgcccatccaccagcagcacaactacgccgcccccagcccctacgtggagagcgaggacgcccccccccagaagaagatcaagagcgaggccagccccagacccctgaagagcgtgatcccccccaaggccaagagcctgagccccagaaacagcgacagcgaggacagcgagagaagaagaaaccacaacatcctggagagacagagaagaaacgacctgagaagcagcttcctgaccctgagagaccacgtgcccgagctggtgaagaacgagaaggccgccaaggtggtgatcctgaagaaggccaccgagtacgtgcacagcctgcaggccgaggagcaccagctgctgctggagaaggagaagctgcaggccagacagcagcagctgctgaagaagatcgagcacgccagaacctgctag

SEQ ID NO: 105120 - DNA, 1149 bp, synthetic construct
  misc_feature 1..1149: note = Description of Artificial Sequence: Synthetic coding sequence
  source 1..1149: mol_type = other DNA
atgcccagctgcagcaccagcaccatgcccggcatgatctgcaagaaccccgacctggagttcgacagcctgcagccctgcttctaccccgacgaggacgacttctacttcggcggccccgacagcaccccccccggcgaggacatctggaagaagttcgagctgctgcccaccccccccctgagccccagcagaggcttcgccgagcacagcagcgagccccccagctgggtgaccgagatgctgctggagaacgagctgtggggcagccccgccgaggaggacgccttcggcctgggcggcctgggcggcctgacccccaaccccgtgatcctgcaggactgcatgtggagcggcttcagcgccagagagaagctggagagagccgtgagcgagaagctgcagcacggcagaggcccccccaccgccggcagcaccgcccagagccccggcgtggccccccccagacccggcggcagacagaccagcggcggcgaccacaaggccctgagcaccagcggcgaggacaccctgagcgacagcgacgacgaggacgacgaggaggaggacgaggaggaggagatcgacgtggtgaccgtggagaagagaagaagcagcagcaacaccaaggccgtgaccaccttcaccatcaccgtgagacccaagaacgccgccctgggccccggcagagcccagagcagcgagctgatcctgaagagatgcctgcccatccaccagcagcacaactacgccgcccccagcccctacgtggagagcgaggacgcccccccccagaagaagatcaagagcgaggccagccccagacccctgaagagcgtgatcccccccaaggccaagagcctgagccccagaaacagcgacagcgaggacagcgagagaagaagaaaccacaacatcctggagagacagagaagaaacgacctgagaagcagcttcctgaccctgagagaccacgtgcccgagctggtgaagaacgagaaggccgccaaggtggtgatcctgaagaaggccaccgagtacgtgcacagcctgcaggccgaggagcaccagctgctgctggagaaggagaagctgcaggccagacagcagcagctgctgaagaagatcgagcacgccagaacctgctag

SEQ ID NO: 105121 - DNA, 852 bp, synthetic construct
  misc_feature 1..852: note = Description of Artificial Sequence: Synthetic coding sequence
  source 1..852: mol_type = other DNA
atggccgtgccccccacctacgccgacctgggcaagagcgccagagacgtgttcaccaagggctacggcttcggcctgatcaagctggacctgaagaccaagagcgagaacggcctggagttcaccagcagcggcagcgccaacaccgagaccaccaaggtgaccggcagcctggagaccaagtacagatggaccgagtacggcctgaccttcaccgagaagtggaacaccgacaacaccctgggcaccgagatcaccgtggaggaccagctggccagaggcctgaagctgaccttcgacagcagcttcagccccaacaccggcaagaagaacgccaagatcaagaccggctacaagagagagcacatcaacctgggctgcgacatggacttcgacatcgccggccccagcatcagaggcgccctggtgctgggctacgagggctggctggccggctaccagatgaacttcgagaccgccaagagcagagtgacccagagcaacttcgccgtgggctacaagaccgacgagttccagctgcacaccaacgtgaacgacggcaccgagttcggcggcagcatctaccagaaggtgaacaagaagctggagaccgccgtgaacctggcctggaccgccggcaacagcaacaccagattcggcatcgccgccaagtaccagatcgaccccgacgcctgcttcagcgccaaggtgaacaacagcagcctgatcggcctgggctacacccagaccctgaagcccggcatcaagctgaccctgagcgccctgctggacggcaagaacgtgaacgccggcggccacaagctgggcctgggcctggagttccaggcctag

SEQ ID NO: 105122 - DNA, 852 bp, synthetic construct; identical to SEQ ID NO: 105121
  misc_feature 1..852: note = Description of Artificial Sequence: Synthetic coding sequence
  source 1..852: mol_type = other DNA

SEQ ID NO: 105123 - DNA, 852 bp, synthetic construct; identical to SEQ ID NO: 105121
  misc_feature 1..852: note = Description of Artificial Sequence: Synthetic coding sequence
  source 1..852: mol_type = other DNA

SEQ ID NO: 105124 - DNA, 849 bp, synthetic construct
  misc_feature 1..849: note = Description of Artificial Sequence: Synthetic coding sequence
  source 1..849: mol_type = other DNA
atggccacccacggccagacctgcgccagacccatgtgcatcccccccagctacgccgacctgggcaaggccgccagagacatcttcaacaagggcttcggcttcggcctggtgaagctggacgtgaagaccaagagctgcagcggcgtggagttcagcaccagcggcagcagcaacaccgacaccggcaaggtgaccggcaccctggagaccaagtacaagtggtgcgagtacggcctgaccttcaccgagaagtggaacaccgacaacaccctgggcaccgagatcgccatcgaggaccagatctgccagggcctgaagctgaccttcgacaccaccttcagccccaacaccggcaagaagagcggcaagatcaagagcagctacaagagagagtgcatcaacctgggctgcgacgtggacttcgacttcgccggccccgccatccacggcagcgccgtgttcggctacgagggctggctggccggctaccagatgaccttcgacagcgccaagagcaagctgaccagaaacaacttcgccgtgggctacagaaccggcgacttccagctgcacaccaacgtgaacgacggcaccgagttcggcggcagcatctaccagaaggtgtgcgaggacctggacaccagcgtgaacctggcctggaccagcggcaccaactgcaccagattcggcatcgccgccaagtaccagctggaccccaccgccagcatcagcgccaaggtgaacaacagcagcctgatcggcgtgggctacacccagaccctgagacccggcgtgaagctgaccctgagcgccctggtggacggcaagagcatcaacgccggctag

SEQ ID NO: 105125 - DNA, 930 bp, synthetic construct
  misc_feature 1..930: note = Description of Artificial Sequence: Synthetic coding sequence
  source 1..930: mol_type = other DNA
atgagctggtgcaacgagctgagactgcccgccctgaagcagcacagcatcggcagaggcctggagagccacatcaccatgtgcatcccccccagctacgccgacctgggcaaggccgccagagacatcttcaacaagggcttcggcttcggcctggtgaagctggacgtgaagaccaagagctgcagcggcgtggagttcagcaccagcggcagcagcaacaccgacaccggcaaggtgaccggcaccctggagaccaagtacaagtggtgcgagtacggcctgaccttcaccgagaagtggaacaccgacaacaccctgggcaccgagatcgccatcgaggaccagatctgccagggcctgaagctgaccttcgacaccaccttcagccccaacaccggcaagaagagcggcaagatcaagagcagctacaagagagagtgcatcaacctgggctgcgacgtggacttcgacttcgccggccccgccatccacggcagcgccgtgttcggctacgagggctggctggccggctaccagatgaccttcgacagcgccaagagcaagctgaccagaaacaacttcgccgtgggctacagaaccggcgacttccagctgcacaccaacgtgaacgacggcaccgagttcggcggcagcatctaccagaaggtgtgcgaggacctggacaccagcgtgaacctggcctggaccagcggcaccaactgcaccagattcggcatcgccgccaagtaccagctggaccccaccgccagcatcagcgccaaggtgaacaacagcagcctgatcggcgtgggctacacccagaccctgagacccggcgtgaagctgaccctgagcgccctggtggacggcaagagcatcaacgccggcggccacaaggtgggcctggccctggagctggaggcctag

SEQ ID NO: 105126 - DNA, 885 bp, synthetic construct
  misc_feature 1..885: note = Description of Artificial Sequence: Synthetic coding sequence
  source 1..885: mol_type = other DNA
atggccacccacggccagacctgcgccagacccatgtgcatcccccccagctacgccgacctgggcaaggccgccagagacatcttcaacaagggcttcggcttcggcctggtgaagctggacgtgaagaccaagagctgcagcggcgtggagttcagcaccagcggcagcagcaacaccgacaccggcaaggtgaccggcaccctggagaccaagtacaagtggtgcgagtacggcctgaccttcaccgagaagtggaacaccgacaacaccctgggcaccgagatcgccatcgaggaccagatctgccagggcctgaagctgaccttcgacaccaccttcagccccaacaccggcaagaagagcggcaagatcaagagcagctacaagagagagtgcatcaacctgggctgcgacgtggacttcgacttcgccggccccgccatccacggcagcgccgtgttcggctacgagggctggctggccggctaccagatgaccttcgacagcgccaagagcaagctgaccagaaacaacttcgccgtgggctacagaaccggcgacttccagctgcacaccaacgtgaacgacggcaccgagttcggcggcagcatctaccagaaggtgtgcgaggacctggacaccagcgtgaacctggcctggaccagcggcaccaactgcaccagattcggcatcgccgccaagtaccagctggaccccaccgccagcatcagcgccaaggtgaacaacagcagcctgatcggcgtgggctacacccagaccctgagacccggcgtgaagctgaccctgagcgccctggtggacggcaagagcatcaacgccggcggccacaaggtgggcctggccctggagctggaggcctag

SEQ ID NO: 105127 - DNA, 588 bp, synthetic construct
  misc_feature 1..588: note = Description of Artificial Sequence: Synthetic coding sequence
  source 1..588: mol_type = other DNA
atggccacccacggccagacctgcgccagacccatgtgcatcccccccagctacgccgacctgggcaaggccgccagagacatcttcaacaagggcttcggcttcggcctggtgaagctggacgtgaagaccaagagctgcagcggcgtggagttcagcaccagcggcagcagcaacaccgacaccggcaaggtgaccggcaccctggagaccaagtacaagtggtgcgagtacggcctgaccttcaccgagaagtggaacaccgacaacaccctgggcaccgagatcgccatcgaggaccagatctgccagggcctgaagctgaccttcgacaccaccttcagccccaacaccggcaagaagagcggcaagatcaagagcagctacaagagagagtgcatcaacctgggctgcgacgtggacttcgacttcgccggccccgccatccacggcagcgccgtgttcggctacgagggctggctggccggctaccagatgaccttcgacagcgccaagagcaagctgaccagaaacaacttcgccgtgggctacagaaccggcgacttccagctgcacaccaacgtgtag

SEQ ID NO: 105128 - DNA, 330 bp, synthetic construct
  misc_feature 1..330: note = Description of Artificial Sequence: Synthetic coding sequence
  source 1..330: mol_type = other DNA
atgagctggtgcaacgagctgagactgcccgccctgaagcagcacagcatcggcagaggcctggagagccacatcaccatgtgcatcccccccagctacgccgacctgggcaaggccgccagagacatcttcaacaagggcttcggcttcggcctggtgaagctggacgtgaagaccaagagctgcagcggcgtggagttcagcaccagcggcagcagcaacaccgacaccggcaaggtgaccggcaccctggagaccaagtacaagtggtgcgagtacggcctgaccttcaccgagaagtggaacaccgacaacaccctgggcacctag

SEQ ID NO: 105129 - DNA, 615 bp, synthetic construct
  misc_feature 1..615: note = Description of Artificial Sequence: Synthetic coding sequence
  source 1..615: mol_type = other DNA
atggccacccacggccagacctgcgccagacccatgtgcatcccccccagctacgccgacctgggcaaggccgccagagacatcttcaacaagggcttcggcttcggcctggtgaagctggacgtgaagaccaagagctgcagcggcgtggagttcagcaccagcggcagcagcaacaccgacaccggcaaggtgaccggcaccctggagaccaagtacaagtggtgcgagtacggcctgaccttcaccgagaagtggaacaccgacaacaccctgggcaccgagatcgccatcgaggaccagatctgccagggcctgaagctgaccttcgacaccaccttcagccccaacaccggcaagaagagcggcaagatcaagagcagctacaagagagagtgcatcaacctgggctgcgacgtggacttcgacttcgccggccccgccatccacggcagcgccgtgttcggctacgagggctggctggccggctaccagatgaccttcgacagcgccaagagcaagctgaccagaaacaacttcgccgtgggctacagaaccggcgacttccagctgcacaccaacgtgaacgacggcaccgagttcggcggcagctag

SEQ ID NO: 105130 - DNA, 768 bp, synthetic construct
  misc_feature 1..768: note = Description of Artificial Sequence: Synthetic coding sequence
  source 1..768: mol_type = other DNA
atgctggtgatccccgccacccaggaggccgaggagttcagcaccagcggcagcagcaacaccgacaccggcaaggtgaccggcaccctggagaccaagtacaagtggtgcgagtacggcctgaccttcaccgagaagtggaacaccgacaacaccctgggcaccgagatcgccatcgaggaccagatctgccagggcctgaagctgaccttcgacaccaccttcagccccaacaccggcaagaagagcggcaagatcaagagcagctacaagagagagtgcatcaacctgggctgcgacgtggacttcgacttcgccggccccgccatccacggcagcgccgtgttcggctacgagggctggctggccggctaccagatgaccttcgacagcgccaagagcaagctgaccagaaacaacttcgccgtgggctacagaaccggcgacttccagctgcacaccaacgtgaacgacggcaccgagttcggcggcagcatctaccagaaggtgtgcgaggacctggacaccagcgtgaacctggcctggaccagcggcaccaactgcaccagattcggcatcgccgccaagtaccagctggaccccaccgccagcatcagcgccaaggtgaacaacagcagcctgatcggcgtgggctacacccagaccctgagacccggcgtgaagctgaccctgagcgccctggtggacggcaagagcatcaacgccggcggccacaaggtgggcctggccctggagctggaggcctag

SEQ ID NO: 105131 - DNA, 885 bp, synthetic construct; identical to SEQ ID NO: 105126
  misc_feature 1..885: note = Description of Artificial Sequence: Synthetic coding sequence
  source 1..885: mol_type = other DNA

SEQ ID NO: 105132 - DNA, 852 bp, synthetic construct
  misc_feature 1..852: note = Description of Artificial Sequence: Synthetic coding sequence
  source 1..852: mol_type = other DNA
atgtgcaacacccccacctactgcgacctgggcaaggccgccaaggacgtgttcaacaagggctacggcttcggcatggtgaagatcgacctgaagaccaagagctgcagcggcgtggagttcagcaccagcggccacgcctacaccgacaccggcaaggccagcggcaacctggagaccaagtacaaggtgtgcaactacggcctgaccttcacccagaagtggaacaccgacaacaccctgggcaccgagatcagctgggagaacaagctggccgagggcctgaagctgaccctggacaccatcttcgtgcccaacaccggcaagaagagcggcaagctgaaggccagctacaagagagactgcttcagcgtgggcagcaacgtggacatcgacttcagcggccccaccatctacggctgggccgtgctggccttcgagggctggctggccggctaccagatgagcttcgacaccgccaagagcaagctgagccagaacaacttcgccctgggctacaaggccgccgacttccagctgcacacccacgtgaacgacggcaccgagttcggcggcagcatctaccagaaggtgaacgagaagatcgagaccagcatcaacctggcctggaccgccggcagcaacaacaccagattcggcatcgccgccaagtacatgctggactgcagaaccagcctgagcgccaaggtgaacaacgccagcctgatcggcctgggctacacccagaccctgagacccggcgtgaagctgaccctgagcgccctgatcgacggcaagaacttcagcgccggcggccacaaggtgggcctgggcttcgagctggaggcctag

SEQ ID NO: 105133 - DNA, 855 bp, synthetic construct
  misc_feature 1..855: note = Description of Artificial Sequence: Synthetic coding sequence
  source 1..855: mol_type = other DNA
atgtgcaacacccccacctactgcgacctgggcaaggccgccaaggacgtgttcaacaagggctacggcttcggcatggtgaagatcgacctgaagaccaagagctgcagcggcgtggtggagttcagcaccagcggccacgcctacaccgacaccggcaaggccagcggcaacctggagaccaagtacaaggtgtgcaactacggcctgaccttcacccagaagtggaacaccgacaacaccctgggcaccgagatcagctgggagaacaagctggccgagggcctgaagctgaccctggacaccatcttcgtgcccaacaccggcaagaagagcggcaagctgaaggccagctacaagagagactgcttcagcgtgggcagcaacgtggacatcgacttcagcggccccaccatctacggctgggccgtgctggccttcgagggctggctggccggctaccagatgagcttcgacaccgccaagagcaagctgagccagaacaacttcgccctgggctacaaggccgccgacttccagctgcacacccacgtgaacgacggcaccgagttcggcggcagcatctaccagaaggtgaacgagaagatcgagaccagcatcaacctggcctggaccgccggcagcaacaacaccagattcggcatcgccgccaagtacatgctggactgcagaaccagcctgagcgccaaggtgaacaacgccagcctgatcggcctgggctacacccagaccctgagacccggcgtgaagctgaccctgagcgccctgatcgacggcaagaacttcagcgccggcggccacaaggtgggcctgggcttcgagctggaggcctag

SEQ ID NO: 105134 - DNA, 498 bp, synthetic construct
  misc_feature 1..498: note = Description of Artificial Sequence: Synthetic coding sequence
  source 1..498: mol_type = other DNA
atgtgcaacacccccacctactgcgacctgggcaaggccgccaaggacgtgttcaacaagggctacggcttcggcatggtgaagatcgacctgaagaccaagagctgcagcggcgtggagttcagcaccagcggccacgcctacaccgacaccggcaaggccagcggcaacctggagaccaagtacaaggtgtgcaactacggcctgaccttcacccagaagtggaacaccgacaacaccctgggcaccgagatcagctgggagaacaagctggccgagggcctgaagctgaccctggacaccatcttcgtgcccaacaccggcaagaagagcggcaagctgaaggccagctacaagagagactgcttcagcgtgggcagcaacgtggacatcgacttcagcggccccaccatctacggctgggccgtgctggccttcgagggctggctggccggctaccagatgagcttcgacaccgccaagagcaagctgagctag

SEQ ID NO: 105135 - DNA, 855 bp, synthetic construct
  misc_feature 1..855: note = Description of Artificial Sequence: Synthetic coding sequence
  source 1..855: mol_type = other DNA
atgtgcaacacccccacctactgcgacctgggcaaggccgccaaggacgtgttcaacaagggctacggcttcggcatggtgaagatcgacctgaagaccaagagctgcagcggcgtgatggagttcagcaccagcggccacgcctacaccgacaccggcaaggccagcggcaacctggagaccaagtacaaggtgtgcaactacggcctgaccttcacccagaagtggaacaccgacaacaccctgggcaccgagatcagctgggagaacaagctggccgagggcctgaagctgaccctggacaccatcttcgtgcccaacaccggcaagaagagcggcaagctgaaggccagctacaagagagactgcttcagcgtgggcagcaacgtggacatcgacttcagcggccccaccatctacggctgggccgtgctggccttcgagggctggctggccggctaccagatgagcttcgacaccgccaagagcaagctgagccagaacaacttcgccctgggctacaaggccgccgacttccagctgcacacccacgtgaacgacggcaccgagttcggcggcagcatctaccagaaggtgaacgagaagatcgagaccagcatcaacctggcctggaccgccggcagcaacaacaccagattcggcatcgccgccaagtacatgctggactgcagaaccagcctgagcgccaaggtgaacaacgccagcctgatcggcctgggctacacccagaccctgagacccggcgtgaagctgaccctgagcgccctgatcgacggcaagaacttcagcgccggcggccacaaggtgggcctgggcttcgagctggaggcctag

SEQ ID NO: 105136 - DNA, 480 bp, synthetic construct
  misc_feature 1..480: note = Description of Artificial Sequence: Synthetic coding sequence
  source 1..480: mol_type = other DNA
atgtgcaacacccccacctactgcgacctgggcaaggccgccaaggacgtgttcaacaagggctacggcttcggcatggtgaagatcgacctgaagaccaagagctgcagcggcgtggagttcagcaccagcggccacgcctacaccgacaccggcaaggccagcggcaacctggagaccaagtacaaggtgtgcaactacggcctgaccttcacccagaagtggaacaccgacaacaccctgggcaccgagatcagctgggagaacaagctggccgagggcctgaagctgaccctggacaccatcttcgtgcccaacaccggcaagaagagcggcaagctgaaggccagctacaagagagactgcttcagcgtgggcagcaacgtggacatcgacttcagcggccccaccatctacggctgggccgtgctggccttcgagggctggctggccggctaccagatgagcttcgacacctag

SEQ ID NO: 105137 - DNA, 1062 bp, synthetic construct
  misc_feature 1..1062: note = Description of Artificial Sequence: Synthetic coding sequence
  source 1..1062: mol_type = other DNA
atggtgggcgacaccctgaagctgctgagccccctgatgaccagatacttcttcctgctgttctacagcaccgacagcagcgacctgaacgagaaccagcaccccctggacttcgacgagatggccttcggcaaggtgaagagcggcatcagcttcctgatccagaccggcgtgggcatcctgggcaacagcttcctgctgtgcttctacaacctgatcctgttcaccggccacaagctgagacccaccgacctgatcctgagccagctggccctggccaacagcatggtgctgttcttcaagggcatcccccagaccatggccgccttcggcctgaagtacctgctgaacgacaccggctgcaagttcgtgttctactaccacagagtgggcaccagagtgagcctgagcaccatctgcctgctgaacggcttccaggccatcaagctgaaccccagcatctgcagatggatggagatcaagatcagaagccccagattcatcgacttctgctgcctgctgtgctgggccccccacgtgctgatgaacgccagcgtgctgctgctggtgaacggccccctgaacagcaagaacagcagcgccaagaacaactacggctactgcagctacaaggccagcaagagattcagcagcctgcacgccgtgctgtacttcagccccgacttcatgagcctgggcttcatggtgtgggccagcggcagcatggtgttcttcctgtacagacacaagcagcaggtgcagcacaaccacagcaacagactgagctgcagacccagccaggaggccagagccacccacaccatcatggtgctggtgagcagcttcttcgtgttctacagcgtgcacagcttcctgaccatctggaccaccgtggtggccaaccccggccagtggatcgtgaccaacagcgtgctggtggccagctgcttccccgccagaagccccttcgtgctgatcatgagcgacacccacatcagccagttctgcttcgcctgcagaaccagaaagaccctgttccccaacctggtggtgatgccctag

SEQ ID NO: 105138 - DNA, 594 bp, synthetic construct
  misc_feature 1..594: note = Description of Artificial Sequence: Synthetic coding sequence
  source 1..594: mol_type = other DNA
atggccgccgtgaaggacagctgcggcaagggcgagatggccaccggcaacggcagaagactgcacctgggcatccccgaggccgtgttcgtggaggacgtggacagcttcatgaagcagcccggcaacgagaccgccgacaccgtgctgaagaagctggacgagcagtaccagaagtacaagttcatggagctgaacctggcccagaagaagagaagactgaagggccagatccccgagatcaagcagaccctggagatcctgaagtacatgcagaagaagaaggagagcaccaacagcatggagaccagattcctgctggccgacaacctgtactgcaaggccagcgtgccccccaccgacaagatgtgcctgtggctgggcgccaacgtgatgctggagtacgacatcgacgaggcccaggccctgctggagaagaacctgagcaccgccaccaagaacctggacagcctggaggaggacctggacttcctgagagaccagttcaccaccaccgaggtgaacatggccagagtgtacaactgggacgtgaagagaagaaacaaggacgacagcaccaagaacaaggcctag

SEQ ID NO: 105139 - DNA, 579 bp, synthetic construct
  misc_feature 1..579: note = Description of Artificial Sequence: Synthetic coding sequence
  source 1..579: mol_type = other DNA
atggccccccagcccatgatccacacccagcagggcctgagaaccagcagccccagcacccccagccccgagcaccaggaggacgtggacagcttcatgaagcagcccggcaacgagaccgccgacaccgtgctgaagaagctggacgagcagtaccagaagtacaagttcatggagctgaacctggcccagaagaagagaagactgaagggccagatccccgagatcaagcagaccctggagatcctgaagtacatgcagaagaagaaggagagcaccaacagcatggagaccagattcctgctggccgacaacctgtactgcaaggccagcgtgccccccaccgacaagatgtgcctgtggctgggcgccaacgtgatgctggagtacgacatcgacgaggcccaggccctgctggagaagaacctgagcaccgccaccaagaacctggacagcctggaggaggacctggacttcctgagagaccagttcaccaccaccgaggtgaacatggccagagtgtacaactgggacgtgaagagaagaaacaaggacgacagcaccaagaacaaggcctag

SEQ ID NO: 105140 - DNA, 702 bp, synthetic construct
  misc_feature 1..702: note = Description of Artificial Sequence: Synthetic coding sequence
  source 1..702: mol_type = other DNA
atgagaccccagcagctgcacgccaccgagatcaccagcagcggcttcagactggcctggccccccctgctgaccgccgacagcggctactacgtgctggagctggtgcccagcgcccagcccggcgccgccagaagacagcagctgcccggcaacgccaccgactggatctgggccggcctggaccccgacaccgactacgacgtggccctggtgcccgagagcaacgtgagactgctgagaccccagatcctgagagtgagaaccagacccggcgaggccggccccggcgccagcggccccgagagcggcgccggccccgcccccacccagctggccgccctgcccgcccccgaggaggccggccccgagagaatcgtgatcagccacgccagacccagaagcctgagagtgagctgggcccccgccctgggcagcgccgccgccctgggctaccacgtgcagttcggccccctgagaggcggcgaggcccagagagtggaggtgcccgccggcagaaactgcaccaccctgcagggcctggcccccggcaccgcctacctggtgaccgtgaccgccgccttcagaagcggcagagagagcgccctgagcgccaaggcctgcacccccgacggccccagacccagacccagacccgtgcccagagcccccacccccggcaccgccagcagagagccctag

SEQ ID NO: 105141 - DNA, 1338 bp, synthetic construct
  misc_feature 1..1338: note = Description of Artificial Sequence: Synthetic coding sequence
  source 1..1338: mol_type = other DNA
atgctgccctggaccgccctgggcctggccctgagcctgagactggccctggccagaagcggcgccgagagaggcccccccgccagcgcccccagaggcgacctgatgttcctgctggacagcagcgccagcgtgagccactacgagttcagcagagtgagagagttcgtgggccagctggtggcccccctgcccctgggcaccggcgccctgagagccagcctggtgcacgtgggcagcagaccctacaccgagttccccttcggccagcacagcagcggcgaggccgcccaggacgccgtgagagccagcgcccagagaatgggcgacacccacaccggcctggccctggtgtacgccaaggagcagctgttcgccgaggccagcggcgccagacccggcgtgcccaaggtgctggtgtgggtgaccgacggcggcagcagcgaccccgtgggcccccccatgcaggagctgaaggacctgggcgtgaccgtgttcatcgtgagcaccggcagaggcaacttcctggagctgagcgccgccgccagcgcccccgccgagaagcacctgcacttcgtggacgtggacgacctgcacatcatcgtgcaggagctgagaggcagcatcctggacgccatgagaccccagcagctgcacgccaccgagatcaccagcagcggcttcagactggcctggccccccctgctgaccgccgacagcggctactacgtgctggagctggtgcccagcgcccagcccggcgccgccagaagacagcagctgcccggcaacgccaccgactggatctgggccggcctggaccccgacaccgactacgacgtggccctggtgcccgagagcaacgtgagactgctgagaccccagatcctgagagtgagaaccagacccggcgaggccggccccggcgccagcggccccgagagcggcgccggccccgcccccacccagctggccgccctgcccgcccccgaggaggccggccccgagagaatcgtgatcagccacgccagacccagaagcctgagagtgagctgggcccccgccctgggcagcgccgccgccctgggctaccacgtgcagttcggccccctgagaggcggcgaggcccagagagtggaggtgcccgccggcagaaactgcaccaccctgcagggcctggcccccggcaccgcctacctggtgaccgtgaccgccgccttcagaagcggcagagagagcgccctgagcgccaaggcctgcacccccgacggccccagacccagacccagacccgtgcccagagcccccacccccggcaccgccagcagagagccctag

SEQ ID NO: 105142 - DNA, 195 bp, synthetic construct
  misc_feature 1..195: note = Description of Artificial Sequence: Synthetic coding sequence
  source 1..195: mol_type = other DNA
atgctgccctggaccgccctgggcctggccctgagcctgagactggccctggccagaagcggcgccgagagaggcgcccagggccccggcagacacagagtgcactgccagcacagacccagacagctgcccggcgccgtgagcagatgcctgagcccctgcagagaggcccccgccctgtgcggcagaggctag

SEQ ID NO: 105143 - DNA, 978 bp, synthetic construct
  misc_feature 1..978: note = Description of Artificial Sequence: Synthetic coding sequence
  source 1..978: mol_type = other DNA
atgcccagcagcaccgccatggccgtgggcgccctgagcagcagcctgctggtgacctgctgcctgatggtggccctgtgcagccccagcatccccctggagaagctggcccaggcccccgagcagcccggccaggagaagagagagcacgccagcagagacggccccggcagagtgaacgagctgggcagacccgccagagacgagggcggcagcggcagagactggaagagcaagagcggcagaggcctggccggcagagagccctggagcaagctgaagcaggcctgggtgagccagggcggcggcgccaaggccggcgacctgcaggtgagacccagaggcgacaccccccaggccgaggccctggccgccgccgcccaggacgccatcggccccgagctggcccccacccccgagccccccgaggagtacgtgtaccccgactacagaggcaagggctgcgtggacgagagcggcttcgtgtacgccatcggcgagaagttcgcccccggccccagcgcctgcccctgcctgtgcaccgaggagggccccctgtgcgcccagcccgagtgccccagactgcaccccagatgcatccacgtggacaccagccagtgctgcccccagtgcaaggagagaaagaactactgcgagttcagaggcaagacctaccagaccctggaggagttcgtggtgagcccctgcgagagatgcagatgcgaggccaacggcgaggtgctgtgcaccgtgagcgcctgcccccagaccgagtgcgtggaccccgtgtacgagcccgaccagtgctgccccatctgcaagaacggccccaactgcttcgccgagaccgccgtgatccccgccggcagagaggtgaagaccgacgagtgcaccatctgccactgcacctacgaggagggcacctggagaatcgagagacaggccatgtgcaccagacacgagtgcagacagatgtag

SEQ ID NO: 105144 - DNA, 750 bp, synthetic construct
  misc_feature 1..750: note = Description of Artificial Sequence: Synthetic coding sequence
  source 1..750: mol_type = other DNA
atgaccagcgagaccctgtggtggctgatcaccctgaagaagcagctgggcgacaacgaggccatcacccaggagatcgtgggctgcgcccacctggagaactacgccctgaagatgttcctgtacgccgacaacgaggacagagccggcagattccacaagaacatgatcaagagcttctacaccgccagcctgctgatcgacgtgatcaccgtgttcggcgagctgaccgacgagaacgtgaagcacagaaagtacgccagatggaaggccacctacatccacaactgcctgaagaacggcgagaccccccaggccggccccgtgggcatcgaggaggacaacgacatcgaggagaacgaggacgccggcgccgccagcctgcccacccagcccacccagcccagcagcagcagcacctacgaccccagcaacatgcccagcggcaactacaccggcatccagatcccccccggcgcccacgcccccgccaacacccccgccgaggtgccccacagcaccggcgtggccagcaacaccatccagcccaccccccagaccatccccgccatcgaccccgccctgttcaacaccatcagccagggcgacgtgagactgacccccgaggacttcgccagagcccagaagtactgcaagtacgccggcagcgccctgcagtacgaggacgtgagcaccgccgtgcagaacctgcagaaggccctgaagctgctgaccaccggcagagagtag

SEQ ID NO: 105145 - DNA, 924 bp, synthetic construct
  misc_feature 1..924: note = Description of Artificial Sequence: Synthetic coding sequence
  source 1..924: mol_type = other DNA
atggccgccctggcccccctgccccccctgcccgcccagttcaagagcatccagcaccacctgagaaccgcccaggagcacgacaagagagaccccgtggtggcctactactgcagactgtacgccatgcagaccggcatgaagatcgacagcaagacccccgagtgcagaaagttcctgagcaagctgatggaccagctggaggccctgaagaagcagctgggcgacaacgaggccatcacccaggagatcgtgggctgcgcccacctggagaactacgccctgaagatgttcctgtacgccgacaacgaggacagagccggcagattccacaagaacatgatcaagagcttctacaccgccagcctgctgatcgacgtgatcaccgtgttcggcgagctgaccgacgagaacgtgaagcacagaaagtacgccagatggaaggccacctacatccacaactgcctgaagaacggcgagaccccccaggccggccccgtgggcatcgaggaggacaacgacatcgaggagaacgaggacgccggcgccgccagcctgcccacccagcccacccagcccagcagcagcagcacctacgaccccagcaacatgcccagcggcaactacaccggcatccagatcccccccggcgcccacgcccccgccaacacccccgccgaggtgccccacagcaccggcgtggccagcaacaccatccagcccaccccccagaccatccccgccatcgaccccgccctgttcaacaccatcagccagggcgacgtgagactgacccccgaggacttcgccagagcccagaagtactgcaagtacgccggcagcgccctgcagtacgaggacgtgagcaccgccgtgcagaacctgcagaaggccctgaagctgctgaccaccggcagagagtag

SEQ ID NO: 105146 - DNA, 663 bp, synthetic construct
  misc_feature 1..663: note = Description of Artificial Sequence: Synthetic coding sequence
  source 1..663: mol_type = other DNA
gagatggccgccctggcccccctgccccccctgcccgcccagttcaagagcatccagcaccacctgagaaccgcccaggagcacgacaagagagaccccgtggtggcctactactgcagactgtacgccatgcagaccggcatgaagatcgacagcaagacccccgagtgcagaaagttcctgagcaagctgatggaccagctggaggccctgaagaagcagctgggcgacaacgaggccatcacccaggagatcgtgggctgcgcccacctggagaactacgccctgaagatgttcctgtacgccgacaacgaggacagagccggcagattccacaagaacatgatcaagagcttctacaccgccagcctgctgatcgacgtgatcaccgtgttcggcgagctgaccgacgagaacgtgaagcacagaaagtacgccagatggaaggccacctacatccacaactgcaaggagtggggcgacagcagcagcagaccctgctggctgaagaagatcatgatcctgaagaagatgaagatgctggagcagcccctgtgccccctgagccagctgagccaccaccacctgcagctgatgacccagcacgccatcagacagctgtactggaacaccgacagcagcggctgcaccagaagcagctag

SEQ ID NO: 105147 - DNA, 669 bp, synthetic construct
  misc_feature 1..669: note = Description of Artificial Sequence: Synthetic coding sequence
  source 1..669: mol_type = other DNA
atgaccagcgagaccctgtggtggctgatcaccctgaagaagcagctgggcgacaacgaggccatcacccaggagatcgtgggctgcgcccacctggagaactacgccctgaagatgttcctgtacgccgacaacgaggacagagccggcagattccacaagaacatgatcaagagcttctacaccgccagcctgctgatcgacgtgatcaccgtgttcggcgagctgaccgacgagaacgtgaagcacagaaagtacgccagatggaaggccacctacatccacaactgcctgaagaacggcgagaccccccaggccggccccgtgggcatcgaggaggacaacgacatcgaggagaacgaggacgccggcgccgccagcctgcccacccagcccacccagcccagcagcagcagcacctacgaccccagcaacatgcccagcggcaactacaccggcatccagatcccccccggcgcccacgcccccgccaacacccccgccgaggtgccccacagcaccggcgacgtgagactgacccccgaggacttcgccagagcccagaagtactgcaagtacgccggcagcgccctgcagtacgaggacgtgagcaccgccgtgcagaacctgcagaaggccctgaagctgctgaccaccggcagagagtag

SEQ ID NO: 105148 - DNA, 621 bp, synthetic construct
  misc_feature 1..621: note = Description of Artificial Sequence: Synthetic coding sequence
  source 1..621: mol_type = other DNA
atggccgccaacaagcccaagggccagaacagcctggccctgcacaaggtgatcatggtgggcagcggcggcgtgggcaagagcgccctgaccctgcagttcatgtacgacgagttcgtggaggactacgagcccaccaaggccgacagctacagaaagaaggtggtgctggacggcgaggaggtgcagatcgacatcctggacaccgccggccaggaggactacgccgccatcagagacaactacttcagaagcggcgagggcttcctgtgcgtgttcagcatcaccgagatggagagcttcgccgccaccgccgacttcagagagcagatcctgagagtgaaggaggacgagaacgtgcccttcctgctggtgggcaacaagagcgacctggaggacaagagacaggtgagcgtggaggaggccaagaacagagccgagcagtggaacgtgaactacgtggagaccagcgccaagaccagagccaacgtggacaaggtgttcttcgacctgatgagagagatcagagccagaaagatggaggacagcaaggagaagaacggcaagaagaagagaaagagcctggccaagagaatcagagagagatgctgcatcctgtag

SEQ ID NO: 105149 - DNA, 306 bp, synthetic construct
  misc_feature 1..306: note = Description of Artificial Sequence: Synthetic coding sequence
  source 1..306: mol_type = other DNA
atggccgccaacaagcccaagggccagaacagcctggccctgcacaaggtgatcatggtgggcagcggcggcgtgggcaagagcgccctgaccctgcagttcatgtacgacgagttcgtggaggactacgagcccaccaaggccgacagctacagaaagaaggtggtgctggacggcgaggaggtgcagatcgacatcctggacaccgccggccaggaggactacgccgccatcagagacaactacttcagaagcggcgagggcttcctgtgcgtgttcagcatcaccgagatggagagcttctag

SEQ ID NO: 105150 - DNA, 621 bp, synthetic construct
  misc_feature 1..621: note = Description of Artificial Sequence: Synthetic coding sequence
  source 1..621: mol_type = other DNA
atggccgccaacaagagcaagggccagagcagcctggccctgcacaaggtgatcatggtgggcagcggcggcgtgggcaagagcgccctgaccctgcagttcatgtacgacgagttcgtggaggactacgagcccaccaaggccgacagctacagaaagaaggtggtgctggacggcgaggaggtgcagatcgacatcctggacaccgccggccaggaggactacgccgccatcagagacaactacttcagaagcggcgagggcttcctgctggtgttcagcatcaccgagcacgagagcttcaccgccaccgccgagttcagagagcagatcctgagagtgaaggccgaggaggacaagatccccctgctggtggtgggcaacaagagcgacctggaggagagaagacaggtgcccgtggaggaggccagaagcaaggccgaggagtggggcgtgcagtacgtggagaccagcgccaagaccagagccaacgtggacaaggtgttcttcgacctgatgagagagatcagaaccaagaagatgagcgagaacaaggacaagaacggcaagaagagcagcaagaacaagaagagcttcaaggagagatgctgcctgctgtag

SEQ ID NO: 105151 - DNA, 684 bp, synthetic construct
  misc_feature 1..684: note = Description of Artificial Sequence: Synthetic coding sequence
  source 1..684: mol_type = other DNA
atggccgccaacaagagcaagggccagagcagcctggccctgcacaaggtgatcatggtgggcagcggcggcgtgggcaagagcgccctgaccctgcagttcatgaacgtgagcaagagcctggcctacgacaagaagaagtacaccgccaacaagaaggtggagggcatcctggagttcgtggaggactacgagcccaccaaggccgacagctacagaaagaaggtggtgctggacggcgaggaggtgcagatcgacatcctggacaccgccggccaggaggactacgccgccatcagagacaactacttcagaagcggcgagggcttcctgctggtgttcagcatcaccgagcacgagagcttcaccgccaccgccgagttcagagagcagatcctgagagtgaaggccgaggaggacaagatccccctgctggtggtgggcaacaagagcgacctggaggagagaagacaggtgcccgtggaggaggccagaagcaaggccgaggagtggggcgtgcagtacgtggagaccagcgccaagaccagagccaacgtggacaaggtgttcttcgacctgatgagagagatcagaaccaagaagatgagcgagaacaaggacaagaacggcaagaagagcagcaagaacaagaagagcttcaaggagagatgctgcctgctgtag

SEQ ID NO: 105152 - DNA, 504 bp, synthetic construct
  misc_feature 1..504: note = Description of Artificial Sequence: Synthetic coding sequence
  source 1..504: mol_type = other DNA
atggccgccaacaagagcaagggccagagcagcctggccctgcacaaggtgatcatggtgggcagcggcggcgtgggcaagagcgccctgaccctgcagttcatgtacgacgagttcgtggaggactacgagcccaccaaggccgacagctacagaaagaaggtggtgctggacggcgaggaggtgcagatcgacatcctggacaccgccggccaggaggactacgccgccatcagagacaactacttcagaagcggcgagggcttcctgctggtgttcagcatcaccgagcacgagagcttcaccgccaccgccgagttcagagagcagatcctgagagtgaaggccgaggaggacaagatccccctgctggtggtgggcaacaagagcgacctggaggagagaagacaggtgcccgtggaggaggccagaagcaaggccgaggagtggggcgtgcagtacgtggagaccagcgccaagaccagagccaacgtggacaagtag

SEQ ID NO: 105153 - DNA, 621 bp, synthetic construct; identical to SEQ ID NO: 105150
  misc_feature 1..621: note = Description of Artificial Sequence: Synthetic coding sequence
  source 1..621: mol_type = other DNA

SEQ ID NO: 105154 - DNA, 687 bp, synthetic construct
  misc_feature 1..687: note = Description of Artificial Sequence: Synthetic coding sequence
  source 1..687: mol_type = other DNA
atgaagcagagacagagcgccctgcagtgggtgatctgcgtgagccagccccagaagaccagcgagatggccgccaacaagagcaagggccagagcagcctggccctgcacaaggtgatcatggtgggcagcggcggcgtgggcaagagcgccctgaccctgcagttcatgtacgacgagttcgtggaggactacgagcccaccaaggccgacagctacagaaagaaggtggtgctggacggcgaggaggtgcagatcgacatcctggacaccgccggccaggaggactacgccgccatcagagacaactacttcagaagcggcgagggcttcctgctggtgttcagcatcaccgagcacgagagcttcaccgccaccgccgagttcagagagcagatcctgagagtgaaggccgaggaggacaagatccccctgctggtggtgggcaacaagagcgacctggaggagagaagacaggtgcccgtggaggaggccagaagcaaggccgaggagtggggcgtgcagtacgtggagaccagcgccaagaccagagccaacgtggacaaggtgttcttcgacctgatgagagagatcagaaccaagaagatgagcgagaacaaggacaagaacggcaagaagagcagcaagaacaagaagagcttcaaggagagatgctgcctgctgtag

SEQ ID NO: 105155 - DNA, 1860 bp, synthetic construct
  misc_feature 1..1860: note = Description of Artificial Sequence: Synthetic coding sequence
  source 1..1860: mol_type = other DNA
atggccagcggcgcctacaacccctacatcgagatcatcgagcagcccagacagagaggcatgagattcagatacaagtgcgagggcagaagcgccggcagcatccccggcgagcacagcaccgacaacaacagaacctaccccagcatccagatcatgaactactacggcaagggcaaggtgagaatcaccctggtgaccaagaacgacccctacaagccccacccccacgacctggtgggcaaggactgcagagacggctactacgaggccgagttcggccaggagagaagacccctgttcttccagaacctgggcatcagatgcgtgaagaagaaggaggtgaaggaggccatcatcaccagaatcaaggccggcatcaaccccttcaacgtgcccgagaagcagctgaacgacatcgaggactgcgacctgaacgtggtgagactgtgcttccaggtgttcctgcccgacgagcacggcaacctgaccaccgccctgccccccgtggtgagcaaccccatctacgacaacagagcccccaacaccgccgagctgagaatctgcagagtgaacaagaactgcggcagcgtgagaggcggcgacgagatcttcctgctgtgcgacaaggtgcagaaggacgacatcgaggtgagattcgtgctgaacgactgggaggccaagggcatcttcagccaggccgacgtgcacagacaggtggccatcgtgttcaagacccccccctactgcaaggccatcaccgagcccgtgaccgtgaagatgcagctgagaagacccagcgaccaggaggtgagcgagagcatggacttcagatacctgcccgacgagaaggacacctacggcaacaaggccaagaagcagaagaccaccctgctgttccagaagctgtgccaggaccacgtggagaccggcttcagacacgtggaccaggacggcctggagctgctgaccagcggcgacccccccaccctggccagccagagcgccggcatcaccgtgaacttccccgagagacccagacccggcctgctgggcagcatcggcgagggcagatacttcaagaaggagcccaacctgttcagccacgacgccgtggtgagagagatgcccaccggcgtgagcagccaggccgagagctactaccccagccccggccccatcagcagcggcctgagccaccacgccagcatggcccccctgcccagcagcagctggagcagcgtggcccaccccacccccagaagcggcaacaccaaccccctgagcagcttcagcaccagaaccctgcccagcaacagccagggcatcccccccttcctgagaatccccgtgggcaacgacctgaacgccagcaacgcctgcatctacaacaacgccgacgacatcgtgggcatggaggccagcagcatgcccagcgccgacctgtacggcatcagcgaccccaacatgctgagcaactgcagcgtgaacatgatgaccaccagcagcgacagcatgggcgagaccgacaaccccagactgctgagcatgaacctggagaaccccagctgcaacagcgtgctggaccccagagacctgagacagctgcaccagatgagcagcagcagcatgagcgccggcgccaacagcaacaccaccgtgttcgtgagccagagcgacgccttcgagggcagcgacttcagctgcgccgacaacagcatgatcaacgagagcggccccagcaacagcaccaaccccaacagccacggcttcgtgcaggacagccagtacagcggcatcggcagcatgcagaacgagcagctgagcgacagcttcccctacgagttcttccaggtgtag

SEQ ID NO: 105156 - DNA, 1764 bp, synthetic construct
  misc_feature 1..1764: note = Description of Artificial Sequence: Synthetic coding sequence
  source 1..1764: mol_type = other DNA
atggccagcggcgcctacaacccctacatcgagatcatcgagcagcccagacagagaggcatgagattcagatacaagtgcgagggcagaagcgccggcagcatccccggcgagcacagcaccgacaacaacagaacctaccccagcatccagatcatgaactactacggcaagggcaaggtgagaatcaccctggtgaccaagaacgacccctacaagccccacccccacgacctggtgggcaaggactgcagagacggctactacgaggccgagttcggccaggagagaagacccctgttcttccagaacctgggcatcagatgcgtgaagaagaaggaggtgaaggaggccatcatcaccagaatcaaggccggcatcaaccccttcaacgtgcccgagaagcagctgaacgacatcgaggactgcgacctgaacgtggtgagactgtgcttccaggtgttcctgcccgacgagcacggcaacctgaccaccgccctgccccccgtggtgagcaaccccatctacgacaacagagcccccaacaccgccgagctgagaatctgcagagtgaacaagaactgcggcagcgtgagaggcggcgacgagatcttcctgctgtgcgacaaggtgcagaaggacgacatcgaggtgagattcgtgctgaacgactgggaggccaagggcatcttcagccaggccgacgtgcacagacaggtggccatcgtgttcaagacccccccctactgcaaggccatcaccgagcccgtgaccgtgaagatgcagctgagaagacccagcgaccaggaggtgagcgagagcatggacttcagatacctgcccgacgagaaggacacctacggcaacaaggccaagaagcagaagaccaccctgctgttccagaagctgtgccaggaccacgtgaacttccccgagagacccagacccggcctgctgggcagcatcggcgagggcagatacttcaagaaggagcccaacctgttcagccacgacgccgtggtgagagagatgcccaccggcgtgagcagccaggccgagagctactaccccagccccggccccatcagcagcggcctgagccaccacgccagcatggcccccctgcccagcagcagctggagcagcgtggcccaccccacccccagaagcggcaacaccaaccccctgagcagcttcagcaccagaaccctgcccagcaacagccagggcatcccccccttcctgagaatccccgtgggcaacgacctgaacgccagcaacgcctgcatctacaacaacgccgacgacatcgtgggcatggaggccagcagcatgcccagcgccgacctgtacggcatcagcgaccccaacatgctgagcaactgcagcgtgaacatgatgaccaccagcagcgacagcatgggcgagaccgacaaccccagactgctgagcatgaacctggagaaccccagctgcaacagcgtgctggaccccagagacctgagacagctgcaccagatgagcagcagcagcatgagcgccggcgccaacagcaacaccaccgtgttcgtgagccagagcgacgccttcgagggcagcgacttcagctgcgccgacaacagcatgatcaacgagagcggccccagcaacagcaccaaccccaacagccacggcttcgtgcaggacagccagtacagcggcatcggcagcatgcagaacgagcagctgagcgacagcttcccctacgagttcttccaggtgtag

SEQ ID NO: 105157 - DNA, 1647 bp, synthetic construct
  misc_feature 1..1647: note = Description of Artificial Sequence: Synthetic coding sequence
  source 1..1647: mol_type = other DNA
atggacgagctgttccccctgatcttccccgccgagcccgcccaggccagcggcccctacgtggagatcatcgagcagcccaagcagagaggcatgagattcagatacaagtgcgagggcagaagcgccggcagcatccccggcgagagaagcaccgacaccaccaagacccaccccaccatcaagatcaacggctacaccggccccggcaccgtgagaatcagcctggtgaccaaggaccccccccacagaccccacccccacgagctggtgggcaaggactgcagagacggcttctacgaggccgagctgtgccccgacagatgcatccacagcttccagaacctgggcatccagtgcgtgaagaagagagacctggagcaggccatcagccagagaatccagaccaacaacaaccccttccaggaggagcagagaggcgactacgacctgaacgccgtgagactgtgcttccaggtgaccgtgagagaccccagcggcagacccctgagactgccccccgtgctgagccaccccatcttcgacaacagagcccccaacaccgccgagctgaagatctgcagagtgaacagaaacagcggcagctgcctgggcggcgacgagatcttcctgctgtgcgacaaggtgcagaaggaggacatcgaggtgtacttcaccggccccggctgggaggccagaggcagcttcagccaggccgacgtgcacagacaggtggccatcgtgttcagaacccccccctacgccgaccccagcctgcaggcccccgtgagagtgagcatgcagctgagaagacccagcgacagagagctgagcgagcccatggagttccagtacctgcccgacaccgacgacagacacagaatcgaggagaagagaaagagaacctacgagaccttcaagagcatcatgaagaagagccccttcagcggccccaccgaccccagacccccccccagaagaatcgccgtgcccagcagaagcagcgccagcgtgcccaagcccgccccccagccctaccccttcaccagcagcctgagcaccatcaactacgacgagttccccaccatggtgttccccagcggccagatcagccaggccagcgccctggcccccgcccccccccaggtgctgccccaggcccccgcccccgcccccgcccccgccatggtgagcgccctggcccaggcccccgcccccgtgcccgtgctggcccccggccccccccaggccgtggccccccccgcccccaagcccacccaggccggcgagggcaccctgagcgaggccctgctgcagctgcagttcgacgacgaggacctgggcgccctgctgggcaacagcaccgaccccgccgtgttcaccgacctggccagcgtggacaacagcgagttccagcagctgctgaaccagggcatccccgtggccccccacaccaccgagcccatgctgatggagtaccccgaggccatcaccagactggtgaccggcgcccagagaccccccgaccccgcccccgcccccctgggcgcccccggcctgcccaacggcctgctgagcggcgacgaggacttcagcagcatcgccgacatggacttcagcgccctgctgagccagatcagcagctag

SEQ ID NO: 105158 - DNA, 1656 bp, synthetic construct
  misc_feature 1..1656: note = Description of Artificial Sequence: Synthetic coding sequence
  source 1..1656: mol_type = other DNA
atggacgagctgttccccctgatcttccccgccgagcccgcccaggccagcggcccctacgtggagatcatcgagcagcccaagcagagaggcatgagattcagatacaagtgcgagggcagaagcgccggcagcatccccggcgagagaagcaccgacaccaccaagacccaccccaccatcaagatcaacggctacaccggccccggcaccgtgagaatcagcctggtgaccaaggaccccccccacagaccccacccccacgagctggtgggcaaggactgcagagacggcttctacgaggccgagctgtgccccgacagatgcatccacagcttccagaacctgggcatccagtgcgtgaagaagagagacctggagcaggccatcagccagagaatccagaccaacaacaaccccttccaggtgcccatcgaggagcagagaggcgactacgacctgaacgccgtgagactgtgcttccaggtgaccgtgagagaccccagcggcagacccctgagactgccccccgtgctgagccaccccatcttcgacaacagagcccccaacaccgccgagctgaagatctgcagagtgaacagaaacagcggcagctgcctgggcggcgacgagatcttcctgctgtgcgacaaggtgcagaaggaggacatcgaggtgtacttcaccggccccggctgggaggccagaggcagcttcagccaggccgacgtgcacagacaggtggccatcgtgttcagaacccccccctacgccgaccccagcctgcaggcccccgtgagagtgagcatgcagctgagaagacccagcgacagagagctgagcgagcccatggagttccagtacctgcccgacaccgacgacagacacagaatcgaggagaagagaaagagaacctacgagaccttcaagagcatcatgaagaagagccccttcagcggccccaccgaccccagacccccccccagaagaatcgccgtgcccagcagaagcagcgccagcgtgcccaagcccgccccccagccctaccccttcaccagcagcctgagcaccatcaactacgacgagttccccaccatggtgttccccagcggccagatcagccaggccagcgccctggcccccgcccccccccaggtgctgccccaggcccccgcccccgcccccgcccccgccatggtgagcgccctggcccaggcccccgcccccgtgcccgtgctggcccccggccccccccaggccgtggccccccccgcccccaagcccacccaggccggcgagggcaccctgagcgaggccctgctgcagctgcagttcgacgacgaggacctgggcgccctgctgggcaacagcaccgaccccgccgtgttcaccgacctggccagcgtggacaacagcgagttccagcagctgctgaaccagggcatccccgtggccccccacaccaccgagcccatgctgatggagtaccccgaggccatcaccagactggtgaccggcgcccagagaccccccgaccccgcccccgcccccctgggcgcccccggcctgcccaacggcctgctgagcggcgacgaggacttcagcagcatcgccgacatggacttcagcgccctgctgagccagatcagcagctag

SEQ ID NO: 105159 - DNA, 741 bp, synthetic construct
  misc_feature 1..741: note = Description of Artificial Sequence: Synthetic coding sequence
  source 1..741: mol_type = other DNA
atggacgagctgttccccctgatcttccccgccgagcccgcccaggccagcggcccctacgtggagatcatcgagcagcccaagcagagaggcatgagattcagatacaagtgcgagggcagaagcgccggcagcatccccggcgagagaagcaccgacaccaccaagacccaccccaccatcaagatcaacggctacaccggccccggcaccgtgagaatcagcctggtgaccaaggaccccccccacagaccccacccccacgagctggtgggcaaggactgcagagacggcttctacgaggccgagctgtgccccgacagatgcatccacagcttccagaacctgggcatccagtgcgtgaagaagagagacctggagcaggccatcagccagagaatccagaccaacaacaaccccttccaggtgcccatcgaggagcagagaggcgactacgacctgaacgccgtgagactgtgcttccaggtgaccgtgagagaccccagcggcagacccctgagactgccccccgtgctgagccaccccatcttcgacaacagagcccccaacaccgccgagctgaagatctgcagagtgaacagaaacagcggcagctgcctgggcggcgacgagatcttcctgctgtgcgacaaggtgcagaaggaggacatcgaggtgtgcccccaggccagcacccccgccctgagcctgtacgtgatccccgagcaccaccagctgtag

SEQ ID NO: 105160 - DNA, 1134 bp, synthetic construct
  misc_feature 1..1134: note = Description of Artificial Sequence: Synthetic coding sequence
  source 1..1134: mol_type = other DNA
atggacgagctgttccccctgatcttccccgccgagcccgcccaggccagcggcccctacgtggagatcatcgagcagcccaagcagagaggcatgagattcagatacaagtgcgagggcagaagcgccggcagcatccccggcgagagaagcaccgacaccaccaagacccaccccaccatcaagatcaacggctacaccggccccggcaccgtgagaatcagcctggtgaccaaggaccccccccacagaccccacccccacgagctggtgggcaaggactgcagagacggcttctacgaggccgagctgtgccccgacagatgcatccacagcttccagaacctgggcatccagtgcgtgaagaagagagacctggagcaggccatcagccagagaatccagaccaacaacaaccccttccaggtgcccatcgaggagcagagaggcgactacgacctgaacgccgtgagactgtgcttccaggtgaccgtgagagaccccagcggcagacccctgagactgccccccgtgctgagccaccccatcttcgacaacagagcccccaacaccgccgagctgaagatctgcagagtgaacagaaacagcggcagctgcctgggcggcgacgagatcttcctgctgtgcgacaaggtgcagaaggaggacatcgaggtgtacttcaccggccccggctgggaggccagaggcagcttcagccaggccgacgtgcacagacaggtggccatcgtgttcagaacccccccctacgccgaccccagcctgcaggcccccgtgagagtgagcatgcagctgagaagacccagcgacagagagctgagcgagcccatggagttccagtacctgcccgacaccgacgacagacacagaatcgaggagaagagaaagagaacctacgagaccttcaagagcatcatgaagaagagccccttcagcggccccaccgaccccagacccccccccagaagaatcgccgtgcccagcagaagcagcgccagcgtgcccaagcccggcaaggacttcctgctgagccactggaacgacagattcagcagcgtgcagctgagaagcagcggcgacgaggacagctgggcccccctgcagacctactag

SEQ ID NO: 105161 - DNA, 714 bp, synthetic construct
  misc_feature 1..714: note = Description of Artificial Sequence: Synthetic coding sequence
  source 1..714: mol_type = other DNA
atggacgagctgttccccctgatcttccccgccgagcccgcccaggccagcggcccctacgtggagatcatcgagcagcccaagcagagaggcatgagattcagatacaagtgcgagggcagaagcgccggcagcatccccggcgagagaagcaccgacaccaccaagacccaccccaccatcaagatcaacggctacaccggccccggcaccgtgagaatcagcctggtgaccaaggaccccccccacagaccccacccccacgagctggtgggcaaggactgcagagacggcttctacgaggccgagctgtgccccgacagatgcatccacagcttccagaacctgggcatccagtgcgtgaagaagagagacctggagcaggccatcagccagagaatccagaccaacaacaaccccttccaggtgcccatcgaggagcagagaggcgactacgacctgaacgccgtgagactgtgcttccaggtgaccgtgagagaccccagcggcagacccctgagactgccccccgtgctgagccaccccatcttcgacaacagagcccccaacaccgccgagctgaagatctgcagagtgaacagaaacagcggcagctgcctgggcggcgacgagatcttcctgctgtgcgacaaggtgcagaaggcccacggcatccccgtgcccgccagatacagaagaagcagccccgactag

SEQ ID NO: 105162 - DNA, 1278 bp, synthetic construct
  misc_feature 1..1278: note = Description of Artificial Sequence: Synthetic coding sequence
  source 1..1278: mol_type = other DNA
atggacgagctgttccccctgatcttccccgccgagcccgcccaggccagcggcccctacgtggagatcatcgagcagcccaagcagagaggcatgagattcagatacaagtgcgagggcagaagcgccggcagcatccccggcgagagaagcaccgacaccaccaagacccaccccaccatcaaggtgtggatgagcggccccctgtacttcggccagatcaacggctacaccggccccggcaccgtgagaatcagcctggtgaccaaggaccccccccacagaccccacccccacgagctggtgggcaaggactgcagagacggcttctacgaggccgagctgtgccccgacagatgcatccacagcttccagaacctgggcatccagtgcgtgaagaagagagacctggagcaggccatcagccagagaatccagaccaacaacaaccccttccaggtgcccatcgaggagcagagaggcgactacgacctgaacgccgtgagactgtgcttccaggtgaccgtgagagaccccagcggcagacccctgagactgccccccgtgctgagccaccccatcttcgacaacagagcccccaacaccgccgagctgaagatctgcagagtgaacagaaacagcggcagctgcctgggcggcgacgagatcttcctgctgtgcgacaaggtgcagaaggaggacatcgaggtgtacttcaccggccccggctgggaggccagaggcagcttcagccaggccgacgtgcacagacaggtggccatcgtgttcagaacccccccctacgccgaccccagcctgcaggcccccgtgagagtgagcatgcagctgagaagacccagcgacagagagctgagcgagcccatggagttccagtacctgcccgacaccgacgacagacacagaatcgaggagaagagaaagagaacctacgagaccttcaagagcatcatgaagaagagccccttcagcggccccaccgaccccagacccccccccagaagaatcgccgtgcccagcagaagcagcgccagcgtgcccaagcccgccccccagccctaccccttcaccagcagcctgagcaccatcaactacgacgagttccccaccatggtgttccccagcggccagatcagccaggccagcgccctggcccccgcccccccccaggtgctgccccaggcccccgcccccgcccccgcccccgccatggtgagcgccctggcccaggcccccgagcactgggtggccggcgactag

SEQ ID NO: 105163 - DNA, 1314 bp, synthetic construct
  misc_feature 1..1314: note = Description of Artificial Sequence: Synthetic coding sequence
  source 1..1314: mol_type = other DNA
atgacccagttcctgccccccaacctgctggccctgttcgcccccagagaccccatcccctacctgccccccctggagaagctgccccacgagaagcaccacaaccagccctactgcggcatcgccccctacatcagagagttcgaggaccccagagacgcccccccccccaccagagccgagaccagagaggagagaatggagagaaagagaagagagaagatcgagagaagacagcaggaggtggagaccgagctgaagatgtgggacccccacaacgaccccaacgcccagggcgacgccttcaagaccctgttcgtggccagagtgaactacgacaccaccgagagcaagctgagaagagagttcgaggtgtacggccccatcaagagaatccacatggtgtacagcaagagaagcggcaagcccagaggctacgccttcatcgagtacgagcacgagagagacatgcacagcgcctacaagcacgccgacggcaagaagatcgacggcagaagagtgctggtggacgtggagagaggcagaaccgtgaagggctggagacccagaagactgggcggcggcctgggcggcaccagaagaggcggcgccgacgtgaacatcagacacagcggcagagacgacaccagcagatacgacgagagacccggccccagccccctgccccacagagacagagacagagacagagagagagagagaagagagagaagcagagagagagacaaggagagagagagaagaagaagcagaagcagagacagaagaagaagaagcagaagcagagacaaggaggagagaagaagaagcagagagagaagcaaggacaaggacagagacagaaagagaagaagcagcagaagcagagagagagccagaagagagagagagagaaaggaggagctgagaggcggcggcggcgacatggccgagcccagcgaggccggcgacgccccccccgacgacggcccccccggcgagctgggccccgacggccccgacggccccgaggagaagggcagagacagagacagagagagaagaagaagccacagaagcgagagagagagaagaagagacagagacagagacagagacagagacagagagcacaagagaggcgagagaggcagcgagagaggcagagacgaggccagaggcggcggcggcggccaggacaacggcctggagggcctgggcaacgacagcagagacatgtacatggagagcgagggcggcgacggctacctggcccccgagaacggctacctgatggaggccgcccccgagtag

SEQ ID NO: 105164 - DNA, 1731 bp, synthetic construct
  misc_feature 1..1731: note = Description of Artificial Sequence: Synthetic coding sequence
  source 1..1731: mol_type = other DNA
atgctgagaagcggccccgccagcggccccagcgtgcccaccggcagagccatgcccagcagaagagtggccagaccccccgccgcccccgagctgggcgccctgggcagccccgacctgagcagcctgagcctggccgtgagcagaagcaccgagatcatcgacgagtacatcaaggagaacggcttcggcctggacggcggccagcccggccccggcgagggcctgcccagactggtgagcagaggcgccgccagcctgagcaccgtgaccctgggccccgtggccccccccgccaccccccccccctggggctgccccctgggcagactggtgagccccgcccccggccccggcccccagccccacctggtgatcaccgagcagcccaagcagagaggcatgagattcagatacgagtgcgagggcagaagcgccggcagcatcctgggcgagagcagcaccgaggccagcaagaccctgcccgccatcgagctgagagactgcggcggcctgagagaggtggaggtgaccgcctgcctggtgtggaaggactggccccacagagtgcacccccacagcctggtgggcaaggactgcaccgacggcatctgcagagtgagactgagaccccacgtgagccccagacacagcttcaacaacctgggcatccagtgcgtgagaaagaaggagatcgaggccgccatcgagagaaagatccagctgggcatcgacccctacaacgccggcagcctgaagaaccaccaggaggtggacatgaacgtggtgagaatctgcttccaggccagctacagagaccagcagggccagatgagaagaatggaccccgtgctgagcgagcccgtgtacgacaagaagagcaccaacaccagcgagctgagaatctgcagaatcaacaaggagagcggcccctgcaccggcggcgaggagctgtacctgctgtgcgacaaggtgcagaaggaggacatcagcgtggtgttcagcagagccagctgggagggcagagccgacttcagccaggccgacgtgcacagacagatcgccatcgtgttcaagacccccccctacgaggacctggagatcgtggagcccgtgaccgtgaacgtgttcctgcagagactgaccgacggcgtgtgcagcgagcccctgcccttcacctacctgcccagagaccacgacagctacggcgtggacaagaagagaaagagaggcatgcccgacgtgctgggcgagctgaacagcagcgacccccacggcatcgagagcaagagaagaaagaagaagcccgccatcctggaccacttcctgcccaaccacggcagcggccccttcctgccccccagcgccctgctgcccgaccccgacttcttcagcggcaccgtgagcctgcccggcctggagccccccggcggccccgacctgctggacgacggcttcgcctacgaccccaccgcccccaccctgttcaccatgctggacctgctgccccccgcccccccccacgccagcgccgtggtgtgcagcggcggcgccggcgccgtggtgggcgagacccccggccccgagcccctgaccctggacagctaccaggcccccggccccggcgacggcggcaccgccagcctggtgggcagcaacatgttccccaaccactacagagaggccgccttcggcggcggcctgctgagccccggccccgaggccacctag

SEQ ID NO: 105165 - DNA, 1740 bp, synthetic construct
  misc_feature 1..1740: note = Description of Artificial Sequence: Synthetic coding sequence
  source 1..1740: mol_type = other DNA
atgctgagaagcggccccgccagcggccccagcgtgcccaccggcagagccatgcccagcagaagagtggccagaccccccgccgcccccgagctgggcgccctgggcagccccgacctgagcagcctgagcctggccgtgagcagaagcaccgacgagctggagatcatcgacgagtacatcaaggagaacggcttcggcctggacggcggccagcccggccccggcgagggcctgcccagactggtgagcagaggcgccgccagcctgagcaccgtgaccctgggccccgtggccccccccgccaccccccccccctggggctgccccctgggcagactggtgagccccgcccccggccccggcccccagccccacctggtgatcaccgagcagcccaagcagagaggcatgagattcagatacgagtgcgagggcagaagcgccggcagcatcctgggcgagagcagcaccgaggccagcaagaccctgcccgccatcgagctgagagactgcggcggcctgagagaggtggaggtgaccgcctgcctggtgtggaaggactggccccacagagtgcacccccacagcctggtgggcaaggactgcaccgacggcatctgcagagtgagactgagaccccacgtgagccccagacacagcttcaacaacctgggcatccagtgcgtgagaaagaaggagatcgaggccgccatcgagagaaagatccagctgggcatcgacccctacaacgccggcagcctgaagaaccaccaggaggtggacatgaacgtggtgagaatctgcttccaggccagctacagagaccagcagggccagatgagaagaatggaccccgtgctgagcgagcccgtgtacgacaagaagagcaccaacaccagcgagctgagaatctgcagaatcaacaaggagagcggcccctgcaccggcggcgaggagctgtacctgctgtgcgacaaggtgcagaaggaggacatcagcgtggtgttcagcagagccagctgggagggcagagccgacttcagccaggccgacgtgcacagacagatcgccatcgtgttcaagacccccccctacgaggacctggagatcgtggagcccgtgaccgtgaacgtgttcctgcagagactgaccgacggcgtgtgcagcgagcccctgcccttcacctacctgcccagagaccacgacagctacggcgtggacaagaagagaaagagaggcatgcccgacgtgctgggcgagctgaacagcagcgacccccacggcatcgagagcaagagaagaaagaagaagcccgccatcctggaccacttcctgcccaaccacggcagcggccccttcctgccccccagcgccctgctgcccgaccccgacttcttcagcggcaccgtgagcctgcccggcctggagccccccggcggccccgacctgctggacgacggcttcgcctacgaccccaccgcccccaccctgttcaccatgctggacctgctgccccccgcccccccccacgccagcgccgtggtgtgcagcggcggcgccggcgccgtggtgggcgagacccccggccccgagcccctgaccctggacagctaccaggcccccggccccggcgacggcggcaccgccagcctggtgggcagcaacatgttccccaaccactacagagaggccgccttcggcggcggcctgctgagccccggccccgaggccacctag

SEQ ID NO: 105166 - DNA, 2187 bp, synthetic construct
  misc_feature 1..2187: note = Description of Artificial Sequence: Synthetic coding sequence
  source 1..2187: mol_type = other DNA
atggaggccgccgccggcggcagaggctgcttccagccccaccccggcctgcagaagaccctggagcagttccacctgagcagcatgagcagcctgggcggccccgccgccttcagcgccagatgggcccaggaggcctacaagaaggagagcgccaaggaggccggcgccgccgccgtgcccgcccccgtgcccgccgccaccgagcccccccccgtgctgcacctgcccgccatccagccccccccccccgtgctgcccggccccttcttcatgcccagcgacagaagcaccgagagatgcgagaccgtgctggagggcgagaccatcagctgcttcgtggtgggcggcgagaagagactgtgcctgccccagatcctgaacagcgtgctgagagacttcagcctgcagcagatcaacgccgtgtgcgacgagctgcacatctactgcagcagatgcaccgccgaccagctggagatcctgaaggtgatgggcatcctgcccttcagcgcccccagctgcggcctgatcaccaagaccgacgccgagagactgtgcaacgccctgctgtacggcggcgcctacccccccccctgcaagaaggagctggccgccagcctggccctgggcctggagctgagcgagagaagcgtgagagtgtaccacgagtgcttcggcaagtgcaagggcctgctggtgcccgagctgtacagcagccccagcgccgcctgcatccagtgcctggactgcagactgatgtaccccccccacaagttcgtggtgcacagccacaaggccctggagaacagaacctgccactggggcttcgacagcgccaactggagagcctacatcctgctgagccaggactacaccggcaaggaggagcaggccagactgggcagatgcctggacgacgtgaaggagaagttcgactacggcaacaagtacaagagaagagtgcccagagtgagcagcgagccccccgccagcatcagacccaagaccgacgacaccagcagccagagccccgcccccagcgagaaggacaagcccagcagctggctgagaaccctggccggcagcagcaacaagagcctgggctgcgtgcaccccagacagagactgagcgccttcagaccctggagccccgccgtgagcgccagcgagaaggagctgagcccccacctgcccgccctgatcagagacagcttctacagctacaagagcttcgagaccgccgtggcccccaacgtggccctggccccccccgcccagcagaaggtggtgagcagccccccctgcgccgccgccgtgagcagagcccccgagcccctggccacctgcacccagcccagaaagagaaagctgaccgtggacacccccggcgcccccgagaccctggcccccgtggccgcccccgaggaggacaaggacagcgaggccgaggtggaggtggagagcagagaggagttcaccagcagcctgagcagcctgagcagccccagcttcaccagcagcagcagcgccaaggacctgggcagccccggcgccagagccctgcccagcgccgtgcccgacgccgccgcccccgccgacgcccccagcggcctggaggccgagctggagcacctgagacaggccctggagggcggcctggacaccaaggaggccaaggagaagttcctgcacgaggtggtgaagatgagagtgaagcaggaggagaagctgagcgccgccctgcaggccaagagaagcctgcaccaggagctggagttcctgagagtggccaagaaggagaagctgagagaggccaccgaggccaagagaaacctgagaaaggagatcgagagactgagagccgagaacgagaagaagatgaaggaggccaacgagagcagactgagactgaagagagagctggagcaggccagacaggccagagtgtgcgacaagggctgcgaggccggcagactgagagccaagtacagcgcccagatcgaggacctgcaggtgaagctgcagcacgccgaggccgacagagagcagctgagagccgacctgctgagagagagagaggccagagagcacctggagaaggtggtgaaggagctgcaggagcagctgtggcccagagccagacccgaggccgccggcagcgagggcgccgccgagctggagccctag

SEQ ID NO: 105167 - DNA, 1632 bp, synthetic construct
  misc_feature 1..1632: note = Description of Artificial Sequence: Synthetic coding sequence
  source 1..1632: mol_type = other DNA
atgggctgcatcaagagcaaggagaacaagagccccgccatcaagtacagacccgagaacacccccgagcccgtgagcaccagcgtgagccactacggcgccgagcccaccaccgtgagcccctgccccagcagcagcgccaagggcaccgccgtgaacttcagcagcctgagcatgacccccttcggcggcagcagcggcgtgacccccttcggcggcgccagcagcagcttcagcgtggtgcccagcagctaccccgccggcctgaccggcggcgtgaccatcttcgtggccctgtacgactacgaggccagaaccaccgaggacctgagcttcaagaagggcgagagattccagatcatcaacaacaccgagggcgactggtgggaggccagaagcatcgccaccggcaagaacggctacatccccagcaactacgtggcccccgccgacagcatccaggccgaggagtggtacttcggcaagatgggcagaaaggacgccgagagactgctgctgaaccccggcaaccagagaggcatcttcctggtgagagagagcgagaccaccaagggcgcctacagcctgagcatcagagactgggacgagatcagaggcgacaacgtgaagcactacaagatcagaaagctggacaacggcggctactacatcaccaccagagcccagttcgacaccctgcagaagctggtgaagcactacaccgagcacgccgacggcctgtgccacaagctgaccaccgtgtgccccaccgtgaagccccagacccagggcctggccaaggacgcctgggagatccccagagagagcctgagactggaggtgaagctgggccagggctgcttcggcgaggtgtggatgggcacctggaacggcaccaccaaggtggccatcaagaccctgaagcccggcaccatgatgcccgaggccttcctgcaggaggcccagatcatgaagaagctgagacacgacaagctggtgcccctgtacgccgtggtgagcgaggagcccatctacatcgtgaccgagttcatgagcaagggcagcctgctggacttcctgaaggagggcgacggcaagtacctgaagctgccccagctggtggacatggccgcccagatcgccgacggcatggcctacatcgagagaatgaactacatccacagagacctgagagccgccaacatcctggtgggcgagaacctggtgtgcaagatcgccgacttcggcctggccagactgatcgaggacaacgagtacaccgccagacagggcgccaagttccccatcaagtggaccgcccccgaggccgccctgtacggcagattcaccatcaagagcgacgtgtggagcttcggcatcctgcagaccgagctggtgaccaagggcagagtgccctaccccggcatggtgaacagagaggtgctggagcaggtggagagaggctacagaatgccctgcccccagggctgccccgagagcctgcacgagctgatgaacctgtgctggaagaaggaccccgacgagagacccaccttcgagtacatccagagcttcctggaggactacttcaccgccaccgagccccagtaccagcccggcgagaacctgtag

SEQ ID NO: 105168 - DNA, 1632 bp, synthetic construct; identical to SEQ ID NO: 105167
  misc_feature 1..1632: note = Description of Artificial Sequence: Synthetic coding sequence
  source 1..1632: mol_type = other DNA

SEQ ID NO: 105169 - DNA, 1632 bp, synthetic construct; identical to SEQ ID NO: 105167
  misc_feature 1..1632: note = Description of Artificial Sequence: Synthetic coding sequence
  source 1..1632: mol_type = other DNA

SEQ ID NO: 105170 - DNA, 1539 bp, synthetic construct
  misc_feature 1..1539: note = Description of Artificial Sequence: Synthetic coding sequence
  source 1..1539: mol_type = other DNA
atgggctgcatcaagagcaagggcaaggacagcctgagcgacgacggcgtggacctgaagacccagcccgtgagaaacaccgagagaaccatctacgtgagagaccccaccagcaacaagcagcagagacccgtgcccgagagccagctgctgcccggccagagattccagaccaaggaccccgaggagcagggcgacatcgtggtggccctgtacccctacgacggcatccaccccgacgacctgagcttcaagaagggcgagaagatgaaggtgctggaggagcacggcgagtggtggaaggccaagagcctgctgaccaagaaggagggcttcatccccagcaactacgtggccaagctgaacaccctggagaccgaggagtggttcttcaaggacatcaccagaaaggacgccgagagacagctgctggcccccggcaacagcgccggcgccttcctgatcagagagagcgagaccctgaagggcagcttcagcctgagcgtgagagacttcgaccccgtgcacggcgacgtgatcaagcactacaagatcagaagcctggacaacggcggctactacatcagccccagaatcaccttcccctgcatcagcgacatgatcaagcactaccagaagcaggccgacggcctgtgcagaagactggagaaggcctgcatcagccccaagccccagaagccctgggacaaggacgcctgggagatccccagagagagcatcaagctggtgaagagactgggcgccggccagttcggcgaggtgtggatgggctactacaacaacagcaccaaggtggccgtgaagaccctgaagcccggcaccatgagcgtgcaggccttcctggaggaggccaacctgatgaagaccctgcagcacgacaagctggtgagactgtacgccgtggtgaccagagaggagcccatctacatcatcaccgagtacatggccaagggcagcctgctggacttcctgaagagcgacgagggcggcaaggtgctgctgcccaagctgatcgacttcagcgcccagatcgccgagggcatggcctacatcgagagaaagaactacatccacagagacctgagagccgccaacgtgctggtgagcgagagcctgatgtgcaagatcgccgacttcggcctggccagagtgatcgaggacaacgagtacaccgccagagagggcgccaagttccccatcaagtggaccgcccccgaggccatcaacttcggctgcttcaccatcaagagcgacgtgtggagcttcggcatcctgctgtacgagatcgtgacctacggcaagatcccctaccccggcagaaccaacgccgacgtgatgaccgccctgagccagggctacagaatgcccagagtggagaactgccccgacgagctgtacgacatcatgaagatgtgctggaaggagaaggccgaggagagacccaccttcgactacctgcagagcgtgctggacgacttctacaccgccaccgagggccagtaccagcagcagccctag

SEQ ID NO: 105171 - DNA, 453 bp, synthetic construct
  misc_feature 1..453: note = Description of Artificial Sequence: Synthetic coding sequence
  source 1..453: mol_type = other DNA
atgggctgcatcaagagcaagggcaaggacagcctgagcgacgacggcgtggacctgaagacccagcccgtgagaaacaccgagagaaccatctacgtgagagaccccaccagcaacaagcagcagagacccgtgcccgagagccagctgctgcccggccagagattccagaccaaggaccccgaggagcagggcgacatcgtggtggccctgtacccctacgacggcatccaccccgacgacctgagcttcaagaagggcgagaagatgaaggtgctggaggagcacggcgagtggtggaaggccaagagcctgctgaccaagaaggagggcttcatccccagcaactacgtggccaagctgaacaccctggagaccgaggagtggttcttcaaggacatcaccagaaaggacgccgagagacagctgctggcccccggcaacagcgcctag

SEQ ID NO: 105172 - DNA, 1476 bp, synthetic construct
  misc_feature 1..1476: note = Description of Artificial Sequence: Synthetic coding sequence
  source 1..1476: mol_type = other DNA
atgggctgcatcaagagcaagggcaaggacagcctgagcgacgacggcgtggacctgaagacccagcccgtgcccgagagccagctgctgcccggccagagattccagaccaaggaccccgaggagcagggcgacatcgtggtggccctgtacccctacgacggcatccaccccgacgacctgagcttcaagaagggcgagaagatgaaggtgctggaggagcacggcgagtggtggaaggccaagagcctgctgaccaagaaggagggcttcatccccagcaactacgtggccaagctgaacaccctggagaccgaggagtggttcttcaaggacatcaccagaaaggacgccgagagacagctgctggcccccggcaacagcgccggcgccttcctgatcagagagagcgagaccctgaagggcagcttcagcctgagcgtgagagacttcgaccccgtgcacggcgacgtgatcaagcactacaagatcagaagcctggacaacggcggctactacatcagccccagaatcaccttcccctgcatcagcgacatgatcaagcactaccagaagcaggccgacggcctgtgcagaagactggagaaggcctgcatcagccccaagccccagaagccctgggacaaggacgcctgggagatccccagagagagcatcaagctggtgaagagactgggcgccggccagttcggcgaggtgtggatgggctactacaacaacagcaccaaggtggccgtgaagaccctgaagcccggcaccatgagcgtgcaggccttcctggaggaggccaacctgatgaagaccctgcagcacgacaagctggtgagactgtacgccgtggtgaccagagaggagcccatctacatcatcaccgagtacatggccaagggcagcctgctggacttcctgaagagcgacgagggcggcaaggtgctgctgcccaagctgatcgacttcagcgcccagatcgccgagggcatggcctacatcgagagaaagaactacatccacagagacctgagagccgccaacgtgctggtgagcgagagcctgatgtgcaagatcgccgacttcggcctggccagagtgatcgaggacaacgagtacaccgccagagagggcgccaagttccccatcaagtggaccgcccccgaggccatcaacttcggctgcttcaccatcaagagcgacgtgtggagcttcggcatcctgctgtacgagatcgtgacctacggcaagatcccctaccccggcagaaccaacgccgacgtgatgaccgccctgagccagggctacagaatgcccagagtggagaactgccccgacgagctgtacgacatcatgaagatgtgctggaaggagaaggccgaggagagacccaccttcgactacctgcagagcgtgctggacgacttctacaccgccaccgagggccagtaccagcagcagccctag

SEQ ID NO: 105173 - DNA, 993 bp, synthetic construct
  misc_feature 1..993: note = Description of Artificial Sequence: Synthetic coding sequence
  source 1..993: mol_type = other DNA
atggccgccgtggacagcttctacctgctgtacagagagatcgccagaagctgcaactgctacatggaggccctggccctggtgggcgcctggtacaccgccagaaagagcatcaccgtgatctgcgacttctacagcctgatcagactgcacttcatccccagactgggcagcagagccgacctgatcaagcagtacggcagatgggccgtggtgagcggcgccaccgacggcatcggcaaggcctacgccgaggagctggccagcagaggcctgaacatcatcctgatcagcagaaacgaggagaagctgcaggtggtggccaaggacatcgccgacacctacaaggtggagaccgacatcatcgtggccgacttcagcagcggcagagagatctacctgcccatcagagaggccctgaaggacaaggacgtgggcatcctggtgaacaacgtgggcgtgttctacccctacccccagtacttcacccagctgagcgaggacaagctgtgggacatcatcaacgtgaacatcgccgccgccagcctgatggtgcacgtggtgctgcccggcatggtggagagaaagaagggcgccatcgtgaccatcagcagcggcagctgctgcaagcccaccccccagctggccgccttcagcgccagcaaggcctacctggaccacttcagcagagccctgcagtacgagtacgccagcaagggcatcttcgtgcagagcctgatccccttctacgtggccaccagcatgaccgcccccagcaacttcctgcacagatgcagctggctggtgcccagccccaaggtgtacgcccaccacgccgtgagcaccctgggcatcagcaagagaaccaccggctactggagccacagcatccagttcctgttcgcccagtacatgcccgagtggctgtgggtgtggggcgccaacatcctgaacagaagcctgagaaaggaggccctgagctgcaccgcctag

SEQ ID NO: 105174 - DNA, 336 bp, synthetic construct
  misc_feature 1..336: note = Description of Artificial Sequence: Synthetic coding sequence
  source 1..336: mol_type = other DNA
atgggcagcagcagcttcctggtgctgatggtgagcctggtgctggtgaccctggtggccgtggagggcgtgaaggagggcatcgagaaggccggcgtgtgccccgccgacaacgtgagatgcttcaagagcgaccccccccagtgccacaccgaccaggactgcctgggcgagagaaagtgctgctacctgcactgcggcttcaagtgcgtgatccccgtgaaggagctggaggagggcggcaacaaggacgaggacgtgagcagaccctaccccgagcccggctgggaggccaagtgccccggcagcagcagcaccagatgcccccagaagtag

SEQ ID NO: 105175 - DNA, 675 bp, synthetic construct
  misc_feature 1..675: note = Description of Artificial Sequence: Synthetic coding sequence
  source 1..675: mol_type = other DNA
atgagaacccagagcctgctgctgctgggcgccctgctggccgtgggcagccagctgcccgccgtgttcggcagaaagaagggcgagaagagcggcggctgcccccccgacgacggcccctgcctgctgagcgtgcccgaccagtgcgtggaggacagccagtgccccctgaccagaaagtgctgctacagagcctgcttcagacagtgcgtgcccagagtgagcgtgaagctgggcagctgccccgaggaccagctgagatgcctgagccccatgaaccacctgtgccacaaggacagcgactgcagcggcaagaagagatgctgccacagcgcctgcggcagagactgcagagaccccgccagaggcaccgcccccggctgccccggccaggccaacagcgacctgggcagcgtggccctgcacctgagctggggccccaccgagagagtgcacgacggcagacccggcgccctgcccgccggccagcactacctgtaccagagatggttccagcccagcgacaaccactggcccgccgacaccagcctgcagcccatccacccctggttcctgctgctgggcgtgaaggtgcacagcctgagcagcgaggagggcctgtgcatcacccccgtgctgtgcaccaccgccatcagagccagccaccccagctag

SEQ ID NO: 105176 - DNA, 372 bp, synthetic construct
  misc_feature 1..372: note = Description of Artificial Sequence: Synthetic coding sequence
  source 1..372: mol_type = other DNA
atgagaacccagagcctgctgctgctgggcgccctgctggccgtgggcagccagctgcccgccgtgttcggcagaaagaagggcgagaagagcggcggctgcccccccgacgacggcccctgcctgctgagcgtgcccgaccagtgcgtggaggacagccagtgccccctgaccagaaagtgctgctacagagcctgcttcagacagtgcgtgcccagagtgagcgtgaagctgggcagctgccccgaggaccagctgagatgcctgagccccatgaaccacctgtgccacaaggacagcgactgcagcggcaagaagagatgctgccacagcgcctgcggcagagactgcagagaccccgccagaggctag

SEQ ID NO: 105177 - DNA, 1647 bp, synthetic construct
  misc_feature 1..1647: note = Description of Artificial Sequence: Synthetic coding sequence
  source 1..1647: mol_type = other DNA
atgcccgccctgagacccctgctgcccctgctgctgctgctgagactgaccagcggcgccggcctgctgcccggcctgggcagccaccccggcgtgtgccccaaccagctgagccccaacctgtgggtggacgcccagagcacctgcgagagagagtgcagcagagaccaggactgcgccgccgccgagaagtgctgcatcaacgtgtgcggcctgcacagctgcgtggccgccagattccccggcagccccgccgcccccaccaccgccgccagctgcgagggcttcgtgtgcccccagcagggcagcgactgcgacatctgggacggccagcccgtgtgcagatgcagagacagatgcgagaaggagcccagcttcacctgcgccagcgacggcctgacctactacaacagatgctacatggacgccgaggcctgcctgagaggcctgcacctgcacatcgtgccctgcaagcacgtgctgagctggccccccagcagccccggcccccccgagaccaccgccagacccacccccggcgccgcccccgtgccccccgccctgtacagcagccccagcccccaggccgtgcaggtgggcggcaccgccagcctgcactgcgacgtgagcggcagacccccccccgccgtgacctgggagaagcagagccaccagagagagaacctgatcatgagacccgaccagatgtacggcaacgtggtggtgaccagcatcggccagctggtgctgtacaacgccagacccgaggacgccggcctgtacacctgcaccgccagaaacgccgccggcctgctgagagccgacttccccctgagcgtggtgcagagagagcccgccagagacgccgcccccagcatccccgcccccgccgagtgcctgcccgacgtgcaggcctgcaccggccccaccagcccccacctggtgctgtggcactacgacccccagagaggcggctgcatgaccttccccgccagaggctgcgacggcgccgccagaggcttcgagacctacgaggcctgccagcaggcctgcgccagaggccccggcgacgcctgcgtgctgcccgccgtgcagggcccctgcagaggctgggagcccagatgggcctacagccccctgctgcagcagtgccaccccttcgtgtacggcggctgcgagggcaacggcaacaacttccacagcagagagagctgcgaggacgcctgccccgtgcccagaacccccccctgcagagcctgcagactgagaagcaagctggccctgagcctgtgcagaagcgacttcgccatcgtgggcagactgaccgaggtgctggaggagcccgaggccgccggcggcatcgccagagtggccctggaggacgtgctgaaggacgacaagatgggcctgaagttcctgggcaccaagtacctggaggtgaccctgagcggcatggactgggcctgcccctgccccaacatgaccgccggcgacggccccctggtgatcatgggcgaggtgagagacggcgtggccgtgctggacgccggcagctacgtgagagccgccagcgagaagagagtgaagaagatcctggagctgctggagaagcaggcctgcgagctgctgaacagattccaggactag

SEQ ID NO: 105178 - DNA, 1731 bp, synthetic construct
  misc_feature 1..1731: note = Description of Artificial Sequence: Synthetic coding sequence
  source 1..1731: mol_type = other DNA
atgtgggcccccagatgcagaagattctggagcagatgggagcaggtggccgccctgctgctgctgctgctgctgctgggcgtgccccccagaagcctggccctgccccccatcagatacagccacgccggcatctgccccaacgacatgaaccccaacctgtgggtggacgcccagagcacctgcagaagagagtgcgagaccgaccaggagtgcgagacctacgagaagtgctgccccaacgtgtgcggcaccaagagctgcgtggccgccagatacatggacgtgaagggcaagaagggccccgtgggcatgcccaaggaggccacctgcgaccacttcatgtgcctgcagcagggcagcgagtgcgacatctgggacggccagcccgtgtgcaagtgcaaggacagatgcgagaaggagcccagcttcacctgcgccagcgacggcctgacctactacaacagatgctacatggacgccgaggcctgcagcaagggcatcaccctggccgtggtgacctgcagataccacttcacctggcccaacaccagcccccccccccccgagaccaccatgcaccccaccaccgccagccccgagacccccgagctggacatggccgcccccgccctgctgaacaaccccgtgcaccagagcgtgaccatgggcgagaccgtgagcttcctgtgcgacgtggtgggcagacccagacccgagatcacctgggagaagcagctggaggacagagagaacgtggtgatgagacccaaccacgtgagaggcaacgtggtggtgaccaacatcgcccagctggtgatctacaacgcccagctgcaggacgccggcatctacacctgcaccgccagaaacgtggccggcgtgctgagagccgacttccccctgagcgtggtgagaggccaccaggccgccgccaccagcgagagcagccccaacggcaccgccttccccgccgccgagtgcctgaagccccccgacagcgaggactgcggcgaggagcagaccagatggcacttcgacgcccaggccaacaactgcctgaccttcaccttcggccactgccacagaaacctgaaccacttcgagacctacgaggcctgcatgctggcctgcatgagcggccccctggccgcctgcagcctgcccgccctgcagggcccctgcaaggcctacgcccccagatgggcctacaacagccagaccggccagtgccagagcttcgtgtacggcggctgcgagggcaacggcaacaacttcgagagcagagaggcctgcgaggagagctgccccttccccagaggcaaccagagatgcagagcctgcaagcccagacagaagctggtgaccagcttctgcagaagcgacttcgtgatcctgggcagagtgagcgagctgaccgaggagcccgacagcggcagagccctggtgaccgtggacgaggtgctgaaggacgagaagatgggcctgaagttcctgggccaggagcccctggaggtgaccctgctgcacgtggactgggcctgcccctgccccaacgtgaccgtgagcgagatgcccctgatcatcatgggcgaggtggacggcggcatggccatgctgagacccgacagcttcgtgggcgccagcagcgccagaagagtgagaaagctgagagaggtgatgcacaagaagacctgcgacgtgctgaaggagttcctgggcctgcactag

SEQ ID NO: 105179 - DNA, 849 bp, synthetic construct
  misc_feature 1..849: note = Description of Artificial Sequence: Synthetic coding sequence
  source 1..849: mol_type = other DNA
atggacgtgaagggcaagaagggccccgtgggcatgcccaaggaggccacctgcgaccacttcatgtgcctgcagcagggcagcgagtgcgacatctgggacggccagcccgtgtgcaagtgcaaggacagatgcgagaaggagcccagcttcacctgcgcccaggccaacaactgcctgaccttcaccttcggccactgccacagaaacctgaaccacttcgagacctacgaggcctgcatgctggcctgcatgagcggccccctggccgcctgcagcctgcccgccctgcagggcccctgcaaggcctacgcccccagatgggcctacaacagccagaccggccagtgccagagcttcgtgtacggcggctgcgagggcaacggcaacaacttcgagagcagagaggcctgcgaggagagctgccccttccccagaggcaaccagagatgcagagcctgcaagcccagacagaagctggtgaccagcttctgcagaagcgacttcgtgatcctgggcagagtgagcgagctgaccgaggagcccgacagcggcagagccctggtgaccgtggacgaggtgctgaaggacgagaagatgggcctgaagttcctgggccaggagcccctggaggtgaccctgctgcacgtggactgggcctgcccctgccccaacgtgaccgtgagcgagatgcccctgatcatcatgggcgaggtggacggcggcatggccatgctgagacccgacagcttcgtgggcgccagcagcgccagaagagtgagaaagctgagagaggtgatgcacaagaagacctgcgacgtgctgaaggagttcctgggcctgcactag

SEQ ID NO: 105180 - DNA, 1509 bp, synthetic construct
  misc_feature 1..1509: note = Description of Artificial Sequence: Synthetic coding sequence
  source 1..1509: mol_type = other DNA
atgcccctggtgaagagaaacatcgagcccagacacctgtgcagaggcgccctgcccgagggcatcaccagcgagctggagtgcgtgaccaacagcaccctggccgccatcatcagacagctgagcagcctgagcaagcacgccgaggacatcttcggcgagctgttcaacgaggccaacaacttctacatcagagccaacagcctgcaggacagaatcgacagactggccgtgaaggtgacccagctggacagcaccgtggaggaggtgagcctgcaggacatcaacatgaagaaggccttcaagagcagcaccgtgcaggaccagcaggtggtgagcaagaacagcatccccaaccccgtggccgacatctacaaccagagcgacaagcccccccccctgaacatcctgaccccctacagagacgacaagaaggacggcctgaagttctacaccgaccccagctacttcttcgacctgtggaaggagaagatgctgcaggacaccgaggacaagagaaaggagaagagaagacagaaggagcagaagagaatcgacggcaccaccagagaggtgaagaaggtgagaaaggccagaaacagaagacaggagtggaacatgatggcctacgacaaggagctgagacccgacaacagactgagccagagcgtgtaccacggcgccagcagcgagggcagcctgagccccgacaccagaagccacgccagcgacgtgaccgactacagctaccccgccacccccaaccacagcctgcacccccagcccgtgacccccagctacgccgccggcgacgtgcccccccacggccccgccagccaggccgccgagcacgagtacagaccccccagcgccagcgccagacacatggccctgaacagaccccagcagccccccccccccccccccccccaggcccccgagggcagccaggccagcgcccccatggcccccgccgactacggcatgctgcccgcccagatcatcgagtactacaaccccagcggcccccccccccccccccccccccccgtgatccccagcgcccagaccgccttcgtgagccccctgcagatgcccatgcagccccccttccccgccagcgccagcagcacccacgccgcccccccccacccccccagcaccggcctgctggtgaccgccccccccccccccggcccccccccccccccccccggcccccccggccccggcagcagcctgagcagcagccccatgcacggcccccccgtggccgaggccaagagacaggagcccgcccagccccccatcagcgacgccagaagcgacctgctggccgccatcagaatgggcatccagctgaagaaggtgcaggagcagagagagcaggaggccaagagagagcccgtgggcaacgacgtggccaccatcctgagcagaagaatcgccgtggagtacagcgacagcgacgacgacagcgagttcgacgagaacgactggagcgactag

SEQ ID NO: 105181 - DNA, 1500 bp, synthetic construct
  misc_feature 1..1500: note = Description of Artificial Sequence: Synthetic coding sequence
  source 1..1500: mol_type = other DNA
atgcccctggtgaagagaaacatcgagcccagacacctgtgcagaggcgccctgcccgagggcatcaccagcgagctggagtgcgtgaccaacagcaccctggccgccatcatcagacagctgagcagcctgagcaagcacgccgaggacatcttcggcgagctgttcaacgaggccaacaacttctacatcagagccaacagcctgcaggacagaatcgacagactggccgtgaaggtgacccagctggacagcaccgtggaggaggtgagcctgcaggacatcaacatgaagaaggccttcaagagcagcaccgtgcaggaccagcaggtggtgagcaagaacagcatccccaaccccgtggccgacatctacaaccagagcgacaagcccccccccctgaacatcctgaccccctacagagacgacaagaaggacggcctgaagttctacaccgaccccagctacttcttcgacctgtggaaggagaagatgctgcaggacaccgaggacaagagaaaggagaagagaagacagaagagagagaagcacaagctgaaccccaacagaaaccagcaggtgaacgtgagaaaggtgagaaccagaaaggaggagtgggagagaagaaagatgggcatcgagttcatgagcgacgccaagaagctggagcaggccggcagcgccaaggaggacagagtgcccagcggcagccacgccagcgacgtgaccgactacagctaccccgccacccccaaccacagcctgcacccccagcccgtgacccccagctacgccgccggcgacgtgcccccccacggccccgccagccaggccgccgagcacgagtacagaccccccagcgccagcgccagacacatggccctgaacagaccccagcagccccccccccccccccccccccaggcccccgagggcagccaggccagcgcccccatggcccccgccgactacggcatgctgcccgcccagatcatcgagtactacaaccccagcggcccccccccccccccccccccccccgtgatccccagcgcccagaccgccttcgtgagccccctgcagatgcccatgcagccccccttccccgccagcgccagcagcacccacgccgcccccccccacccccccagcaccggcctgctggtgaccgccccccccccccccggcccccccccccccccccccggcccccccggccccggcagcagcctgagcagcagccccatgcacggcccccccgtggccgaggccaagagacaggagcccgcccagccccccatcagcgacgccagaagcgacctgctggccgccatcagaatgggcatccagctgaagaaggtgcaggagcagagagagcaggaggccaagagagagcccgtgggcaacgacgtggccaccatcctgagcagaagaatcgccgtggagtacagcgacagcgacgacgacagcgagttcgacgagaacgactggagcgactag

SEQ ID NO: 105182 - DNA, 786 bp, synthetic construct
  misc_feature 1..786: note = Description of Artificial Sequence: Synthetic coding sequence
  source 1..786: mol_type = other DNA
atggagggcggcctgggcagagccgtgtgcctgctgaccggcgccagcagaggcttcggcagaaccctggcccccctgctggccagcctgctgagccccggcagcgtgctggtgctgagcgccagaaacgacgaggccctgagacagctggaggccgagctgggcgccgagagaagcggcctgagagtggtgagagtgcccgccgacctgggcgccgaggccggcctgcagcagctgctgggcgccctgagagagctgcccagacccaagggcctgcagagactgctgctgatcaacaacgccggcagcctgggcgacgtgagcaagggcttcgtggacctgagcgacagcacccaggtgaacaactactgggccctgaacctgaccagcatgctgtgcctgaccagcagcgtgctgaaggccttccccgacagccccggcctgaacagaaccgtggtgaacatcagcagcctgtgcgccctgcagcccttcaagggctgggccctgtactgcgccggcaaggccgccagagacatgctgttccaggtgctggccctggaggagcccaacgtgagagtgctgaactacgcccccggccccctggacaccgacatgcagcagctggccagagagaccagcgtggaccccgacatgagaaagggcctgcaggagctgaaggccaagggcaagctggtggactgcaaggtgagcgcccagaagctgctgagcctgctggagaaggacgagttcaagagcggcgcccacgtggacttctacgacaagtag

SEQ ID NO: 105183 - DNA, 2430 bp, synthetic construct
  misc_feature 1..2430: note = Description of Artificial Sequence: Synthetic coding sequence
  source 1..2430: mol_type = other DNA
atggaggacgagcagcccgacagcctggagggctgggtgcccgtgagagagggcctgttcgccgagcccgagagacacagactgagattcctggtggcctggaacggcgccgagggcaagttcgccgtgacctgccacgacagaaccgcccagcagagaagactgagagagggcgccagactgggccccgagcccgagcccaagcccgaggccgccgtgagccccagcagctgggccggcctgctgagcgccgccggcctgagaggcgcccacagacagctggccgccctgtggccccccctggagagatgcttccccagactgccccccgagctggacgtgggcggcggcggcgcctggggcctgggcctgggcctgtgggccctgctgtggcccaccagagccggccccggcgaggccgccctgcaggagctgtgcggccagctggagagatacctgggcgccgccgccgacggctgcggcggcgccaccgtgagagacgccctgttccccgccgagggcggcgccgccgactgcgagagccccagagagttcagagagagagccctgagagccagatgggtggaggccgacgccagactgagacaggtgatccagggccacggcaaggccaacaccatggtggccctgatgaacgtgtaccaggaggaggacgaggcctaccaggagctggtgaccgtggccaccatgttcttccagtacctgctgcagcccttcagagccatgagagaggtggccaccctgtgcaagctggacatcctgaagagcctggacgaggacgacctgggccccagaagagtggtggccctggagaaggaggccgaggagtggaccagaagagccgaggaggccgtggtgagcatccaggacatcaccgtgaactacttcaaggagaccgtgaaggccctggccggcatgcagaaggagatggagcaggacgccaagagattcggccaggccgcctgggccaccgccatccccagactggagaagctgcagctgatgctggccagagagaccctgcagctgatgagagccaaggagctgtgcctgaaccacaagagagccgagatccagggcaagatggaggacctgcccgagcaggagaagaacaccaacgtggtggacgagctggagatccagttctacgagatccagctggagctgtacgaggtgaagttcgagatcctgaagaacgaggagatcctgctgaccacccagctggacagcctgaagagactgatcaaggagaagcaggacgaggtggtgtactacgacccctgcgagaaccccgaggagctgaaggtgatcgactgcgtggtgggcctgcaggacgacaagaacctggaggtgaaggagctgagaagacagtgccagcagctggagagcaagagaggcagaatctgcgccaagagagccagcctgagaagcagaaaggaccagtgcaaggagaaccacagattcagactgcagcaggccgaggagagcatcagatacagcagacagcaccacagcatccagatgaagagagacaagatcaaggaggaggagcagaagaagaaggagtggatcaaccaggagagacagaagaccctgcagagactgagaagcttcaaggacaagagactggcccagagcgtgagaaacaccagcggcagcgagcccgtggcccccaacctgcccagcgacctgagccagcagatgtgcctgcccgccagccacgccgtgagcgtgatccaccccagcagcagaaagaccagaggcgtgcccctgagcgaggccggcaacgtgaagagccccaagtgccagaactgccacggcaacatccccgtgcaggtgttcgtgcccgtgggcgaccagacccacagcaagagcagcgaggagctgagcctgccccccccccccccccccccccccccccccccccccccccccccccccccccccccccccctgagagccctgagcagcagcagccaggccgccacccaccagaacctgggcttcagagcccccgtgaaggacgaccagcccagacccctggtgtgcgagagccccgccgagagacccagagacagcctggagagcttcagctgccccggcagcatggacgaggtgctggccagcctgagacacggcagagcccccctgagaaaggtggaggtgcccgccgtgagacccccccacgccagcatcaacgagcacatcctggccgccatcagacagggcgtgaagctgaagaaggtgcaccccgacctgggccccaaccccagcagcaagcccaccagcaacagaagaaccagcgacctggagagaagcatcaaggccgccctgcagagaatcaagagagtgagcgccgacagcgaggaggacagcgacgagcaggaccccggccagtgggacggctag

SEQ ID NO: 105184 - DNA, 1452 bp, synthetic construct
  misc_feature 1..1452: note = Description of Artificial Sequence: Synthetic coding sequence
  source 1..1452: mol_type = other DNA
atgcccgtgcccccccccccccccccccccctgccccccccccccccccccctgggcgccccccccccccccccccccagcgccccccccgtgagcaccgacaccagcagcctgagaagagccgaccccaagggcagaagcgccctgctggccgacatccagcagggcaccagactgagaaaggtgacccagatcaacgacagaagcgccccccagatcgagagcagcaagggcaccaacaaggagggcggcggcagcgccaacaccagaggcgccagcaccccccccaccctgggcgacctgttcgccggcggcttccccgtgctgagacccgccggccagagagacgtggccggcggcaagaccggccagggccccggcagcagagcccccagccccagactgcccaacaagaccatcagcggccccctgatcccccccgccagccccagactgggcaacaccagcgaggcccacggcgccgccagaaccgccccccccagacccaacgtgcccgccccccccccccccacccccccccccccccccccccccctgcccccccccctgcccagcagcagccccatcaagacccccctggtgagcccccccggccccctgaccaagggcaacctgcccgtggtggccccccccgtgccctgcgccccccccccccccccccccccccccccccccacccccccccccctgccccccgccagcgtgctgagcgacaaggccgtgaagccccagctggcccccctgcacctgccccccatccccccccccctgcccctgctgcccccctgcggctaccccggcctgaaggccgagcccgccagccccgcccaggacgcccaggagccccccgccccccccccccccctgcccccctacgccagctgcagccccagagccagcctgcccgccccccccctgcccggcgtgaacagcagcagcgagacccccccccccctgccccccaagagccccagcttccaggcccccccccagaaggccggcgcccaggccctgcccgccccccccgccccccccggcagccagcccttcctgcagaagaagagacacggcagacccggcgccggcggcggcaagctgaaccccccccccgccccccccgccagaagccccaccaccgagctgagcagcaagagccagcaggccaccgcctggacccccacccagcagcccggcggccagctgagaaacggcagcctgcacatcatcgacgacttcgagagcaagttcaccttccacagcgtggaggacttccccccccccgacgagtacaagccctgccagaagatctaccccagcaagatccccagaagcagaacccccggcccctggctgcaggccgaggccgtgggccagagcagcgacgacatcaagggcagaaacagccagctgagcctgaagaccctgagatag

SEQ ID NO: 105185 - DNA, 1452 bp, synthetic construct
  misc_feature 1..1452: note = Description of Artificial Sequence: Synthetic coding sequence
  source 1..1452: mol_type = other DNA
atgcccgtgcccccccccccccccccccccctgccccccccccccccccccctgggcgccccccccccccccccccccagcgccccccccgtgagcaccgacaccagcagcctgagaagagccgaccccaagggcagaagcgccctgctggccgacatccagcagggcaccagactgagaaaggtgacccagatcaacgacagaagcgccccccagatcgagagcagcaagggcaccaacaaggagggcggcggcagcgccaacaccagaggcgccagcaccccccccaccctgggcgacctgttcgccggcggcttccccgtgctgagacccgccggccagagagacgtggccggcggcaagaccggccagggccccggcagcagagcccccagccccagactgcccaacaagaccatcagcggccccctgatcccccccgccagccccagactgggcaacaccagcgaggcccacggcgccgccagaaccgccccccccagacccaacgtgcccgccccccccccccccacccccccccccccccccccccccctgcccccccccctgcccagcagcagccccatcaagacccccctggtgagcccccccggccccctgaccaagggcaacctgcccgtggtggccccccccgtgccctgcgccccccccccccccccccccccccccccccccacccccccccccctgccccccgccagcgtgctgagcgacaaggccgtgaagccccagctggcccccctgcacctgccccccatccccccccccctgcccctgctgcccccctgcggctaccccggcctgaaggccgagcccgccagccccgcccaggacgcccaggagccccccgccccccccccccccctgcccccctacgccagctgcagccccagagccagcctgcccgccccccccctgcccggcgtgaacagcagcagcgagacccccccccccctgccccccaagagccccagcttccaggcccccccccagaaggccggcgcccaggccctgcccgccccccccgccccccccggcagccagcccttcctgcagaagaagagacacggcagacccggcgccggcggcggcaagctgaaccccccccccgccccccccgccagaagccccaccaccgagctgagcagcaagagccagcaggccaccgcctggacccccacccagcagcccggcggccagctgagaaacggcagcctgcacatcatcgacgacttcgagagcaagttcaccttccacagcgtggaggacttccccccccccgacgagtacaagccctgccagaagatctaccccagcaagatccccagaagcagaacccccggcccctggctgcaggccgaggccgtgggccagagcagcgacgacatcaagggcagaaacagccaggtgacccaggccagctgcctgtag

SEQ ID NO: 105186 - DNA, 1452 bp, synthetic construct; identical to SEQ ID NO: 105185
  misc_feature 1..1452: note = Description of Artificial Sequence: Synthetic coding sequence
  source 1..1452: mol_type = other DNA

SEQ ID NO: 105187 - DNA, 930 bp, synthetic construct
  misc_feature 1..930: note = Description of Artificial Sequence: Synthetic coding sequence
  source 1..930: mol_type = other DNA
atggccgtgaaccagagccacaccgagaacagaagaggcgccctgatccccaacggcgagagcctgctgaagagaagccccaacgtggagctgagcttcccccagagaagcgagggcagcaacgtgttcagcggcagaaagaccggcaccctgttcctgaccagctacagagtgatcttcatcaccagctgcagcatcagcgaccccatgctgagcttcatgatgcccttcgacctgatgaccaacctgaccgtggagcagcccgtgttcgccgccaacttcatcaagggcaccatccaggccgccccctacggcggctgggagggccaggccaccttcaagctggtgttcagaaacggcgacgccatcgagttcgcccagctgatggtgaaggccgccagcgccgccgccagaggcttccccctgagaaccctgaacgactggttcagcagcatgggcatctacgtgatcaccggcgagggcaacatgtgcaccccccagatgccctgcagcgtgatcgtgtacggcgccccccccgccggctacggcgcccccccccccggctacggcgccccccccgccggctacggcgcccagcccgtgggcaacgagggcccccccgtgggctacagagccagccccgtgagatacggcgccccccccctgggctacggcgccccccccgccggctacggcgccccccccctgggctacggcgccccccccctgggctacggcaccccccccctgggctacggcgccccccccctgggctacggcgccccccccgccggcaacgagggcccccccgccggctacagagccagccccgccggcagcggcgccagaccccaggagagcaccgccgcccaggcccccgagaacgaggccagcctgcccagcgccagcagcagccaggtgcacagctag

SEQ ID NO: 105188 - DNA, 930 bp, synthetic construct; identical to SEQ ID NO: 105187
  misc_feature 1..930: note = Description of Artificial Sequence: Synthetic coding sequence
  source 1..930: mol_type = other DNA

SEQ ID NO: 105189 - DNA, 930 bp, synthetic construct; identical to SEQ ID NO: 105187
  misc_feature 1..930: note = Description of Artificial Sequence: Synthetic coding sequence
  source 1..930: mol_type = other DNA

SEQ ID NO: 105190 - DNA, 708 bp, synthetic construct
  misc_feature 1..708: note = Description of Artificial Sequence: Synthetic coding sequence
  source 1..708: mol_type = other DNA
atgcccttcgacctgatgaccaacctgaccgtggagcagcccgtgttcgccgccaacttcatcaagggcaccatccaggccgccccctacggcggctgggagggccaggccaccttcaagctggtgttcagaaacggcgacgccatcgagttcgcccagctgatggtgaaggccgccagcgccgccgccagaggcttccccctgagaaccctgaacgactggttcagcagcatgggcatctacgtgatcaccggcgagggcaacatgtgcaccccccagatgccctgcagcgtgatcgtgtacggcgccccccccgccggctacggcgcccccccccccggctacggcgccccccccgccggctacggcgcccagcccgtgggcaacgagggcccccccgtgggctacagagccagccccgtgagatacggcgccccccccctgggctacggcgccccccccgccggctacggcgccccccccctgggctacggcgccccccccctgggctacggcaccccccccctgggctacggcgccccccccctgggctacggcgccccccccgccggcaacgagggcccccccgccggctacagagccagccccgccggcagcggcgccagaccccaggagagcaccgccgcccaggcccccgagaacgaggccagcctgcccagcgccagcagcagccaggtgcacagctag

SEQ ID NO: 105191 - DNA, 1401 bp, synthetic construct
  misc_feature 1..1401: note = Description of Artificial Sequence: Synthetic coding sequence
  source 1..1401: mol_type = other DNA
atgccctacgagatcaagaaggtgttcgccagcctgccccaggtggagagaggcgtgagcaagatcatcggcggcgaccccaagggcaacaacttcctgtacaccaacggcaagtgcgtgatcctgagaaacatcgacgaccacagcagattcgtgaactgcgtgagattcagccccgacggcaacagattcgccaccgccagcgccgacggccagatctacatctacgacggcaagaccggcgagaaggtgtgcgccctgggcggcagcaaggcccacgacggcggcatctacgccatcagctggagccccgacagcacccacctgctgagcgccagcggcgacaagaccagcaagatctgggacgtgagcgtgaacagcgtggtgagcaccttccccatgggcagcaccgtgctggaccagcagctgggctgcctgtggcagaaggaccacctgctgagcgtgagcctgagcggctacatcaactacctggacagaaacaaccccagcaagcccctgcacgtgatcaagggccacagcaagagcatccagtgcctgaccgtgcacaagaacggcggcaagagctacatctacagcggcagccacgacggccacatcaactactgggacagcgagaccggcgagaacgacagcttcgccggcaagggccacaccaaccaggtgagcagaatgaccgtggacgagagcggccagctgatcagctgcagcatggacgacaccgtgagatacaccagcctgatgctgagagactacagcggccagggcgtggtgaagctggacgtgcagcccaagtgcgtggccgtgggccccggcggctacgccgtggtggtgtgcatcggccagatcgtgctgctgaaggaccagagaaagtgcttcagcatcgacaaccccggctacgagcccgaggtggtggccgtgcaccccggcggcgacaccgtggccatcggcggcgtggacggcaacgtgagactgtacagcatcctgggcaccaccctgaaggacgagggcaagctgctggaggccaagggccccgtgaccgacgtggcctacagccacgacggcgccttcctggccgtgtgcgacgccagcaaggtggtgaccgtgttcagcgtggccgacggctacagcgagaacaacgtgttctacggccaccacgccaagatcgtgtgcctggcctggagccccgacaacgagcacttcgccagcggcggcatggacatgatggtgtacgtgtggaccctgagcgaccccgagaccagagtgaagatccaggacgcccacagactgcaccacgtgagcagcctggcctggctggacgagcacaccctggtgaccaccagccacgacgccagcgtgaaggagtggaccatcacctactag

SEQ ID NO: 105192 - DNA, 1821 bp, synthetic construct
  misc_feature 1..1821: note = Description of Artificial Sequence: Synthetic coding sequence
  source 1..1821: mol_type = other DNA
atgccctacgagatcaagaaggtgttcgccagcctgccccaggtggagagaggcgtgagcaagatcatcggcggcgaccccaagggcaacaacttcctgtacaccaacggcaagtgcgtgatcctgagaaacatcgacaaccccgccctggccgacatctacaccgagcacgcccaccaggtggtggtggccaagtacgcccccagcggcttctacatcgccagcggcgacgtgagcggcaagctgagaatctgggacaccacccagaaggagcacctgctgaagtacgagtaccagcccttcgccggcaagatcaaggacatcgcctggaccgaggacagcaagagaatcgccgtggtgggcgagggcagagagaagttcggcgccgtgttcctgtgggacagcggcagcagcgtgggcgagatcaccggccacaacaaggtgatcaacagcgtggacatcaagcagagcagaccctacagactggccaccggcagcgacgacaactgcgccgccttcttcgagggcccccccttcaagttcaagttcaccatcggcgaccacagcagattcgtgaactgcgtgagattcagccccgacggcaacagattcgccaccgccagcgccgacggccagatctacatctacgacggcaagaccggcgagaaggtgtgcgccctgggcggcagcaaggcccacgacggcggcatctacgccatcagctggagccccgacagcacccacctgctgagcgccagcggcgacaagaccagcaagatctgggacgtgagcgtgaacagcgtggtgagcaccttccccatgggcagcaccgtgctggaccagcagctgggctgcctgtggcagaaggaccacctgctgagcgtgagcctgagcggctacatcaactacctggacagaaacaaccccagcaagcccctgcacgtgatcaagggccacagcaagagcatccagtgcctgaccgtgcacaagaacggcggcaagagctacatctacagcggcagccacgacggccacatcaactactgggacagcgagaccggcgagaacgacagcttcgccggcaagggccacaccaaccaggtgagcagaatgaccgtggacgagagcggccagctgatcagctgcagcatggacgacaccgtgagatacaccagcctgatgctgagagactacagcggccagggcgtggtgaagctggacgtgcagcccaagtgcgtggccgtgggccccggcggctacgccgtggtggtgtgcatcggccagatcgtgctgctgaaggaccagagaaagtgcttcagcatcgacaaccccggctacgagcccgaggtggtggccgtgcaccccggcggcgacaccgtggccatcggcggcgtggacggcaacgtgagactgtacagcatcctgggcaccaccctgaaggacgagggcaagctgctggaggccaagggccccgtgaccgacgtggcctacagccacgacggcgccttcctggccgtgtgcgacgccagcaaggtggtgaccgtgttcagcgtggccgacggctacagcgagaacaacgtgttctacggccaccacgccaagatcgtgtgcctggcctggagccccgacaacgagcacttcgccagcggcggcatggacatgatggtgtacgtgtggaccctgagcgaccccgagaccagagtgaagatccaggacgcccacagactgcaccacgtgagcagcctggcctggctggacgagcacaccctggtgaccaccagccacgacgccagcgtgaaggagtggaccatcacctactag

SEQ ID NO: 105193 - DNA, 1326 bp, synthetic construct
  misc_feature 1..1326: note = Description of Artificial Sequence: Synthetic coding sequence
  source 1..1326: mol_type = other DNA
atgctgacctgggtgtggtacctgatcatgaccagcgtgctgcaggccagcgtgagcagcgtggaccacagcagattcgtgaactgcgtgagattcagccccgacggcaacagattcgccaccgccagcgccgacggccagatctacatctacgacggcaagaccggcgagaaggtgtgcgccctgggcggcagcaaggcccacgacggcggcatctacgccatcagctggagccccgacagcacccacctgctgagcgccagcggcgacaagaccagcaagatctgggacgtgagcgtgaacagcgtggtgagcaccttccccatgggcagcaccgtgctggaccagcagctgggctgcctgtggcagaaggaccacctgctgagcgtgagcctgagcggctacatcaactacctggacagaaacaaccccagcaagcccctgcacgtgatcaagggccacagcaagagcatccagtgcctgaccgtgcacaagaacggcggcaagagctacatctacagcggcagccacgacggccacatcaactactgggacagcgagaccggcgagaacgacagcttcgccggcaagggccacaccaaccaggtgagcagaatgaccgtggacgagagcggccagctgatcagctgcagcatggacgacaccgtgagatacaccagcctgatgctgagagactacagcggccagggcgtggtgaagctggacgtgcagcccaagtgcgtggccgtgggccccggcggctacgccgtggtggtgtgcatcggccagatcgtgctgctgaaggaccagagaaagtgcttcagcatcgacaaccccggctacgagcccgaggtggtggccgtgcaccccggcggcgacaccgtggccatcggcggcgtggacggcaacgtgagactgtacagcatcctgggcaccaccctgaaggacgagggcaagctgctggaggccaagggccccgtgaccgacgtggcctacagccacgacggcgccttcctggccgtgtgcgacgccagcaaggtggtgaccgtgttcagcgtggccgacggctacagcgagaacaacgtgttctacggccaccacgccaagatcgtgtgcctggcctggagccccgacaacgagcacttcgccagcggcggcatggacatgatggtgtacgtgtggaccctgagcgaccccgagaccagagtgaagatccaggacgcccacagactgcaccacgtgagcagcctggcctggctggacgagcacaccctggtgaccaccagccacgacgccagcgtgaaggagtggaccatcacctactag

SEQ ID NO: 105194 - DNA, 531 bp, synthetic construct
  misc_feature 1..531: note = Description of Artificial Sequence: Synthetic coding sequence
  source 1..531: mol_type = other DNA
cccgccgagaccgagaaggtgttcgccagcctgccccaggtggagagaggcgtgagcaagatcatcggcggcgaccccaagggcaacaacttcctgtacaccaacggcaagtgcgtgatcctgagaaacatcgacgaccacagcagattcgtgaactgcgtgagattcagccccgacggcaacagattcgccaccgccagcgccgacggccagtgcctgcccgcccccgtgaccgcccagagcagaagactgcccaacgccagccccgacatgcagaacctggacatcgccctgcccaccagcgccgacagcagcagcgagcccaagccccagagcatggagaagctgcccccctggagcgcccacttcccctgggcccccagattctggaccagcagctgggccgcctacggcagaagaaccacctgcagcgtgagcccctgccccggcaccagcaccatctggaccgagaccacccccgccagcccctgcaccagcagcagagtgaccgtgaacagaagcagcgtgtag

SEQ ID NO: 105195 - DNA, 1821 bp, synthetic construct; identical to SEQ ID NO: 105192
  misc_feature 1..1821: note = Description of Artificial Sequence: Synthetic coding sequence
  source 1..1821: mol_type = other DNA

SEQ ID NO: 105196 - DNA, 1401 bp, synthetic construct; identical to SEQ ID NO: 105191
  misc_feature 1..1401: note = Description of Artificial Sequence: Synthetic coding sequence
  source 1..1401: mol_type = other DNA

SEQ ID NO: 105197 - DNA, 3675 bp, synthetic construct
  misc_feature 1..3675: note = Description of Artificial Sequence: Synthetic coding sequence
  source 1..3675: mol_type = other DNA
atgctgccctacaccgtgaacttcaaggtgagcgccagaaccctgaccggcgccctgaacgcccacaacaaggccgccgtggactggggctggcagggcctgatcgcctacggctgccacagcctggtggtggtgatcgacagcatcaccgcccagaccctgcaggtgctggagaagcacaaggccgacgtggtgaaggtgaagtgggccagagagaactaccaccacaacatcggcagcccctactgcctgagactggccagcgccgacgtgaacggcaagatcatcgtgtgggacgtggccgccggcgtggcccagtgcgagatccaggagcacgccaagcccatccaggacgtgcagtggctgtggaaccaggacgccagcagagacctgctgctggccatccacccccccaactacatcgtgctgtggaacgccgacaccggcaccaagctgtggaagaagagctacgccgacaacatcctgagcttcagcttcgaccccttcgaccccagccacctgaccctgctgaccagcgagggcatcgtgttcatcagcgacttcagccccagcaagccccccagcggccccggcaagaaggtgtacatcagcagcccccacagcagccccgcccacaacaagctggccaccgccaccggcgccaagaaggccctgaacaaggtgaagatcctgatcacccaggagaagcccagcgccgagttcatcaccctgaacgactgcctgcagctggcctacctgcccagcaagagaaaccacatgctgctgctgtaccccagagagatcctgatcctggacctggaggtgaaccagaccgtgggcgtgatcgccatcgagagaaccggcgtgcccttcctgcaggtgatcccctgcttccagagagacggcctgttctgcctgcacgagaacggctgcatcaccctgagagtgagaagaagctacaacaacatcttcaccaccagcaacgaggagcccgaccccgaccccgtgcaggagctgacctacgacctgagaagccagtgcgacgccatcagagtgaccaagaccgtgagacccttcagcatggtgtgctgccccgtgaacgagaacgccgccgccctggtggtgagcgacggcagagtgatgatctgggagctgaagagcgccgtgtgcaacagaaacagcagaaacagcagcagcggcgtgagccccctgtacagccccgtgagcttctgcggcatccccgtgggcgtgctgcagaacaagctgcccgacctgagcctggacaacatgatcggccagagcgccatcgccggcgaggagcaccccagaggcagcatcctgagagaggtgcacctgaagttcctgctgaccggcctgctgagcggcctgcccgccccccagttcgccatcagaatgtgcccccccctgaccaccaagaacatcaagatgtaccagcccctgctggccgtgggcaccagcaacggcagcgtgctggtgtaccacctgaccagcggcctgctgcacaaggagctgagcatccacagctgcgaggtgaagggcatcgagtggaccagcctgaccagcttcctgagcttcgccaccagcacccccaacaacatgggcctggtgagaaacgagctgcagctggtggacctgcccaccggcagaagcatcgccttcagaggcgagagaggcaacgacgagagcgccatcgagatgatcaaggtgagccacctgaagcagtacctggccgtggtgttcagagacaagcccctggagctgtgggacgtgagaacctgcaccctgctgagagagatgagcaagaacttccccaccatcaccgccctggagtggagccccagccacaacctgaagagcctgagaaagaagcagctggccaccagagaggccatggccagacagaccgtggtgagcgacaccgagctgagcatcgtggagagcagcgtgatcagcctgctgcaggaggccgagagcaagagcgagctgagccagaacatcagcgccagagagcacttcgtgttcaccgacatcgacggccaggtgtaccacctgaccgtggagggcaacagcgtgaaggacagcgccagaatcccccccgacggcagcatgggcagcatcacctgcatcgcctggaagggcgacaccctggtgctgggcgacatggacggcaacctgaacttctgggacctgaagggcagagtgagcagaggcatccccacccacagaagctgggtgagaaagatcagattcgcccccggcaagggcaaccagaagctgatcgccatgtacaacgacggcgccgaggtgtgggacaccaaggaggtgcagatggtgagcagcctgagaagcggcagaaacgtgaccttcagaatcctggacgtggactggtgcaccagcgacaaggtgatcctggccagcgacgacggctgcatcagagtgctggagatgagcatgaagagcgcctgcttcagaatggacgagcaggagctgaccgagcccgtgtggtgcccctacctgctggtgcccagagccagcctggccctgaaggccttcctgctgcaccagccctggaacggccagtacagcctggacatcagccacgtggactaccccgagaacgaggagatcaagaacctgctgcaggagcagctgaacagcctgagcaacgacatcaagaagctgctgctggaccccgagttcaccctgctgcagagatgcctgctggtgagcagactgtacggcgacgagagcgagctgcacttctggaccgtggccgcccactacctgcacagcctgagccaggagaagagcgccagcaccaccgcccccaaggaggccgcccccagagacaagctgagcaaccccctggacatctgctacgacgtgctgtgcgagaacgcctacttccagaagttccagctggagagagtgaacctgcaggaggtgaagagaagcacctacgaccacaccagaaagtgcaccgaccagctgctgctgctgggccagaccgacagagccgtgcagctgctgctggagaccagcgccgacaaccagcactactactgcgacagcctgaaggcctgcctggtgaccaccgtgaccagcagcggccccagccagagcaccatcaagctggtggccaccaacatgatcgccaacggcaagctggccgagggcgtgcagctgctgtgcctgatcgacaaggccgccgacgcctgcagatacctgcagacctacggcgagtggaacagagccgcctggctggccaaggtgagactgaaccccgaggagtgcgccgacgtgctgagaagatgggtggaccacctgtgcagcccccaggtgaaccagaagagcaaggccctgctggtgctgctgagcctgggctgcttcttcagcgtggccgagaccctgcacagcatgagatacttcgacagagccgccctgttcgtggaggcctgcctgaagtacggcgccttcgaggtgaccgaggacaccgagaagctgatcaccgccatctacgccgactacgccagaagcctgaagaacctgggcttcaagcagggcgccgtgctgttcgccagcaaggccggcgccgccggcaaggacctgctgaacgagctggagagccccaaggaggagcccatcgaggagtag

SEQ ID NO: 105198 - DNA, 1371 bp, synthetic construct; identical to SEQ ID NO: 76677
  misc_feature 1..1371: note = Description of Artificial Sequence: Synthetic coding sequence
  source 1..1371: mol_type = other DNA

SEQ ID NO: 105199 - DNA, 1458 bp, synthetic construct; identical to SEQ ID NO: 92234
  misc_feature 1..1458: note = Description of Artificial Sequence: Synthetic coding sequence
  source 1..1458: mol_type = other DNA

SEQ ID NO: 105200 - DNA, 1893 bp, synthetic construct
  misc_feature 1..1893: note = Description of Artificial Sequence: Synthetic coding sequence
  source 1..1893: mol_type = other DNA
atggaggccgtggtgctgccctggcagatcttcggcgtgagagagctgcccgtggagagaggcgtgaccatgaagggccccagactgttcagagcccccggccacgtgcccaccggcctgaagtgccaccccgaccaggagcacatgatctaccccctgggctgcaccgtgctgatccaggccatcaacaccaaggagcagaacttcctgcagggccacggcaacaacgtgagctgcctggccatcagcagaagcggcgagtacatcgccagcggccaggtgaccttcatgggcttcaaggccgacatcatcctgtgggactacaagaacagagagctgctggccagactgagcctgcacaagggcaagatcgaggccctggccttcagccccaacgacctgtacctggtgagcctgggcggccccgacgacggcagcgtggtggtgtggagcatcgccaagagagacgccatctgcggcagccccgccgccggcctgaacgtgggcaacgccaccaacgtgatcttcagcagatgcagagacgagatgttcatgaccgccggcaacggcaccatcagagtgtgggagctggacctgcccaacagaaagatctggcccaccgagtgccagaccggccagctgaagagaatcgtgatgagcatcggcgtggacgacgacgacagcttcttctacctgggcaccaccaccggcgacatcctgaagatgaaccccagaaccaagctgctgaccgacgtgggccccgccaaggacaagttcagcctgggcgtgagcgccatcagatgcctgaagatgggcggcctgctggtgggcagcggcgccggcctgctggtgttctgcaagagccccggctacaagcccatcaagaagatccagctgcagggcggcatcaccagcatcaccctgagaggcgagggccaccagttcctggtgggcaccgaggagagccacatctacagagtgagcttcaccgacttcaaggagaccctgatcgccacctgccacttcgacgccgtggaggacatcgtgttccccttcggcaccgccgagctgttcgccacctgcgccaagaaggacatcagagtgtggcacaccagcagcaacagagagctgctgagaatcaccgtgcccaacatgacctgccacggcatcgacttcatgagagacggcaagagcatcatcagcgcctggaacgacggcaagatcagagccttcgcccccgagaccggcagactgatgtacgtgatcaacaacgcccacagaatcggcgtgaccgccatcgccaccaccagcgactgcaagagagtgatcagcggcggcggcgagggcgaggtgagagtgtggcagatcggctgccagacccagaagctggaggaggccctgaaggagcacaagagcagcgtgagctgcatcagagtgaagagaaacaacgaggagtgcgtgaccgccagcaccgacggcacctgcatcatctgggacctggtgagactgagaagaaaccagatgatcctggccaacaccctgttccagtgcgtgtgctaccaccccgaggagttccagatcatcaccagcggcaccgacagaaagatcgcctactgggaggtgttcgacggcaccgtgatcagagagctggagggcagcctgagcggcagcatcaacggcatggacatcacccaggagggcgtgcacttcgtgaccggcggcaacgaccacctggtgaaggtgtgggactacaacgagggcgaggtgacccacgtgggcgtgggccacagcggcaacatcaccagaatcagaatcagccccggcaaccagtacatcgtgagcgtgagcgccgacggcgccatcctgagatggaagtacccctacaccagctag

SEQ ID NO: 105201 - DNA, 1863 bp, synthetic construct
  misc_feature 1..1863: note = Description of Artificial Sequence: Synthetic coding sequence
  source 1..1863: mol_type = other DNA
atggacaacaagatcagccccgaggcccaggtggccgagctggagctggacgccgtgatcggcttcaacggccacgtgcccaccggcctgaagtgccaccccgaccaggagcacatgatctaccccctgggctgcaccgtgctgatccaggccatcaacaccaaggagcagaacttcctgcagggccacggcaacaacgtgagctgcctggccatcagcagaagcggcgagtacatcgccagcggccaggtgaccttcatgggcttcaaggccgacatcatcctgtgggactacaagaacagagagctgctggccagactgagcctgcacaagggcaagatcgaggccctggccttcagccccaacgacctgtacctggtgagcctgggcggccccgacgacggcagcgtggtggtgtggagcatcgccaagagagacgccatctgcggcagccccgccgccggcctgaacgtgggcaacgccaccaacgtgatcttcagcagatgcagagacgagatgttcatgaccgccggcaacggcaccatcagagtgtgggagctggacctgcccaacagaaagatctggcccaccgagtgccagaccggccagctgaagagaatcgtgatgagcatcggcgtggacgacgacgacagcttcttctacctgggcaccaccaccggcgacatcctgaagatgaaccccagaaccaagctgctgaccgacgtgggccccgccaaggacaagttcagcctgggcgtgagcgccatcagatgcctgaagatgggcggcctgctggtgggcagcggcgccggcctgctggtgttctgcaagagccccggctacaagcccatcaagaagatccagctgcagggcggcatcaccagcatcaccctgagaggcgagggccaccagttcctggtgggcaccgaggagagccacatctacagagtgagcttcaccgacttcaaggagaccctgatcgccacctgccacttcgacgccgtggaggacatcgtgttccccttcggcaccgccgagctgttcgccacctgcgccaagaaggacatcagagtgtggcacaccagcagcaacagagagctgctgagaatcaccgtgcccaacatgacctgccacggcatcgacttcatgagagacggcaagagcatcatcagcgcctggaacgacggcaagatcagagccttcgcccccgagaccggcagactgatgtacgtgatcaacaacgcccacagaatcggcgtgaccgccatcgccaccaccagcgactgcaagagagtgatcagcggcggcggcgagggcgaggtgagagtgtggcagatcggctgccagacccagaagctggaggaggccctgaaggagcacaagagcagcgtgagctgcatcagagtgaagagaaacaacgaggagtgcgtgaccgccagcaccgacggcacctgcatcatctgggacctggtgagactgagaagaaaccagatgatcctggccaacaccctgttccagtgcgtgtgctaccaccccgaggagttccagatcatcaccagcggcaccgacagaaagatcgcctactgggaggtgttcgacggcaccgtgatcagagagctggagggcagcctgagcggcagcatcaacggcatggacatcacccaggagggcgtgcacttcgtgaccggcggcaacgaccacctggtgaaggtgtgggactacaacgagggcgaggtgacccacgtgggcgtgggccacagcggcaacatcaccagaatcagaatcagccccggcaaccagtacatcgtgagcgtgagcgccgacggcgccatcctgagatggaagtacccctacaccagctag

SEQ ID NO: 105202 - DNA, 1659 bp, synthetic construct
  misc_feature 1..1659: note = Description of Artificial Sequence: Synthetic coding sequence
  source 1..1659: mol_type = other DNA
atggacaacaagatcagccccgaggcccaggtggccgagctggagctggacgccgtgatcggcttcaacgacatcatcctgtgggactacaagaacagagagctgctggccagactgagcctgcacaagggcaagatcgaggccctggccttcagccccaacgacctgtacctggtgagcctgggcggccccgacgacggcagcgtggtggtgtggagcatcgccaagagagacgccatctgcggcagccccgccgccggcctgaacgtgggcaacgccaccaacgtgatcttcagcagatgcagagacgagatgttcatgaccgccggcaacggcaccatcagagtgtgggagctggacctgcccaacagaaagatctggcccaccgagtgccagaccggccagctgaagagaatcgtgatgagcatcggcgtggacgacgacgacagcttcttctacctgggcaccaccaccggcgacatcctgaagatgaaccccagaaccaagctgctgaccgacgtgggccccgccaaggacaagttcagcctgggcgtgagcgccatcagatgcctgaagatgggcggcctgctggtgggcagcggcgccggcctgctggtgttctgcaagagccccggctacaagcccatcaagaagatccagctgcagggcggcatcaccagcatcaccctgagaggcgagggccaccagttcctggtgggcaccgaggagagccacatctacagagtgagcttcaccgacttcaaggagaccctgatcgccacctgccacttcgacgccgtggaggacatcgtgttccccttcggcaccgccgagctgttcgccacctgcgccaagaaggacatcagagtgtggcacaccagcagcaacagagagctgctgagaatcaccgtgcccaacatgacctgccacggcatcgacttcatgagagacggcaagagcatcatcagcgcctggaacgacggcaagatcagagccttcgcccccgagaccggcagactgatgtacgtgatcaacaacgcccacagaatcggcgtgaccgccatcgccaccaccagcgactgcaagagagtgatcagcggcggcggcgagggcgaggtgagagtgtggcagatcggctgccagacccagaagctggaggaggccctgaaggagcacaagagcagcgtgagctgcatcagagtgaagagaaacaacgaggagtgcgtgaccgccagcaccgacggcacctgcatcatctgggacctggtgagactgagaagaaaccagatgatcctggccaacaccctgttccagtgcgtgtgctaccaccccgaggagttccagatcatcaccagcggcaccgacagaaagatcgcctactgggaggtgttcgacggcaccgtgatcagagagctggagggcagcctgagcggcagcatcaacggcatggacatcacccaggagggcgtgcacttcgtgaccggcggcaacgaccacctggtgaaggtgtgggactacaacgagggcgaggtgacccacgtgggcgtgggccacagcggcaacatcaccagaatcagaatcagccccggcaaccagtacatcgtgagcgtgagcgccgacggcgccatcctgagatggaagtacccctacaccagctag

SEQ ID NO: 105203 - DNA, 3969 bp, synthetic construct
  misc_feature 1..3969: note = Description of Artificial Sequence: Synthetic coding sequence
  source 1..3969: mol_type = other DNA
atggcctggatgacctacatcagcaactggttcgagcaggacgactggtacgagggcctgcagagagccaacatgagccaggtgagacaggtgggcctgctggccgccggctgccagccctggaacaaggacgtgtgcgccgccagcggcgacagattcgcctactgcgccaccctggccatctacatctaccagctggaccacagatacaacgagttcaagctgcacgccatcatgagcgagcacaagaagaccatcaccgccatcagctggtgcccccacaaccccgacctgttcgccagcggcagcaccgacaacctggtgatcatctggaacgtggccgagcagaaggtgatcgccaagctggacagcaccaagggcatccccgccagcctgagctggtgctggaacgccgaggacgtggtggccttcgtgagccacagaggccccctgttcatctggaccatcagcggccccgacagcggcgtgatcgtgcacaaggacgcccacagcttcctgagcgacatctgcatgttcagatggcacacccaccagaagggcaaggtggtgttcggccacatcgacggcagcctgagcatcttccaccccggcaacaagaaccagaagcacgtgctgagacccgagagcctggagggcaccgacgaggaggaccccgtgaccgccctggagtgggaccccctgagcaccgactacctgctggtggtgaacctgcactacggcatcagactggtggacagcgagagcctgagctgcatcaccaccttcaacctgcccagcgccgccgccagcgtgcagtgcctggcctgggtgcccagcgcccccggcatgttcatcaccggcgacagccaggtgggcgtgctgagaatctggaacgtgagcagaaccacccccatcgacaacctgaagctgaagaagaccggcttccactgcctgcacgtgctgaacagcccccccagaaagaagttcagcgtgcagagccccaccaagaaccactacaccagcagcaccagcgaggccgtgcccccccccaccctgacccagaaccaggccttcagcctgccccccggccacgccgtgtgctgcttcctggacggcggcgtgggcctgtacgacatgggcgccaagaagtgggacttcctgagagacctgggccacgtggagaccatcttcgactgcaagttcaagcccgacgaccccaacctgctggccaccgccagcttcgacggcaccatcaaggtgtgggacatcaacaccctgaccgccgtgtacaccagccccggcaacgagggcgtgatctacagcctgagctgggcccccggcggcctgaactgcatcgccggcggcaccagcagaaacggcgccttcatctggaacgtgcagaagggcaagatcatccagagattcaacgagcacggcaccaacggcatcttctgcatcgcctggagccacaaggacagcaagagaatcgccacctgcagcagcgacggcttctgcatcatcagaaccatcgacggcaaggtgctgcacaagtacaagcaccccgccgccgtgttcggctgcgactggagccagaacaacaaggacatgatcgccaccggctgcgaggacaccaacgtgagagtgtactacgtggccaccagcagcgaccagcccctgaaggtgttcagcggccacaccgccaaggtgttccacgtgaagtggagccccctgagagagggcatcctgtgcagcggcagcgacgacggcaccgtgagaatctgggactacacccaggacgcctgcatcaacatcctgaacggccacaccgcccccgtgagaggcctgatgtggaacaccgagatcccctacctgctgatcagcggcagctgggactacaccatcaaggtgtgggacaccagagagggcacctgcgtggacaccgtgtacgaccacggcgccgacgtgtacggcctgacctgccaccccagcagacccttcaccatggccagctgcagcagagacagcaccgtgagactgtggagcctgaccgccctggtgacccccgtgcagatcaacatcctggccgacagaagctgggaggagatcatcggcaacaccgactacgccatcgagcccggcaccccccccctgctgtgcggcaaggtgagcagagacatcagacaggagatcgagaagctgaccgccaacagccaggtgaagaagctgagatggttcagcgagtgcctgagcccccccggcggcagcgacaacctgtggaacctggtggccgtgatcaagggccaggacgacagcctgctgccccagaactactgcaagggcatcatgcacctgaagcacctgatcaagttcagaaccagcgaggcccaggagctgaccaccgtgaagatgagcaagttcggcggcggcatcggcgtgcccgccaaggaggagagactgaaggaggccgccgagatccacctgagactgggccagatccagagatactgcgagctgatggtggagctgggcgagtgggacaaggccctgagcatcgcccccggcgtgagcgtgaagtactggaagaagctgatgcagagaagagccgaccagctgatccaggaggacaaggacgacgtgatcccctactgcatcgccatcggcgacgtgaagaagctggtgcacttcttcatgagcagaggccagctgaaggaggccctgctggtggcccaggccgcctgcgagggcaacatgcagcccctgcacgtgagcgtgcccaagggcgccagctacagcgacgacatctacaaggaggacttcaacgagctgctgcacaaggtgagcaaggagctggccgagtggtacttccaggacggcagagccgtgctggccgcctgctgccacctggccatcgacaacatcgagctggccatggcctacctgatcagaggcaacgagctggagctggccgtgtgcgtgggcaccgtgctgggcgagagcgccgcccccgccacccactacgccctggagctgctggccagaaagtgcatgatgatcagcgtgtgcttcccctgcgtgggctacagcgtgcccttctgctacgtgaacagaaacctggccgccgacctgctgctgatgatccccgacaacgagctgcacctgatcaagctgtgcgccttctaccccggctgcaccgaggagatcaacgacctgcacgacaagtgcaagctgcccaccgtggaggagtgcatgcagctggccgagaccgccagagccgacgacaacatcttcgagaccgtgaagtactacctgctgagccaggagcccgagaaggccctgcccatcggcatcagcttcgtgaaggagtacatcagcagcagcgactggaccctggacaccatctaccccgtgctggacctgctgagctacatcagaaccgagaagctgctgctgcacacctgcaccgaggccagaaacgagctgctgatcctgtgcggctacatcggcgccctgctggccatcagaagacagtaccagagcatcgtgcccgccctgtacgagtacaccagccagctgctgaagagaagagaggtgagcgtgcccctgaagatcgagtacctgagcgaggagctggacgcctggagagcctgcacccagagcaccaacagaagcctggaggacagcccctacaccccccccagcgacagccagagaatgatctacgccaccctgctgaagagactgaaggaggagagcctgaagggcatcatcggccccgactacgtgaccggcagcaacctgcccagccacagcgacatccacatcagctgcctgaccggcctgaagatccagggccccgtgttcttcctggaggacggcaagagcgccatcagcctgaacgacgccctgatgtgggccaaggtgaaccccttcagccccctgggcaccggcatcagactgaaccccttctag

SEQ ID NO: 105204 - DNA, 393 bp, synthetic construct
  misc_feature 1..393: note = Description of Artificial Sequence: Synthetic coding sequence
  source 1..393: mol_type = other DNA
atgagccaggtgagacaggtgggcctgctggccgccggctgccagccctggaacaaggacgtgtgcgccgccagcggcgacagattcgcctactgcgccaccctggccatctacatctaccagctggaccacagatacaacgagttcaagctgcacgccatcatgagcgagcacaagaagaccatcaccgccatcagctggtgcccccacaaccccgacctgttcgccagcggcagcaccgacaacctggtgatcatctggaacgtggccgagcagaaggtgatcgccaagctggacagagccagaccccccagccccaagatcatctacatcaagatcatcaacatcatcgaggagaacatccacaacagcgagatgcagtggatcatctag

SEQ ID NO: 105205 - DNA, 3897 bp, synthetic construct
  misc_feature 1..3897: note = Description of Artificial Sequence: Synthetic coding sequence
  source 1..3897: mol_type = other DNA
atgagccaggtgagacaggtgggcctgctggccgccggctgccagccctggaacaaggacgtgtgcgccgccagcggcgacagattcgcctactgcgccaccctggccatctacatctaccagctggaccacagatacaacgagttcaagctgcacgccatcatgagcgagcacaagaagaccatcaccgccatcagctggtgcccccacaaccccgacctgttcgccagcggcagcaccgacaacctggtgatcatctggaacgtggccgagcagaaggtgatcgccaagctggacagcaccaagggcatccccgccagcctgagctggtgctggaacgccgaggacgtggtggccttcgtgagccacagaggccccctgttcatctggaccatcagcggccccgacagcggcgtgatcgtgcacaaggacgcccacagcttcctgagcgacatctgcatgttcagatggcacacccaccagaagggcaaggtggtgttcggccacatcgacggcagcctgagcatcttccaccccggcaacaagaaccagaagcacgtgctgagacccgagagcctggagggcaccgacgaggaggaccccgtgaccgccctggagtgggaccccctgagcaccgactacctgctggtggtgaacctgcactacggcatcagactggtggacagcgagagcctgagctgcatcaccaccttcaacctgcccagcgccgccgccagcgtgcagtgcctggcctgggtgcccagcgcccccggcatgttcatcaccggcgacagccaggtgggcgtgctgagaatctggaacgtgagcagaaccacccccatcgacaacctgaagctgaagaagaccggcttccactgcctgcacgtgctgaacagcccccccagaaagaagttcagcgtgcagagccccaccaagaaccactacaccagcagcaccagcgaggccgtgcccccccccaccctgacccagaaccaggccttcagcctgccccccggccacgccgtgtgctgcttcctggacggcggcgtgggcctgtacgacatgggcgccaagaagtgggacttcctgagagacctgggccacgtggagaccatcttcgactgcaagttcaagcccgacgaccccaacctgctggccaccgccagcttcgacggcaccatcaaggtgtgggacatcaacaccctgaccgccgtgtacaccagccccggcaacgagggcgtgatctacagcctgagctgggcccccggcggcctgaactgcatcgccggcggcaccagcagaaacggcgccttcatctggaacgtgcagaagggcaagatcatccagagattcaacgagcacggcaccaacggcatcttctgcatcgcctggagccacaaggacagcaagagaatcgccacctgcagcagcgacggcttctgcatcatcagaaccatcgacggcaaggtgctgcacaagtacaagcaccccgccgccgtgttcggctgcgactggagccagaacaacaaggacatgatcgccaccggctgcgaggacaccaacgtgagagtgtactacgtggccaccagcagcgaccagcccctgaaggtgttcagcggccacaccgccaaggtgttccacgtgaagtggagccccctgagagagggcatcctgtgcagcggcagcgacgacggcaccgtgagaatctgggactacacccaggacgcctgcatcaacatcctgaacggccacaccgcccccgtgagaggcctgatgtggaacaccgagatcccctacctgctgatcagcggcagctgggactacaccatcaaggtgtgggacaccagagagggcacctgcgtggacaccgtgtacgaccacggcgccgacgtgtacggcctgacctgccaccccagcagacccttcaccatggccagctgcagcagagacagcaccgtgagactgtggagcctgaccgccctggtgacccccgtgcagatcaacatcctggccgacagaagctgggaggagatcatcggcaacaccgactacgccatcgagcccggcaccccccccctgctgtgcggcaaggtgagcagagacatcagacaggagatcgagaagctgaccgccaacagccaggtgaagaagctgagatggttcagcgagtgcctgagcccccccggcggcagcgacaacctgtggaacctggtggccgtgatcaagggccaggacgacagcctgctgccccagaactactgcaagggcatcatgcacctgaagcacctgatcaagttcagaaccagcgaggcccaggagctgaccaccgtgaagatgagcaagttcggcggcggcatcggcgtgcccgccaaggaggagagactgaaggaggccgccgagatccacctgagactgggccagatccagagatactgcgagctgatggtggagctgggcgagtgggacaaggccctgagcatcgcccccggcgtgagcgtgaagtactggaagaagctgatgcagagaagagccgaccagctgatccaggaggacaaggacgacgtgatcccctactgcatcgccatcggcgacgtgaagaagctggtgcacttcttcatgagcagaggccagctgaaggaggccctgctggtggcccaggccgcctgcgagggcaacatgcagcccctgcacgtgagcgtgcccaagggcgccagctacagcgacgacatctacaaggaggacttcaacgagctgctgcacaaggtgagcaaggagctggccgagtggtacttccaggacggcagagccgtgctggccgcctgctgccacctggccatcgacaacatcgagctggccatggcctacctgatcagaggcaacgagctggagctggccgtgtgcgtgggcaccgtgctgggcgagagcgccgcccccgccacccactacgccctggagctgctggccagaaagtgcatgatgatcagcgtgtgcttcccctgcgtgggctacagcgtgcccttctgctacgtgaacagaaacctggccgccgacctgctgctgatgatccccgacaacgagctgcacctgatcaagctgtgcgccttctaccccggctgcaccgaggagatcaacgacctgcacgacaagtgcaagctgcccaccgtggaggagtgcatgcagctggccgagaccgccagagccgacgacaacatcttcgagaccgtgaagtactacctgctgagccaggagcccgagaaggccctgcccatcggcatcagcttcgtgaaggagtacatcagcagcagcgactggaccctggacaccatctaccccgtgctggacctgctgagctacatcagaaccgagaagctgctgctgcacacctgcaccgaggccagaaacgagctgctgatcctgtgcggctacatcggcgccctgctggccatcagaagacagtaccagagcatcgtgcccgccctgtacgagtacaccagccagctgctgaagagaagagaggtgagcgtgcccctgaagatcgagtacctgagcgaggagctggacgcctggagagcctgcacccagagcaccaacagaagcctggaggacagcccctacaccccccccagcgacagccagagaatgatctacgccaccctgctgaagagactgaaggaggagagcctgaagggcatcatcggccccgactacgtgaccggcagcaacctgcccagccacagcgacatccacatcagctgcctgaccggcctgaagatccagggccccgtgttcttcctggaggacggcaagagcgccatcagcctgaacgacgccctgatgtgggccaaggtgaaccccttcagccccctgggcaccggcatcagactgaaccccttctag

SEQ ID NO: 105206 - DNA, 3852 bp, synthetic construct
  misc_feature 1..3852: note = Description of Artificial Sequence: Synthetic coding sequence
  source 1..3852: mol_type = other DNA
atgagccaggtgagacaggtgggcctgctggccgccggctgccagccctggaacaaggacgtgtgcgccgccagcggcgacagattcgcctactgcgccaccctggccatctacatctaccagctggaccacagatacaacgagttcaagctgcacgccatcatgagcgagcacaagaagaccatcaccgccatcagctggtgcccccacaaccccgacctgttcgccagcggcagcaccgacaacctggtgatcatctggaacgtggccgagcagaaggtgatcgccaagctggacagcaccaagggcatccccgccagcctgagctggtgctggaacgccgaggacgtggtggccttcgtgagccacagaggccccctgttcatctggaccatcagcggccccgacagcggcgtgatcgtgcacaaggacgcccacagcttcctgagcgacatctgcatgttcagatggcacacccaccagaagggcaaggtggtgttcggccacatcgacggcagcctgagcatcttccaccccggcaacaagaaccagaagcacgtgctgagacccgagagcctggagggcaccgacgaggaggaccccgtgaccgccctggagtgggaccccctgagcaccgactacctgctggtggtgaacctgcactacggcatcagactggtggacagcgagagcctgagctgcatcaccaccttcaacctgcccagcgccgccgccagcgtgcagtgcctggcctgggtgcccagcgcccccggcatgttcatcaccggcgacagccaggtgggcgtgctgagaatctggaacgtgagcagaaccacccccatcgacaacctgaagctgaagaagaccggcttccactgcctgcacgtgctgaacagcccccccagaaagaagttcagcgtgcagagccccaccaagaaccactacaccagcagcaccagcgaggccgtgcccccccccaccctgacccagaaccaggccttcagcctgccccccggccacgccgtgtgctgcttcctggacggcggcgtgggcctgtacgacatgggcgccaagaagtgggacttcctgagagacctgggccacgtggagaccatcttcgactgcaagttcaagcccgacgaccccaacctgctggccaccgccagcttcgacggcaccatcaaggtgtgggacatcaacaccctgaccgccgtgtacaccagccccggcaacgagggcgtgatctacagcctgagctgggcccccggcggcctgaactgcatcgccggcggcaccagcagaaacggcgccttcatctggaacgtgcagaagggcaagatcatccagagattcaacgagcacggcaccaacggcatcttctgcatcgcctggagccacaaggacagcaagagaatcgccacctgcagcagcgacggcttctgcatcatcagaaccatcgacggcaaggtgctgcacaagtacaagcaccccgccgccgtgttcggctgcgactggagccagaacaacaaggacatgatcgccaccggctgcgaggacaccaacgtgagagtgtactacgtggccaccagcagcgaccagcccctgaaggtgttcagcggccacaccgccaaggtgttccacgtgaagtggagccccctgagagagggcatcctgtgcagcggcagcgacgacggcaccgtgagaatctgggactacacccaggacgcctgcatcaacatcctgaacggccacaccgcccccgtgagaggcctgatgtggaacaccgagatcccctacctgctgatcagcggcagctgggactacaccatcaaggtgtgggacaccagagagggcacctgcgtggacaccgtgtacgaccacggcgccgacgtgtacggcctgacctgccaccccagcagacccttcaccatggccagctgcagcagagacagcaccgtgagactgtggagcctgaccgccctggtgacccccgtgcagatcaacatcctggccgacagaagctgggaggagatcatcggcaacaccgactacgccatcgagcccggcaccccccccctgctgtgcggcaaggtgagcagagacatcagacaggagatcgagaagctgaccgccaacagccaggtgaagaagctgagatggttcagcgagtgcctgagcccccccggcggcagcgacaacctgtggaacctggtggccgtgatcaagggccaggacgacagcctgctgccccagaactactgcaagggcatcatgcacctgaagcacctgatcaagttcagaaccagcgaggcccaggagctgaccaccgtgaagatgagcaagttcggcggcggcatcggcgtgcccgccaaggaggagagactgaaggaggccgccgagatccacctgagactgggccagatccagagatactgcgagctgatggtggagctgggcgagtgggacaaggccctgagcatcgcccccggcgtgagcgtgaagtactggaagaagctgatgcagagaagagccgaccagctgatccaggaggacaaggacgacgtgatcccctactgcatcgccatcggcgacgtgaagaagctggtgcacttcttcatgagcagaggccagctgaaggaggccctgctggtggcccaggccgcctgcgagggcaacatgcagcccctgcacgtgagcgtgcccaagggcgccagctacagcgacgacatctacaaggaggacttcaacgagctgctgcacaaggtgagcaaggagctggccgagtggtacttccaggacggcagagccgtgctggccgcctgctgccacctggccatcgacaacatcgagctggccatggcctacctgatcagaggcaacgagctggagctggccgtgtgcgtgggcaccgtgctgggcgagagcgccgcccccgccacccactacgccctggagctgctggccagaaagtgcatgatgatcagcgtgtggaacctggccgccgacctgctgctgatgatccccgacaacgagctgcacctgatcaagctgtgcgccttctaccccggctgcaccgaggagatcaacgacctgcacgacaagtgcaagctgcccaccgtggaggagtgcatgcagctggccgagaccgccagagccgacgacaacatcttcgagaccgtgaagtactacctgctgagccaggagcccgagaaggccctgcccatcggcatcagcttcgtgaaggagtacatcagcagcagcgactggaccctggacaccatctaccccgtgctggacctgctgagctacatcagaaccgagaagctgctgctgcacacctgcaccgaggccagaaacgagctgctgatcctgtgcggctacatcggcgccctgctggccatcagaagacagtaccagagcatcgtgcccgccctgtacgagtacaccagccagctgctgaagagaagagaggtgagcgtgcccctgaagatcgagtacctgagcgaggagctggacgcctggagagcctgcacccagagcaccaacagaagcctggaggacagcccctacaccccccccagcgacagccagagaatgatctacgccaccctgctgaagagactgaaggaggagagcctgaagggcatcatcggccccgactacgtgaccggcagcaacctgcccagccacagcgacatccacatcagctgcctgaccggcctgaagatccagggccccgtgttcttcctggaggacggcaagagcgccatcagcctgaacgacgccctgatgtgggccaaggtgaaccccttcagccccctgggcaccggcatcagactgaaccccttctag

SEQ ID NO: 105207 - DNA, 3549 bp, synthetic construct
  misc_feature 1..3549: note = Description of Artificial Sequence: Synthetic coding sequence
  source 1..3549: mol_type = other DNA
atgatcaccgtgagcaaccaggagggcgacaccatcagacagacccaggtgagaagcgagcccagcaacatgcagttcttcctgatgaagatggacgacagaaccagcgccgccgagagcatgatcagcgtggtgctgggcaagaagaccctgttcttcctgaacctgaacgagcccgacaaccccgccgacctggagttccagcaggacttcggcaacatcgtgtgctacaactggtacggcgacggcagaatcatgatcggcttcagctgcggccacttcgtggtgatcagcacccacaccggcgagctgggccaggagatcttccaggccagaaaccacaaggacaacctgaccagcatcgccgtgagccagaccctgaacaaggtggccacctgcggcgacaactgcatcaagatccaggacctggtggacctgaaggacatgtacgtgatcctgaacctggacgaggagaacaagggcctgggcaccctgagctggaccgacgacggccagctgctggccctgagcacccagagaggcagcctgcacgtgttcctgaccaagctgcccatcctgggcgacgcctgcagcaccagaatcgcctacctgaccagcctgctggaggtgaccgtggccaaccccgtggagggcgagctgcccatcaccgtgagcgtggacgtggagcccaacttcgtggccgtgggcctgtaccacctggccgtgggcatgaacaacagagcctggttctacgtgctgggcgagaacgccgtgaagaagctgaaggacatggagtacctgggcaccgtggccagcatctgcctgcacagcgactacgccgccgccctgttcgagggcaaggtgcagctgcacctgatcgagagcgagatcctggacgcccaggaggagagagagaccagactgttccccgccgtggacgacaagtgcagaatcctgtgccacgccctgaccagcgacttcctgatctacggcaccgacaccggcgtggtgcagtacttctacatcgaggactggcagttcgtgaacgactacagacaccccgtgagcgtgaagaagatcttccccgaccccaacggcaccagactggtgttcatcgacgagaagagcgacggcttcgtgtactgccccgtgaacgacgccacctacgagatccccgacttcagccccaccatcaagggcgtgctgtgggagaactggcccatggacaagggcgtgttcatcgcctacgacgacgacaaggtgtacacctacgtgttccacaaggacaccatccagggcgccaaggtgatcctggccggcagcaccaaggtgcccttcgcccacaagcccctgctgctgtacaacggcgagctgacctgccagacccagagcggcaaggtgaacaacatctacctgagcacccacggcttcctgagcaacctgaaggacaccggccccgacgagctgagacccatgctggcccagaacctgatgctgaagagattcagcgacgcctgggagatgtgcagaatcctgaacgacgaggccgcctggaacgagctggccagagcctgcctgcaccacatggaggtggagttcgccatcagagtgtacagaagaatcggcaacgtgggcatcgtgatgagcctggagcagatcaagggcatcgaggactacaacctgctggccggccacctggccatgttcaccaacgactacaacctggcccaggacctgtacctggccagcagctgccccatcgccgccctggagatgagaagagacctgcagcactgggacagcgccctgcagctggccaagcacctggcccccgaccagatccccttcatcagcaaggagtacgccatccagctggagttcgccggcgactacgtgaacgccctggcccactacgagaagggcatcaccggcgacaacaaggagcacgacgaggcctgcctggccggcgtggcccagatgagcatcagaatgggcgacatcagaagaggcgtgaaccaggccctgaagcaccccagcagagtgctgaagagagactgcggcgccatcctggagaacatgaagcagttcagcgaggccgcccagctgtacgagaagggcctgtactacgacaaggccgccagcgtgtacatcagaagcaagaactgggccaaggtgggcgacctgctgccccacgtgagcagccccaagatccacctgcagtacgccaaggccaaggaggccgacggcagatacaaggaggccgtggtggcctacgagaacgccaagcagtggcagagcgtgatcagaatctacctggaccacctgaacaaccccgagaaggccgtgaacatcgtgagagagacccagagcctggacggcgccaagatggtggccagattcttcctgcagctgggcgactacggcagcgccatccagttcctggtgatgagcaagtgcaacaacgaggccttcaccctggcccagcagcacaacaagatggagatctacgccgacatcatcggcagcgaggacaccaccaacgaggactaccagagcatcgccctgtacttcgagggcgagaagagatacctgcaggccggcaagttcttcctgctgtgcggccagtacagcagagccctgaagcacttcctgaagtgccccagcagcgaggacaacgtggccatcgagatggccatcgagaccgtgggccaggccaaggacgagctgctgaccaaccagctgatcgaccacctgctgggcgagaacgacggcatgcccaaggacgccaagtacctgttcagactgtacatggccctgaagcagtacagagaggccgcccagaccgccatcatcatcgccagagaggagcagagcgccggcaactacagaaacgcccacgacgtgctgttcagcatgtacgccgagctgaagagccagaagatcaagatccccagcgagatggccaccaacctgatgatcctgcacagctacatcctggtgaagatccacgtgaagaacggcgaccacatgaagggcgccagaatgctgatcagagtggccaacaacatcagcaagttccccagccacatcgtgcccatcctgaccagcaccgtgatcgagtgccacagagccggcctgaagaacagcgccttcagcttcgccgccatgctgatgagacccgagtacagaagcaagatcgacgccaagtacaagaagaagatcgagggcatggtgagaagacccgacatcagcgagatcgaggaggccaccaccccctgccccttctgcaagttcctgctgcccgagtgcgagctgctgtgccccggctgcaagaacagcatcccctactgcatcgccaccggcagacacatgctgaaggacgactggaccgtgtgcccccactgcgacttccccgccctgtacagcgagctgaagatcatgctgaacaccgagagcacctgccccatgtgcagcgagagactgaacgccgcccagctgaagaagatcagcgactgcacccagtacctgagaaccgaggaggagctgtag

SEQ ID NO: 105208 - DNA, 4029 bp, synthetic construct
  misc_feature 1..4029: note = Description of Artificial Sequence: Synthetic coding sequence
  source 1..4029: mol_type = other DNA
atgaagagaatcttcagcctgctggagaagacctggctgggcgcccccatccagttcgcctggcagaagaccagcggcaactacctggccgtgaccggcgccgactacatcgtgaagatcttcgacagacacggccagaagagaagcgagatcaacctgcccggcaactgcgtggccatggactgggacaaggacggcgacgtgctggccgtgatcgccgagaagagcagctgcatctacctgtgggacgccaacaccaacaagaccagccagctggacaacggcatgagagaccagatgagcttcctgctgtggagcaaggtgggcagcttcctggccgtgggcaccgtgaagggcaacctgctgatctacaaccaccagaccagcagaaagatccccgtgctgggcaagcacaccaagagaatcacctgcggctgctggaacgccgagaacctgctggccctgggcggcgaggacaagatgatcaccgtgagcaaccaggagggcgacaccatcagacagacccaggtgagaagcgagcccagcaacatgcagttcttcctgatgaagatggacgacagaaccagcgccgccgagagcatgatcagcgtggtgctgggcaagaagaccctgttcttcctgaacctgaacgagcccgacaaccccgccgacctggagttccagcaggacttcggcaacatcgtgtgctacaactggtacggcgacggcagaatcatgatcggcttcagctgcggccacttcgtggtgatcagcacccacaccggcgagctgggccaggagatcttccaggccagaaaccacaaggacaacctgaccagcatcgccgtgagccagaccctgaacaaggtggccacctgcggcgacaactgcatcaagatccaggacctggtggacctgaaggacatgtacgtgatcctgaacctggacgaggagaacaagggcctgggcaccctgagctggaccgacgacggccagctgctggccctgagcacccagagaggcagcctgcacgtgttcctgaccaagctgcccatcctgggcgacgcctgcagcaccagaatcgcctacctgaccagcctgctggaggtgaccgtggccaaccccgtggagggcgagctgcccatcaccgtgagcgtggacgtggagcccaacttcgtggccgtgggcctgtaccacctggccgtgggcatgaacaacagagcctggttctacgtgctgggcgagaacgccgtgaagaagctgaaggacatggagtacctgggcaccgtggccagcatctgcctgcacagcgactacgccgccgccctgttcgagggcaaggtgcagctgcacctgatcgagagcgagatcctggacgcccaggaggagagagagaccagactgttccccgccgtggacgacaagtgcagaatcctgtgccacgccctgaccagcgacttcctgatctacggcaccgacaccggcgtggtgcagtacttctacatcgaggactggcagttcgtgaacgactacagacaccccgtgagcgtgaagaagatcttccccgaccccaacggcaccagactggtgttcatcgacgagaagagcgacggcttcgtgtactgccccgtgaacgacgccacctacgagatccccgacttcagccccaccatcaagggcgtgctgtgggagaactggcccatggacaagggcgtgttcatcgcctacgacgacgacaaggtgtacacctacgtgttccacaaggacaccatccagggcgccaaggtgatcctggccggcagcaccaaggtgcccttcgcccacaagcccctgctgctgtacaacggcgagctgacctgccagacccagagcggcaaggtgaacaacatctacctgagcacccacggcttcctgagcaacctgaaggacaccggccccgacgagctgagacccatgctggcccagaacctgatgctgaagagattcagcgacgcctgggagatgtgcagaatcctgaacgacgaggccgcctggaacgagctggccagagcctgcctgcaccacatggaggtggagttcgccatcagagtgtacagaagaatcggcaacgtgggcatcgtgatgagcctggagcagatcaagggcatcgaggactacaacctgctggccggccacctggccatgttcaccaacgactacaacctggcccaggacctgtacctggccagcagctgccccatcgccgccctggagatgagaagagacctgcagcactgggacagcgccctgcagctggccaagcacctggcccccgaccagatccccttcatcagcaaggagtacgccatccagctggagttcgccggcgactacgtgaacgccctggcccactacgagaagggcatcaccggcgacaacaaggagcacgacgaggcctgcctggccggcgtggcccagatgagcatcagaatgggcgacatcagaagaggcgtgaaccaggccctgaagcaccccagcagagtgctgaagagagactgcggcgccatcctggagaacatgaagcagttcagcgaggccgcccagctgtacgagaagggcctgtactacgacaaggccgccagcgtgtacatcagaagcaagaactgggccaaggtgggcgacctgctgccccacgtgagcagccccaagatccacctgcagtacgccaaggccaaggaggccgacggcagatacaaggaggccgtggtggcctacgagaacgccaagcagtggcagagcgtgatcagaatctacctggaccacctgaacaaccccgagaaggccgtgaacatcgtgagagagacccagagcctggacggcgccaagatggtggccagattcttcctgcagctgggcgactacggcagcgccatccagttcctggtgatgagcaagtgcaacaacgaggccttcaccctggcccagcagcacaacaagatggagatctacgccgacatcatcggcagcgaggacaccaccaacgaggactaccagagcatcgccctgtacttcgagggcgagaagagatacctgcaggccggcaagttcttcctgctgtgcggccagtacagcagagccctgaagcacttcctgaagtgccccagcagcgaggacaacgtggccatcgagatggccatcgagaccgtgggccaggccaaggacgagctgctgaccaaccagctgatcgaccacctgctgggcgagaacgacggcatgcccaaggacgccaagtacctgttcagactgtacatggccctgaagcagtacagagaggccgcccagaccgccatcatcatcgccagagaggagcagagcgccggcaactacagaaacgcccacgacgtgctgttcagcatgtacgccgagctgaagagccagaagatcaagatccccagcgagatggccaccaacctgatgatcctgcacagctacatcctggtgaagatccacgtgaagaacggcgaccacatgaagggcgccagaatgctgatcagagtggccaacaacatcagcaagttccccagccacatcgtgcccatcctgaccagcaccgtgatcgagtgccacagagccggcctgaagaacagcgccttcagcttcgccgccatgctgatgagacccgagtacagaagcaagatcgacgccaagtacaagaagaagatcgagggcatggtgagaagacccgacatcagcgagatcgaggaggccaccaccccctgccccttctgcaagttcctgctgcccgagtgcgagctgctgtgccccggctgcaagaacagcatcccctactgcatcgccaccggcagacacatgctgaaggacgactggaccgtgtgcccccactgcgacttccccgccctgtacagcgagctgaagatcatgctgaacaccgagagcacctgccccatgtgcagcgagagactgaacgccgcccagctgaagaagatcagcgactgcacccagtacctgagaaccgaggaggagctgtag

SEQ ID NO: 105209 - DNA, 1443 bp, synthetic construct
  misc_feature 1..1443: note = Description of Artificial Sequence: Synthetic coding sequence
  source 1..1443: mol_type = other DNA
aagagaatcttcagcctgctggagaagacctggctgggcgcccccatccagttcgcctggcagaagaccagcggcaactacctggccgtgaccggcgccgactacatcgtgaagatcttcgacagacacggccagaagagaagcgagatcaacctgcccggcaactgcgtggccatggactgggacaaggacggcgacgtgctggccgtgatcgccgagaagagcagctgcatctacctgtgggacgccaacaccaacaagaccagccagctggacaacggcatgagagaccagatgagcttcctgctgtggagcaaggtgggcagcttcctggccgtgggcaccgtgaagggcaacctgctgatctacaaccaccagaccagcagaaagatccccgtgctgggcaagcacaccaagagaatcacctgcggctgctggaacgccgagaacctgctggccctgggcggcgaggacaagatgatcaccgtgagcaaccaggagggcgacaccatcagacagacccaggtgagaagcgagcccagcaacatgcagttcttcctgatgaagatggacgacagaaccagcgccgccgagagcatgatcagcgtggtgctgggcaagaagaccctgttcttcctgaacctgaacgagcccgacaaccccgccgacctggagttccagcaggacttcggcaacatcgtgtgctacaactggtacggcgacggcagaatcatgatcggcttcagctgcggccacttcgtggtgatcagcacccacaccggcgagctgggccaggagatcttccaggccagaaaccacaaggacaacctgaccagcatcgccgtgagccagaccctgaacaaggtggccacctgcggcgacaactgcatcaagatccaggacctggtggacctgaaggacatgtacgtgatcctgaacctggacgaggagaacaagggcctgggcaccctgagctggaccgacgacggccagctgctggccctgagcacccagagaggcagcctgcacgtgttcctgaccaagctgcccatcctgggcgacgcctgcagcaccagaatcgcctacctgaccagcctgctggaggtgaccgtggccaaccccgtggagggcgagctgcccatcaccgtgagcgtggacgtggagcccaacttcgtggccgtgggcctgtaccacctggccgtgggcatgaacaacagagcctggttctacgtgctgggcgagaacgccgtgaagaagctgaaggacatggagtacctgggcaccgtggccagcatctgcctgcacagcgactacgccgccgccctgttcgagggcaaggtgcagctgcacctgaaggccaagagctggatgctgaagaagaacgtgagactgggcttcagccagcagtggatgatcagcgccgtgagctacgccatgccctag

SEQ ID NO: 105210 - DNA, 1446 bp, synthetic construct
  misc_feature 1..1446: note = Description of Artificial Sequence: Synthetic coding sequence
  source 1..1446: mol_type = other DNA
atgaagagaatcttcagcctgctggagaagacctggctgggcgcccccatccagttcgcctggcagaagaccagcggcaactacctggccgtgaccggcgccgactacatcgtgaagatcttcgacagacacggccagaagagaagcgagatcaacctgcccggcaactgcgtggccatggactgggacaaggacggcgacgtgctggccgtgatcgccgagaagagcagctgcatctacctgtgggacgccaacaccaacaagaccagccagctggacaacggcatgagagaccagatgagcttcctgctgtggagcaaggtgggcagcttcctggccgtgggcaccgtgaagggcaacctgctgatctacaaccaccagaccagcagaaagatccccgtgctgggcaagcacaccaagagaatcacctgcggctgctggaacgccgagaacctgctggccctgggcggcgaggacaagatgatcaccgtgagcaaccaggagggcgacaccatcagacagacccaggtgagaagcgagcccagcaacatgcagttcttcctgatgaagatggacgacagaaccagcgccgccgagagcatgatcagcgtggtgctgggcaagaagaccctgttcttcctgaacctgaacgagcccgacaaccccgccgacctggagttccagcaggacttcggcaacatcgtgtgctacaactggtacggcgacggcagaatcatgatcggcttcagctgcggccacttcgtggtgatcagcacccacaccggcgagctgggccaggagatcttccaggccagaaaccacaaggacaacctgaccagcatcgccgtgagccagaccctgaacaaggtggccacctgcggcgacaactgcatcaagatccaggacctggtggacctgaaggacatgtacgtgatcctgaacctggacgaggagaacaagggcctgggcaccctgagctggaccgacgacggccagctgctggccctgagcacccagagaggcagcctgcacgtgttcctgaccaagctgcccatcctgggcgacgcctgcagcaccagaatcgcctacctgaccagcctgctggaggtgaccgtggccaaccccgtggagggcgagctgcccatcaccgtgagcgtggacgtggagcccaacttcgtggccgtgggcctgtaccacctggccgtgggcatgaacaacagagcctggttctacgtgctgggcgagaacgccgtgaagaagctgaaggacatggagtacctgggcaccgtggccagcatctgcctgcacagcgactacgccgccgccctgttcgagggcaaggtgcagctgcacctgaaggccaagagctggatgctgaagaagaacgtgagactgggcttcagccagcagtggatgatcagcgccgtgagctacgccatgccctag

SEQ ID NO: 105211 - DNA, 2832 bp, synthetic construct
  misc_feature 1..2832: note = Description of Artificial Sequence: Synthetic coding sequence
  source 1..2832: mol_type = other DNA
atgggcctgaccaagcagtacctgagatacgtggccagcgccgtgttcggcgtgatcggcagccagaagggcaacatcgtgttcgtgaccctgagaggcgagaagggcagatacgtggccgtgcccgcctgcgagcacgtgttcatctgggacctgagaaagggcgagaagatcctgatcctgcagggcctgaagcaggaggtgacctgcctgtgccccagccccgacggcctgcacctggccgtgggctacgaggacggcagcatcagaatcttcagcctgctgagcggcgagggcaacgtgaccttcaacggccacaaggccgccatcaccaccctgaagtacgaccagctgggcggcagactggccagcggcagcaaggacaccgacatcatcgtgtgggacgtgatcaacgagagcggcctgtacagactgaagggccacaaggacgccatcacccaggccctgttcctgagagagaagaacctgctggtgaccagcggcaaggacaccatggtgaagtggtgggacctggacacccagcactgcttcaagaccatggtgggccacagaaccgaggtgtggggcctggtgctgctgagcgaggagaagagactgatcaccggcgccagcgacagcgagctgagagtgtgggacatcgcctacctgcaggagatcgaggaccccgaggagcccgaccccaagaagatcaagggcagcagccccggcatccaggacaccctggaggccgaggacggcgccttcgagaccgacgaggcccccgaggacagaatcctgagctgcagaaaggccggcagcatcatgagagagggcagagacagagtggtgaacctggccgtggacaagaccggcagaatcctggcctgccacggcaccgacagcgtgctggagctgttctgcatcctgagcaagaaggagatccagaagaagatggacaagaagatgaagaaggccagaaagaaggccaagctgcacagcagcaagggcgaggaggaggaccccgaggtgaacgtggagatgagcctgcaggacgagatccagagagtgaccaacatcaagaccagcgccaagatcaagagcttcgacctgatccacagcccccacggcgagctgaaggccgtgttcctgctgcagaacaacctggtggagctgtacagcctgaaccccagcctgcccaccccccagcccgtgagaaccagcagaatcaccatcggcggccacagaagcgacgtgagaaccctgagcttcagcagcgacaacatcgccgtgctgagcgccgccgccgacagcatcaagatctggaacagaagcaccctgcagtgcatcagaaccatgacctgcgagtacgccctgtgcagcttcttcgtgcccggcgacagacaggtggtgatcggcaccaagaccggcaagctgcagctgtacgacctggccagcggcaacctgctggagaccatcgacgcccacgacggcgccctgtggagcatgagcctgagccccgaccagagaggcttcgtgaccggcggcgccgacaagagcgtgaagttctgggacttcgagctggtgaaggacgagaacagcacccagaagagactgagcgtgaagcagaccagaaccctgcagctggacgaggacgtgctgtgcgtgagctacagccccaaccagaagctgctggccgtgagcctgctggactgcaccgtgaagatcttctacgtggacaccctgaagttcttcctgagcctgtacggccacaagctgcccgtgatctgcatggacatcagccacgacggcgccctgatcgccaccggcagcgccgacagaaacgtgaagatctggggcctggacttcggcgactgccacaagagcctgttcgcccacgacgacagcgtgatgtacctgcagttcgtgcccaagagccacctgttcttcaccgccggcaaggaccacaagatcaagcagtgggacgccgacaagttcgagcacatccagaccctggagggccaccaccaggagatctggtgcctggccgtgagccccagcggcgactacgtggtgagcagcagccacgacaagagcctgagactgtgggagagaaccagagagcccctgatcctggaggaggagagagagatggagagagaggccgagtacgaggagagcgtggccaaggaggaccagcccgccgtgcccggcgagacccagggcgacagctacttcaccggcaagaagaccatcgagaccgtgaaggccgccgagagaatcatggaggccatcgagctgtacagagaggagaccgccaagatgaaggagcacaaggccatctgcaaggccgccggcaaggaggtgcccctgcccagcaaccccatcctgatggcctacggcagcatcagccccagcgcctacgtgctggagatcttcaagggcatcaagagcagcgagctggaggagagcctgctggtgctgcccttcagctacgtgcccgacatcctgaagctgttcaacgagttcatccagctgggcagcgacgtggagctgatctgcagatgcctgttcttcctgctgagaatccacttcggccagatcaccagcaaccagatgctggtgcccgtgatcgagaagctgagagagaccaccatcagcaaggtgagccaggtgagagacgtgatcggcttcaacatggccggcctggactacctgaagagagagtgcgaggccaagagcgaggtgatgttcttcgccgacgccaccagccacctggaggagaagaagagaaagagaaagaagagagagaagctgatcctgaccctgacctag

SEQ ID NO: 105212 - DNA, 123 bp, synthetic construct
  misc_feature 1..123: note = Description of Artificial Sequence: Synthetic coding sequence
  source 1..123: mol_type = other DNA
atgggcctgaccaagcagtacctgagatacgtggccagcgccgtgttcggcgtgatcggcagccagaagggcctggccagccaggccagcagcagcttcgtgttcttcgccaccgagttctag

SEQ ID NO: 105213 - DNA, 1611 bp, synthetic construct
  misc_feature 1..1611: note = Description of Artificial Sequence: Synthetic coding sequence
  source 1..1611: mol_type = other DNA
atggccaccagagcccagcccggccccctgagccaggccggcagcgccggcgtggccgccctggccaccgtgggcgtggccagcggccccggccccggcagacccggccccctgcaggacgagaccctgggcgtggccagcgtgcccagccagtggagagccgtgcagggcatcagatgggagaccaagagctgccagaccgccagcatcgccaccgccagcgccagcgcccaggccagaaaccacgtggacgcccaggtgcagaccgaggcccccgtgcccgtgagcgtgcagccccccagccagtacgacatccccagactggccgccttcctgagaagagtggaggccatggtgatcagagagctgaacaagaactggcagagccacgccttcgacggcttcgaggtgaactggaccgagcagcagcagatggtgagctgcctgtacaccctgggctacccccccgcccaggcccagggcctgcacgtgaccagcatcagctggaacagcaccggcagcgtggtggcctgcgcctacggcagactggaccacggcgactggagcaccctgaagagcttcgtgtgcgcctggaacctggacagaagagacctgagaccccagcagcccagcgccgtggtggaggtgcccagcgccgtgctgtgcctggccttccaccccacccagcccagccacgtggccggcggcctgtacagcggcgaggtgctggtgtgggacctgagcagactggaggaccccctgctgtggagaaccggcctgaccgacgacacccacaccgaccccgtgagccaggtggtgtggctgcccgagcccggccacagccacagattccaggtgctgagcgtggccaccgacggcaaggtgctgctgtggcagggcatcggcgtgggccagctgcagctgaccgagggcttcgccctggtgatgcagcagctgcccagaagcaccaagctgaagaagcaccccagaggcgagaccgaggtgggcgccaccgccgtggccttcagcagcttcgaccccagactgttcatcctgggcaccgagggcggcttccccctgaagtgcagcctggccgccggcgaggccgccctgaccagaatgcccagcagcgtgcccctgagagcccccgcccagttcaccttcagcccccacggcggccccatctacagcgtgagctgcagccccttccacagaaacctgttcctgagcgccggcaccgacggccacgtgcacctgtacagcatgctgcaggccccccccctgaccagcctgcagctgagcctgaagtacctgttcgccgtgagatggagccccgtgagacccctggtgttcgccgccgccagcggcaagggcgacgtgcagctgttcgacctgcagaagagcagccagaagcccaccgtgctgatcaagcagacccaggacgagagccccgtgtactgcctggagttcaacagccagcagacccagctgctggccgccggcgacgcccagggcaccgtgaaggtgtggcagctgagcaccgagttcaccgagcagggccccagagaggccgaggacctggactgcctggccgccgaggtggccgcctag

SEQ ID NO: 105214 - DNA, 420 bp, synthetic construct
  misc_feature 1..420: note = Description of Artificial Sequence: Synthetic coding sequence
  source 1..420: mol_type = other DNA
gccggcgtggccgccctggccaccgtgggcgtggccagcggccccggccccggcagacccggccccctgcaggacgagaccctgggcgtggccagcgtgcccagccagtggagagccgtgcagggcatcagatgggagaccaagagctgccagaccgccagcatcgccaccgccagcgccagcgcccaggccagaaaccacgtggacgcccaggtgcagaccgaggcccccgtgcccgtgagcgtgcagccccccagccagtacgacatccccagactggccgccttcctgagaagagtggaggccatggtgatcagagagctgaacaagaactggcagagccacgccttcgacggcttcgaggtgaactggaccgagcagcagcagatggccggcccctggggcctggagcacgcctag

SEQ ID NO: 105215 - DNA, 819 bp, synthetic construct
  misc_feature 1..819: note = Description of Artificial Sequence: Synthetic coding sequence
  source 1..819: mol_type = other DNA
ctgagccaggccggcagcgccggcgtggccgccctggccaccgtgggcgtggccagcggccccggccccggcagacccggccccctgcaggacgagaccctgggcgtggccagcgtgcccagccagtggagagccgtgcagggcatcagatgggagaccaagagctgccagaccgccagcatcgccaccgccagcgccagcgcccaggccagaaaccacgtggacgcccaggtgcagaccgaggcccccgtgcccgtgagcgtgcagccccccagccagtacgacatccccagactggccgccttcctgagaagagtggaggccatggtgatcagagagctgaacaagaactggcagagccacgccttcgacggcttcgaggtgaactggaccgagcagcagcagatggtgagctgcctgtacaccctgggctacccccccgcccaggcccagggcctgcacgtgaccagcatcagctggaacagcaccggcagcgtggtggcctgcgcctacggcagactggaccacggcgactggagcaccctgaagagcttcgtgtgcgcctggaacctggacagaagagacctgagaccccagcagcccagcgccgtggtggaggtgcccagcgccgtgctgtgcctggccttccaccccacccagcccagccacgtggccggcgagctgcccgccgtgagcgccagcagccccctgagaacccagctgcccgccctgcagagagcccagggcagcttcccctgggccctgtggcccggcgacagaaaggccggccccgaccccctgagcctggagcccagatag

SEQ ID NO: 105216 - DNA, 3513 bp, synthetic construct
  misc_feature 1..3513: note = Description of Artificial Sequence: Synthetic coding sequence
  source 1..3513: mol_type = other DNA
atgttcttctacctgagcaagaagatcagcatccccaacaacgtgaagctgcagtgcgtgagctggaacaaggagcagggcttcatcgcctgcggcggcgaggacggcctgctgaaggtgctgaagctggagacccagaccgacgacgccaagctgagaggcctggccgcccccagcaacctgagcatgaaccagaccctggagggccacagcggcagcgtgcaggtggtgacctggaacgagcagtaccagaagctgaccaccagcgacgagaacggcctgatcatcgtgtggatgctgtacaagggcagctggatcgaggagatgatcaacaacagaaacaagagcgtggtgagaagcatgagctggaacgccgacggccagaagatctgcatcgtgtacgaggacggcgccgtgatcgtgggcagcgtggacggcaacagaatctggggcaaggacctgaagggcatccagctgagccacgtgacctggagcgccgacagcaaggtgctgctgttcggcatggccaacggcgagatccacatctacgacaaccagggcaacttcatgatcaagatgaagctgagctgcctggtgaacgtgaccggcgccatcagcatcgccggcatccactggtaccacggcaccgagggctacgtggagcccgactgcccctgcctggccgtgtgcttcgacaacggcagatgccagatcatgagacacgagaacgaccagaaccccgtgctgatcgacaccggcatgtacgtggtgggcatccagtggaaccacatgggcagcgtgctggccgtggccggcttccagaaggccgccatgcaggacaaggacgtgaacatcgtgcagttctacacccccttcggcgagcacctgggcaccctgaaggtgcccggcaaggagatcagcgccctgagctgggagggcggcggcctgaagatcgccctggccgtggacagcttcatctacttcgccaacatcagacccaactacaagtggggctactgcagcaacaccgtggtgtacgcctacaccagacccgacagacccgagtactgcgtggtgttctgggacaccaagaacaacgagaagtacgtgaagtacgtgaagggcctgatcagcatcaccacctgcggcgacttctgcatcctggccaccaaggccgacgagaaccacccccagttcgtgctggtgctgtgcaacagcatcggcacccccctggaccccaagtacatcgacatcgtgcccctgttcgtggccatgaccaagacccacgtgatcgccgccagcaaggaggccttctacacctggcagtacagagtggccaagaagctgaccgccctggagatcaaccagatcaccagaagcagaaaggagggcagagagagaatctaccacgtggacgacacccccagcggcagcatggacggcgtgctggactacagcaagaccatccagggcaccagagaccccatctgcgccatcaccgccagcgacaagatcctgatcgtgggcagagagagcggcaccatccagagatacagcctgcccaacgtgggcctgatccagaagtacagcctgaactgcagagcctaccagctgagcctgaactgcaacagcagcagactggccatcatcgacatcagcggcgtgctgaccttcttcgacctggacgccagagtgaccgacagcaccggccagcaggtggtgggcgagctgctgaagctggagagaagagacgtgtgggacatgaagtgggccaaggacaaccccgacctgttcgccatgatggagaagaccagaatgtacgtgttcagaaacctggaccccgaggagcccatccagaccagcggctacatctgcaacttcgaggacctggagatcaagagcgtgctgctggacgagatcctgaaggaccccgagcaccccaacaaggactacctgatcaacttcgagatcagaagcctgagagacagcagagccctgatcgagaaggtgggcatcaaggacgccagccagttcatcgaggacaacccccaccccagactgtggagactgctggccgaggccgccctgcagaagctggacctgtacaccgccgagcaggccttcgtgagatgcaaggactaccagggcatcaagttcgtgaagagactgggcaagctgctgagcgagagcatgaagcaggccgaggtggtgggctacttcggcagattcgaggaggccgagagaacctacctggagatggacagaagagacctggccatcggcctgagactgaagctgggcgactggttcagagtgctgcagctgctgaagaccggcagcggcgacgccgacgacagcctgctggagcaggccaacaacgccatcggcgactacttcgccgacagacagaagtggctgaacgccgtgcagtactacgtgcagggcagaaaccaggagagactggccgagtgctactacatgctggaggactacgagggcctggagaacctggccatcagcctgcccgagaaccacaagctgctgcccgagatcgcccagatgttcgtgagagtgggcatgtgcgagcaggccgtgaccgccttcctgaagtgcagccagcccaaggccgccgtggacacctgcgtgcacctgaaccagtggaacaaggccgtggagctggccaagaaccacagcatgaaggagatcggcagcctgctggccagatacgccagccacctgctggagaagaacaagaccctggacgccatcgagctgtacagaaaggccaactacttcttcgacgccgccaagctgatgttcaagatcgccgacgaggaggccaagaagggcagcaagcccctgagagtgaagaagctgtacgtgctgagcgccctgctgatcgagcagtaccacgagcagatgaagaacgcccagagaggcaaggtgaagggcaagagcagcgaggccaccagcgccctggccggcctgctggaggaggaggtgctgagcaccaccgacagattcaccgacaacgcctggagaggcgccgaggcctaccacttcttcatcctggcccagagacagctgtacgagggctgcgtggacaccgccctgaagaccgccctgcacctgaaggactacgaggacatcatcccccccgtggagatctacagcctgctggccctgtgcgcctgcgccagcagagccttcggcacctgcagcaaggccttcatcaagctgaagagcctggagaccctgagcagcgagcagaagcagcagtacgaggacctggccctggagatcttcaccaagcacaccagcaaggacaacagaaagcccgagctggacagcctgatggagggcggcgagggcaagctgcccacctgcgtggccaccggcagccccatcaccgagtaccagttctggatgtgcagcgtgtgcaagcacggcgtgctggcccaggagatcagccactacagcttctgccccctgtgccacagccccgtgggctag

SEQ ID NO: 105217 - DNA, 3546 bp, synthetic construct
  misc_feature 1..3546: note = Description of Artificial Sequence: Synthetic coding sequence
  source 1..3546: mol_type = other DNA
atgttcttctacctgagcaagaagatcagcatccccaacaacgtgaagctgcagtgcgtgagctggaacaaggagcagggcttcatcgcctgcggcggcgaggacggcctgctgaaggtgctgaagctggagacccagaccgacgacgccaagctgagaggcctggccgcccccagcaacctgagcatgaaccagaccctggagggccacagcggcagcgtgcaggtggtgacctggaacgagcagtaccagaagctgaccaccagcgacgagaacggcctgatcatcgtgtggatgctgtacaagggcagctggatcgaggagatgatcaacaacagaaacaagagcgtggtgagaagcatgagctggaacgccgacggccagaagatctgcatcgtgtacgaggacggcgccgtgatcgtgggcagcgtggacggcaacagaatctggggcaaggacctgaagggcatccagctgagccacgtgacctggagcgccgacagcaaggtgctgctgttcggcatggccaacggcgagatccacatctacgacaaccagggcaacttcatgatcaagatgaagctgagctgcctggtgaacgtgaccggcgccatcagcatcgccggcatccactggtaccacggcaccgagggctacgtggagcccgactgcccctgcctggccgtgtgcttcgacaacggcagatgccagatcatgagacacgagaacgaccagaaccccgtgctgatcgacaccggcatgtacgtggtgggcatccagtggaaccacatgggcagcgtgctggccgtggccggcttccagaaggccgccatgcaggacaaggacgtgaacatcgtgcagttctacacccccttcggcgagcacctgggcaccctgaaggtgcccggcaaggagatcagcgccctgagctgggagggcggcggcctgaagatcgccctggccgtggacagcttcatctacttcgccaacatcagacccaactacaagtggggctactgcagcaacaccgtggtgtacgcctacaccagacccgacagacccgagtactgcgtggtgttctgggacaccaagaacaacgagaagtacgtgaagtacgtgaagggcctgatcagcatcaccacctgcggcgacttctgcatcctggccaccaaggccgacgagaaccacccccaggaggagaacgagatggagaccttcggcgccaccttcgtgctggtgctgtgcaacagcatcggcacccccctggaccccaagtacatcgacatcgtgcccctgttcgtggccatgaccaagacccacgtgatcgccgccagcaaggaggccttctacacctggcagtacagagtggccaagaagctgaccgccctggagatcaaccagatcaccagaagcagaaaggagggcagagagagaatctaccacgtggacgacacccccagcggcagcatggacggcgtgctggactacagcaagaccatccagggcaccagagaccccatctgcgccatcaccgccagcgacaagatcctgatcgtgggcagagagagcggcaccatccagagatacagcctgcccaacgtgggcctgatccagaagtacagcctgaactgcagagcctaccagctgagcctgaactgcaacagcagcagactggccatcatcgacatcagcggcgtgctgaccttcttcgacctggacgccagagtgaccgacagcaccggccagcaggtggtgggcgagctgctgaagctggagagaagagacgtgtgggacatgaagtgggccaaggacaaccccgacctgttcgccatgatggagaagaccagaatgtacgtgttcagaaacctggaccccgaggagcccatccagaccagcggctacatctgcaacttcgaggacctggagatcaagagcgtgctgctggacgagatcctgaaggaccccgagcaccccaacaaggactacctgatcaacttcgagatcagaagcctgagagacagcagagccctgatcgagaaggtgggcatcaaggacgccagccagttcatcgaggacaacccccaccccagactgtggagactgctggccgaggccgccctgcagaagctggacctgtacaccgccgagcaggccttcgtgagatgcaaggactaccagggcatcaagttcgtgaagagactgggcaagctgctgagcgagagcatgaagcaggccgaggtggtgggctacttcggcagattcgaggaggccgagagaacctacctggagatggacagaagagacctggccatcggcctgagactgaagctgggcgactggttcagagtgctgcagctgctgaagaccggcagcggcgacgccgacgacagcctgctggagcaggccaacaacgccatcggcgactacttcgccgacagacagaagtggctgaacgccgtgcagtactacgtgcagggcagaaaccaggagagactggccgagtgctactacatgctggaggactacgagggcctggagaacctggccatcagcctgcccgagaaccacaagctgctgcccgagatcgcccagatgttcgtgagagtgggcatgtgcgagcaggccgtgaccgccttcctgaagtgcagccagcccaaggccgccgtggacacctgcgtgcacctgaaccagtggaacaaggccgtggagctggccaagaaccacagcatgaaggagatcggcagcctgctggccagatacgccagccacctgctggagaagaacaagaccctggacgccatcgagctgtacagaaaggccaactacttcttcgacgccgccaagctgatgttcaagatcgccgacgaggaggccaagaagggcagcaagcccctgagagtgaagaagctgtacgtgctgagcgccctgctgatcgagcagtaccacgagcagatgaagaacgcccagagaggcaaggtgaagggcaagagcagcgaggccaccagcgccctggccggcctgctggaggaggaggtgctgagcaccaccgacagattcaccgacaacgcctggagaggcgccgaggcctaccacttcttcatcctggcccagagacagctgtacgagggctgcgtggacaccgccctgaagaccgccctgcacctgaaggactacgaggacatcatcccccccgtggagatctacagcctgctggccctgtgcgcctgcgccagcagagccttcggcacctgcagcaaggccttcatcaagctgaagagcctggagaccctgagcagcgagcagaagcagcagtacgaggacctggccctggagatcttcaccaagcacaccagcaaggacaacagaaagcccgagctggacagcctgatggagggcggcgagggcaagctgcccacctgcgtggccaccggcagccccatcaccgagtaccagttctggatgtgcagcgtgtgcaagcacggcgtgctggcccaggagatcagccactacagcttctgccccctgtgccacagccccgtgggctag

SEQ ID NO: 105218 - DNA, 1680 bp, synthetic construct
  misc_feature 1..1680: note = Description of Artificial Sequence: Synthetic coding sequence
  source 1..1680: mol_type = other DNA
atgaccaagacccacgtgatcgccgccagcaaggaggccttctacacctggcagtacagagtggccaagaagctgaccgccctggagatcaaccagatcaccagaagcagaaaggagggcagagagagaatctaccacgtggacgacacccccagcggcagcatggacggcgtgctggactacagcaagaccatccagggcaccagagaccccatctgcgccatcaccgccagcgacaagatcctgatcgtgggcagagagagcggcaccatccagagatacagcctgcccaacgtgggcctgatccagaagtacagcctgaactgcagagcctaccagctgagcctgaactgcaacagcagcagactggccatcatcgacatcagcggcgtgctgaccttcttcgacctggacgccagagtgaccgacagcaccggccagcaggtggtgggcgagctgctgaagctggagagaagagacgtgtgggacatgaagtgggccaaggacaaccccgacctgttcgccatgatggagaagaccagaatgtacgtgttcagaaacctggaccccgaggagcccatccagaccagcggctacatctgcaacttcgaggacctggagatcaagagcgtgctgctggacgagatcctgaaggaccccgagcaccccaacaaggactacctgatcaacttcgagatcagaagcctgagagacagcagagccctgatcgagaaggtgggcatcaaggacgccagccagttcatcgaggacaacccccaccccagactgtggagactgctggccgaggccgccctgcagaagctggacctgtacaccgccgagcaggccttcgtgagatgcaaggactaccagggcatcaagttcgtgaagagactgggcaagctgctgagcgagagcatgaagcaggccgaggtggtgggctacttcggcagattcgaggaggccgagagaacctacctggagatggacagaagagacctggccatcggcctgagactgaagctgggcgactggttcagagtgctgcagctgctgaagaccggcagcggcgacgccgacgacagcctgctggagcaggccaacaacgccatcggcgactacttcgccgacagacagaagtggctgaacgccgtgcagtactacgtgcagggcagaaaccaggagagactggccgagtgctactacatgctggaggactacgagggcctggagaacctggccatcagcctgcccgagaaccacaagctgctgcccatcgccgacgaggaggccaagaagggcagcaagcccctgagagtgaagaagctgtacgtgctgagcgccctgctgatcgagcagtaccacgagcagatgaagaacgcccagagaggcaaggtgaagggcaagagcagcgaggccaccagcgccctggccggcctgctggaggaggaggtgctgagcaccaccgacagattcaccgacaacgcctggagaggcgccgaggcctaccacttcttcatcctggcccagagacagctgtacgagggctgcgtggacaccgccctgaagaccgtggagaagggcaactgccagcacgccctgccccaggaggcccagagcctgagcatcaacagcggctgcgccgtgtacgccaacaccgtgagcctgctgagaaagtag

SEQ ID NO: 105219 - DNA, 2856 bp, synthetic construct
  misc_feature 1..2856: note = Description of Artificial Sequence: Synthetic coding sequence
  source 1..2856: mol_type = other DNA
atgtgctgcaccgagggcagcctgagaaagagagacagccagagagcccccgaggccgtgctgtgcctgcagctgtggcagagaaccgtgcccctggacaccctgaagggcctgggcacctgcttccccagcggccccgagctgagaggcgccggcatcgccgccgccatggagagagccagcgagagaagaaccgccagcgccctgttcgccggcttcagagccctgggcctgttcagcaacgacatcccccacgtggtgagattcagcgccctgaagagaagattctacgtgaccacctgcgtgggcaagagcttccacacctacgacgtgcagaagctgagcctggtggccgtgagcaacagcgtgccccaggacatctgctgcatggccgccgacggcagactggtgttcgccgcctacggcaacgtgttcagcgccttcgccagaaacaaggagatcgtgcacaccttcaagggccacaaggccgagatccacttcctgcagcccttcggcgaccacatcatcagcgtggacaccgacggcatcctgatcatctggcacatctacagcgaggaggagtacctgcagctgaccttcgacaagagcgtgttcaagatcagcgccatcctgcaccccagcacctacctgaacaagatcctgctgggcagcgagcagggcagcctgcagctgtggaacgtgaagagcaacaagctgctgtacaccttccccggctggaaggtgggcgtgaccgccctgcagcaggcccccgccgtggacgtggtggccatcggcctgatgagcggccaggtgatcatccacaacatcaagttcaacgagaccctgatgaagttcagacaggactggggccccatcaccagcatcagcttcagaaccgacggccaccccgtgatggccgccggcagcccctgcggccacatcggcctgtgggacctggaggacaagaagctgatcaaccagatgagaaacgcccacagcaccgccatcgccggcctgaccttcctgcacagagagcccctgctggtgaccaacggcgccgacaacgccctgagaatctggatcttcgacggccccaccggcgagggcagactgctgagattcagaatgggccacagcgcccccctgaccaacatcagatactacggccagaacggccagcagatcctgagcgccagccaggacggcaccctgcagagcttcagcaccgtgcacgagaagttcaacaagagcctgggccacggcctgatcaacaagaagagagtgaagagaaagggcctgcagaacaccatgagcgtgagactgccccccatcaccaagttcgccgccgaggaggccagagagagcgactgggacggcatcatcgcctgccaccagggcaagctgagctgcagcacctggaactaccagaagagcaccatcggcgcctacttcctgaagcccaaggagctgaagaaggacgacatcaccgccaccgccgtggacatcaccagctgcggcaacttcgccgtgatcggcctgagcagcggcaccgtggacgtgtacaacatgcagagcggcatccacagaggcagcttcggcaaggaccaggcccacaagggcagcgtgagaggcgtggccgtggacggcctgaaccagctgaccgtgaccaccggcagcgagggcctgctgaagttctggaacttcaagaacaagatcctgatccacagcgtgagcctgagcagcagccccaacatcatgctgctgcacagagacagcggcatcctgggcctggccctggacgacttcagcatcagcgtgctggacatcgagaccagaaagatcgtgagagagttcagcggccaccagggccagatcaacgacatggccttcagccccgacggcagatggctgatcagcgccgccatggactgcagcatcagaacctgggacctgcccagcggctgcctgatcgactgcttcctgctggacagcgcccccctgaacgtgagcatgagccccaccggcgacttcctggccaccagccacgtggaccacctgggcatctacctgtggagcaacatcagcctgtacagcgtggtgagcctgagacccctgcccgccgactacgtgcccagcatcgtgatgctgcccggcacctgccagacccaggacgtggaggtgagcgaggagaccgtggagcccagcgacgagctgatcgagtacgacagccccgagcagctgaacgagcagctggtgaccctgagcctgctgcccgagagcagatggaagaacctgctgaacctggacgtgatcaagaagaagaacaagcccaaggagccccccaaggtgcccaagagcgcccccttcttcatccccaccatccccggcctggtgcccagatacgccgcccccgagcagaacaacgacccccagcagagcaaggtggtgaacctgggcgtgctggcccagaagagcgacttctgcctgaagctggaggagggcctggtgaacaacaagtacgacaccgccctgaacctgctgaaggagagcggccccagcggcatcgagaccgagctgagaagcctgagccccgactgcggcggcagcatcgaggtgatgcagagcttcctgaagatgatcggcatgatgctggacagaaagagagacttcgagctggcccaggcctacctggccctgttcctgaagctgcacctgaagatgctgcccagcgagcccgtgctgctggaggagatcaccaacctgagcagccaggtggaggagaactggacccacctgcagagcctgttcaaccagagcatgtgcatcctgaactacctgaagagcgccctgctgtag

SEQ ID NO: 105220 - DNA, 2856 bp, synthetic construct; identical to SEQ ID NO: 105219
  misc_feature 1..2856: note = Description of Artificial Sequence: Synthetic coding sequence
  source 1..2856: mol_type = other DNA

SEQ ID NO: 105221 - DNA, 1239 bp, synthetic construct
  misc_feature 1..1239: note = Description of Artificial Sequence: Synthetic coding sequence
  source 1..1239: mol_type = other DNA
atggccggcagcgtgggcctggccctgtgcggccagaccctggtggtgagaggcggcagcagattcctggccaccagcatcgccagcagcgacgacgacagcctgttcatctacgactgcagcgccgccgagaagaagagccaggagaacaagggcgaggacgcccccctggaccagggcagcggcgccatcctggccagcaccttcagcaagagcggcagctacttcgccctgaccgacgacagcaagagactgatcctgttcagaaccaagccctggcagtgcctgagcgtgagaaccgtggccagaagatgcaccgccctgaccttcatcgccagcgaggagaaggtgctggtggccgacaagagcggcgacgtgtacagcttcagcgtgctggagccccacggctgcggcagactggagctgggccacctgagcatgctgctggacgtggccgtgagccccgacgacagattcatcctgaccgccgacagagacgagaagatcagagtgagctgggccgccgccccccacagcatcgagagcttctgcctgggccacaccgagttcgtgagcagaatcagcgtggtgcccacccagcccggcctgctgctgagcagcagcggcgacggcaccctgagactgtgggagtacagaagcggcagacagctgcactgctgccacctggccagcctgcaggagctggtggacccccaggccccccagaagttcgccgccagcagaatcgccttctggtgccaggagaactgcgtggccctgctgtgcgacggcacccccgtggtgtacatcttccagctggacgccagaagacagcagctggtgtacagacagcagctggccttccagcaccaggtgtgggacgtggccttcgaggagacccagggcctgtgggtgctgcaggactgccaggaggcccccctggtgctgtacagacccgtgggcgaccagtggcagagcgtgcccgagagcaccgtgctgaagaaggtgagcggcgtgctgagaggcaactgggccatgctggagggcagcgccggcgccgacgccagcttcagcagcctgtacaaggccaccttcgacaacgtgaccagctacctgaagaagaaggaggagagactgcagcagcagctggagaagaagcagagaagaagaagccccccccccggccccgacggccacgccaagaagatgagacccggcgaggccaccctgagctgctag

SEQ ID NO: 105222 - DNA, 1239 bp, synthetic construct; identical to SEQ ID NO: 105221
  misc_feature 1..1239: note = Description of Artificial Sequence: Synthetic coding sequence
  source 1..1239: mol_type = other DNA

SEQ ID NO: 105223 - DNA, 2034 bp, synthetic construct
  misc_feature 1..2034: note = Description of Artificial Sequence: Synthetic coding sequence
  source 1..2034: mol_type = other DNA
atggccgcccaccacagacagaacaccgccggcagaagaaaggtgcaggtgagctacgtgatcagagacgaggtggagaagtacaacagaaacggcgtgaacgccctgcagctggaccccgccctgaacagactgttcaccgccggcagagacagcatcatcagaatctggagcgtgaaccagcacaagcaggacccctacatcgccagcatggagcaccacaccgactgggtgaacgacatcgtgctgtgctgcaacggcaagaccctgatcagcgccagcagcgacaccaccgtgaaggtgtggaacgcccacaagggcttctgcatgagcaccctgagaacccacaaggactacgtgaaggccctggcctacgccaaggacaaggagctggtggccagcgccggcctggacagacagatcttcctgtgggacgtgaacaccctgaccgccctgaccgccagcaacaacaccgtgaccaccagcagcctgagcggcaacaaggacagcatctacagcctggccatgaaccagctgggcaccatcatcgtgagcggcagcaccgagaaggtgctgagagtgtgggaccccagaacctgcgccaagctgatgaagctgaagggccacaccgacaacgtgaaggccctgctgctgaacagagacggcacccagtgcctgagcggcagcagcgacggcaccatcagactgtggagcctgggccagcagagatgcatcgccacctacagagtgcacgacgagggcgtgtgggccctgcaggtgaacgacgccttcacccacgtgtacagcggcggcagagacagaaagatctactgcaccgacctgagaaaccccgacatcagagtgctgatctgcgaggagaaggcccccgtgctgaagatggagctggacagaagcgccgaccccccccccgccatctgggtggccaccaccaagagcaccgtgaacaagtggaccctgaagggcatccacaacttcagagccagcggcgactacgacaacgactgcaccaaccccatcacccccctgtgcacccagcccgaccaggtgatcaagggcggcgccagcatcatccagtgccacatcctgaacgacaagagacacatcctgaccaaggacaccaacaacaacgtggcctactgggacgtgctgaaggcctgcaaggtggaggacctgggcaaggtggacttcgaggacgagatcaagaagagattcaagatggtgtacgtgcccaactggttcagcgtggacctgaagaccggcatgctgaccatcaccctggacgagagcgactgcttcgccgcctgggtgagcgccaaggacgccggcttcagcagccccgacggcagcgaccccaagctgaacctgggcggcctgctgctgcaggccctgctggagtactggcccagaacccacgtgaaccccatggacgaggaggagaacgaggtgaaccacgtgaacggcgagcaggagaacagagtgcagaagggcaacggctacttccaggtgcccccccacacccccgtgatcttcggcgaggccggcggcagaaccctgttcagactgctgtgcagagacagcggcggcgagaccgagagcatgctgctgaacgagaccgtgccccagtgggtgatcgacatcaccgtggacaagaacatgcccaagttcaacaagatccccttctacctgcagccccacgccagcagcggcgccaagaccctgaagaaggacagactgagcgccagcgacatgctgcaggtgagaaaggtgatggagcacgtgtacgagaagatcatcaacctggacaacgagagccagaccaccagcagcagcaacaacgagaagcccggcgagcaggagaaggaggaggacatcgccgtgctggccgaggagaagatcgagctgctgtgccaggaccaggtgctggaccccaacatggacctgagaaccgtgaagcacttcatctggaagagcggcggcgacctgaccctgcactacagacagaagagcacctag

SEQ ID NO: 105224 - DNA, 1788 bp, synthetic construct
  misc_feature 1..1788: note = Description of Artificial Sequence: Synthetic coding sequence
  source 1..1788: mol_type = other DNA
atggagtgccagagcgcccaggtgatcagcgccagcagcgacaccaccgtgaaggtgtggaacgcccacaagggcttctgcatgagcaccctgagaacccacaaggactacgtgaaggccctggcctacgccaaggacaaggagctggtggccagcgccggcctggacagacagatcttcctgtgggacgtgaacaccctgaccgccctgaccgccagcaacaacaccgtgaccaccagcagcctgagcggcaacaaggacagcatctacagcctggccatgaaccagctgggcaccatcatcgtgagcggcagcaccgagaaggtgctgagagtgtgggaccccagaacctgcgccaagctgatgaagctgaagggccacaccgacaacgtgaaggccctgctgctgaacagagacggcacccagtgcctgagcggcagcagcgacggcaccatcagactgtggagcctgggccagcagagatgcatcgccacctacagagtgcacgacgagggcgtgtgggccctgcaggtgaacgacgccttcacccacgtgtacagcggcggcagagacagaaagatctactgcaccgacctgagaaaccccgacatcagagtgctgatctgcgaggagaaggcccccgtgctgaagatggagctggacagaagcgccgaccccccccccgccatctgggtggccaccaccaagagcaccgtgaacaagtggaccctgaagggcatccacaacttcagagccagcggcgactacgacaacgactgcaccaaccccatcacccccctgtgcacccagcccgaccaggtgatcaagggcggcgccagcatcatccagtgccacatcctgaacgacaagagacacatcctgaccaaggacaccaacaacaacgtggcctactgggacgtgctgaaggcctgcaaggtggaggacctgggcaaggtggacttcgaggacgagatcaagaagagattcaagatggtgtacgtgcccaactggttcagcgtggacctgaagaccggcatgctgaccatcaccctggacgagagcgactgcttcgccgcctgggtgagcgccaaggacgccggcttcagcagccccgacggcagcgaccccaagctgaacctgggcggcctgctgctgcaggccctgctggagtactggcccagaacccacgtgaaccccatggacgaggaggagaacgaggtgaaccacgtgaacggcgagcaggagaacagagtgcagaagggcaacggctacttccaggtgcccccccacacccccgtgatcttcggcgaggccggcggcagaaccctgttcagactgctgtgcagagacagcggcggcgagaccgagagcatgctgctgaacgagaccgtgccccagtgggtgatcgacatcaccgtggacaagaacatgcccaagttcaacaagatccccttctacctgcagccccacgccagcagcggcgccaagaccctgaagaaggacagactgagcgccagcgacatgctgcaggtgagaaaggtgatggagcacgtgtacgagaagatcatcaacctggacaacgagagccagaccaccagcagcagcaacaacgagaagcccggcgagcaggagaaggaggaggacatcgccgtgctggccgaggagaagatcgagctgctgtgccaggaccaggtgctggaccccaacatggacctgagaaccgtgaagcacttcatctggaagagcggcggcgacctgaccctgcactacagacagaagagcacctag

SEQ ID NO: 105225 - DNA, 366 bp, synthetic construct
  misc_feature 1..366: note = Description of Artificial Sequence: Synthetic coding sequence
  source 1..366: mol_type = other DNA
atgcccaagttcaacaagatccccttctacctgcagccccacgccagcagcggcgccaagaccctgaagaaggacagactgagcgccagcgacatgctgcaggtgagaaaggtgatggagcacgtgtacgagaagatcatcaacctggacaacgagagccagaccaccagcagcagcaacaacgagaagcccggcgagcaggagaaggaggaggacatcgccgtgctggccgaggagaagatcgagctgctgtgccaggaccaggtgagagtgctggaccccaacatggacctgagaaccgtgaagcacttcatctggaagagcggcggcgacctgaccctgcactacagacagaagagcacctag

SEQ ID NO: 105226 - DNA, 1209 bp, synthetic construct
  misc_feature 1..1209: note = Description of Artificial Sequence: Synthetic coding sequence
  source 1..1209: mol_type = other DNA
atggccgcccaccacagacagaacaccgccggcagaagaaaggtgcagtgcctgagcggcagcagcgacggcaccatcagactgtggagcctgggccagcagagatgcatcgccacctacagagtgcacgacgagggcgtgtgggccctgcaggtgaacgacgccttcacccacgtgtacagcggcggcagagacagaaagatctactgcaccgacctgagaaaccccgacatcagagtgctgatctgcgaggagaaggcccccgtgctgaagatggagctggacagaagcgccgaccccccccccgccatctgggtggccaccaccaagagcaccgtgaacaagtgggcctgcaaggtggaggacctgggcaaggtggacttcgaggacgagatcaagaagagattcaagatggtgtacgtgcccaactggttcagcgtggacctgaagaccggcatgctgaccatcaccctggacgagagcgactgcttcgccgcctgggtgagcgccaaggacgccggcttcagcagccccgacggcagcgaccccaagctgaacctgggcggcctgctgctgcaggccctgctggagtactggcccagaacccacgtgaaccccatggacgaggaggagaacgaggtgaaccacgtgaacggcgagcaggagaacagagtgcagaagggcaacggctacttccaggtgcccccccacacccccgtgatcttcggcgaggccggcggcagaaccctgttcagactgctgtgcagagacagcggcggcgagaccgagagcatgctgctgaacgagaccgtgccccagtgggtgatcgacatcaccgtggacaagaacatgcccaagttcaacaagatccccttctacctgcagccccacgccagcagcggcgccaagaccctgaagaaggacagactgagcgccagcgacatgctgcaggtgagaaaggtgatggagcacgtgtacgagaagatcatcaacctggacaacgagagccagaccaccagcagcagcaacaacgagaagcccggcgagcaggagaaggaggaggacatcgccgtgctggccgaggagaagatcgagctgctgtgccaggaccaggtgctggaccccaacatggacctgagaaccgtgaagcacttcatctggaagagcggcggcgacctgaccctgcactacagacagaagagcacctag

SEQ ID NO: 105227 - DNA, 651 bp, synthetic construct
  misc_feature 1..651: note = Description of Artificial Sequence: Synthetic coding sequence
  source 1..651: mol_type = other DNA
atggacgccctggaggactacgtgtggcccagagccaccagcgagctgatcctgctgcccgtgaccggcctggagtgcgtgggcgacagactgctggccggcgagggccccgacgtgctggtgtacagcctggacttcggcggccacctgagaatgatcaagagagtgcagaacctgctgggccactacctgatccacggcttcagagtgagacccgagcccaacggcgacctggacctggaggccatggtggccgtgttcggcagcaagggcctgagagtggtgaagatcagctggggccagggccacttctgggagctgtggagaagcggcctgtggaacatgagcgactggatctgggacgccagatggctggagggcaacatcgccctggccctgggccacaacagcgtggtgctgtacgaccccgtggtgggctgcatcctgcaggaggtgccctgcaccgacagatgcaccctgagcagcgcctgcctgatcggcgacgcctggaaggagctgaccatcgtggccggcgccgtgagcaaccagctgctggtgtggtaccccgccaccgccttcaccctgtacctgagcgccagacccacccccttctgctgcgtgctgacccccagaatgtgcaccagactgtag

SEQ ID NO: 105228 - DNA, 3456 bp, synthetic construct
  misc_feature 1..3456: note = Description of Artificial Sequence: Synthetic coding sequence
  source 1..3456: mol_type = other DNA
atgggcagcgccgccagatgggagggcagcttcagcagagagttcagcagcctgctgagcagaggctgcctgagcaccagcagaatcgacatggacgccctggaggactacgtgtggcccagagccaccagcgagctgatcctgctgcccgtgaccggcctggagtgcgtgggcgacagactgctggccggcgagggccccgacgtgctggtgtacagcctggacttcggcggccacctgagaatgatcaagagagtgcagaacctgctgggccactacctgatccacggcttcagagtgagacccgagcccaacggcgacctggacctggaggccatggtggccgtgttcggcagcaagggcctgagagtggtgaagatcagctggggccagggccacttctgggagctgtggagaagcggcctgtggaacatgagcgactggatctgggacgccagatggctggagggcaacatcgccctggccctgggccacaacagcgtggtgctgtacgaccccgtggtgggctgcatcctgcaggaggtgccctgcaccgacagatgcaccctgagcagcgcctgcctgatcggcgacgcctggaaggagctgaccatcgtggccggcgccgtgagcaaccagctgctggtgtggtaccccgccaccgccctggccgacaacaagcccgtggcccccgacagaagaatcagcggccacgtgggcatcatcttcagcatgagctacctggagagcaagggcctgctggccaccgccagcgaggacagaagcgtgagaatctggaaggtgggcgacctgagagtgcccggcggcagagtgcagaacatcggccactgcttcggccacagcgccagagtgtggcaggtgaagctgctggagaactacctgatcagcgccggcgaggactgcgtgtgcctggtgtggagccacgagggcgagatcctgcaggccttcagaggccaccagggcagaggcatcagagccatcgccgcccacgagagacaggcctgggtgatcaccggcggcgacgacagcggcatcagactgtggcacctggtgggcagaggctacagaggcctgggcgtgagcgccctgtgcttcaagagcagaagcagacccggcaccctgaaggccgtgaccctggccggcagctggagactgctggccgtgaccgacaccggcgccctgtacctgtacgacgtggaggtgaagtgctgggagcagctgctggaggacaagcacttccagagctactgcctgctggaggccgcccccggccccgagggcttcggcctgtgcgccatggccaacggcgagggcagagtgaaggtggtgcccatcaacacccccaccgccgccgtggaccagaccctgttccccggcaaggtgcacagcctgagctgggccctgagaggctacgaggagctgctgctgctggccagcggccccggcggcgtggtggcctgcctggagatcagcgccgcccccagcggcaaggccatcttcgtgaaggagagatgcagatacctgctgccccccagcaagcagagatggcacacctgcagcgccttcctgccccccggcgacttcctggtgtgcggcgacagaagaggcagcgtgctgctgttccccagcagacccggcctgctgaaggaccccggcgtgggcggcaaggccagagccggcgccggcgcccccgtggtgggcagcggcagcagcggcggcggcaacgccttcaccggcctgggccccgtgagcaccctgcccagcctgcacggcaagcagggcgtgaccagcgtgacctgccacggcggctacgtgtacaccaccggcagagacggcgcctactaccagctgttcgtgagagacggccagctgcagcccgtgctgagacagaagagctgcagaggcatgaactggctggccggcctgagaatcgtgcccgacggcagcatggtgatcctgggcttccacgccaacgagttcgtggtgtggaaccccagaagccacgagaagctgcacatcgtgaactgcggcggcggccacagaagctgggccttcagcgacaccgaggccgccatggccttcgcctacctgaaggacggcgacgtgatgctgtacagagccctgggcggctgcaccagaccccacgtgatcctgagagagggcctgcacggcagagagatcacctgcgtgaagagagtgggcaccatcaccctgggccccgagtacggcgtgcccagcttcatgcagcccgacgacctggagcccggcagcgagggccccgacctgaccgacatcgtgatcacctgcagcgaggacaccaccgtgtgcgtgctggccctgcccaccaccaccggcagcgcccacgccctgaccgccgtgtgcaaccacatcagcagcgtgagagccgtggccgtgtggggcatcggcacccccggcggcccccaggacccccagcccggcctgaccgcccacgtggtgagcgccggcggcagagccgagatgcactgcttcagcatcatggtgacccccgaccccagcacccccagcagactggcctgccacgtgatgcacctgagcagccacagactggacgagtactgggacagacagagaaacagacacagaatggtgaaggtggaccccgagaccagatacatgagcctggccgtgtgcgagctggaccagcccggcctgggccccctggtggccgccgcctgcagcgacggcgccgtgagactgttcctgctgcaggacagcggcagaatcctgcagctgctggccgagaccttccaccacaagagatgcgtgctgaaggtgcacagcttcacccacgaggcccccaaccagagaagaagactgctgctgtgcagcgccgccaccgacggcagcctggccttctgggacctgaccaccatgctggaccacgacagcaccgtgctggagccccccgtggaccccggcctgccctacagactgggcacccccagcctgaccctgcaggcccacagctgcggcatcaacagcctgcacaccctgcccaccagagagggccaccacctggtggccagcggcagcgaggacggcagcctgcacgtgttcgtgctggccgtggagatgctgcagctggaggaggccgtgggcgaggccggcctggtgccccagctgagagtgctggaggagtacagcgtgccctgcgcccacgccgcccacgtgaccggcctgaagatcctgagccccagcatcatggtgagcgccagcatcgaccagagactgaccttctggagactgggccacggcgagcccaccttcatgaacagcaccgtgttccacgtgcccgacgtggccgacatggactgctggcccgtgagccccgagttcggccacagatgcgccctgggcggccagggcctggaggtgtacaactggtacgactag

SEQ ID NO: 105229 - DNA, 3213 bp, synthetic construct
  misc_feature 1..3213: note = Description of Artificial Sequence: Synthetic coding sequence
  source 1..3213: mol_type = other DNA
atgatcaagagagtgcagaacctgctgggccactacctgatccacggcttcagagtgagacccgagcccaacggcgacctggacctggaggccatggtggccgtgttcggcagcaagggcctgagagtggtgaagatcagctggggccagggccacttctgggagctgtggagaagcggcctgtggaacatgagcgactggatctgggacgccagatggctggagggcaacatcgccctggccctgggccacaacagcgtggtgctgtacgaccccgtggtgggctgcatcctgcaggaggtgccctgcaccgacagatgcaccctgagcagcgcctgcctgatcggcgacgcctggaaggagctgaccatcgtggccggcgccgtgagcaaccagctgctggtgtggtaccccgccaccgccctggccgacaacaagcccgtggcccccgacagaagaatcagcggccacgtgggcatcatcttcagcatgagctacctggagagcaagggcctgctggccaccgccagcgaggacagaagcgtgagaatctggaaggtgggcgacctgagagtgcccggcggcagagtgcagaacatcggccactgcttcggccacagcgccagagtgtggcaggtgaagctgctggagaactacctgatcagcgccggcgaggactgcgtgtgcctggtgtggagccacgagggcgagatcctgcaggccttcagaggccaccagggcagaggcatcagagccatcgccgcccacgagagacaggcctgggtgatcaccggcggcgacgacagcggcatcagactgtggcacctggtgggcagaggctacagaggcctgggcgtgagcgccctgtgcttcaagagcagaagcagacccggcaccctgaaggccgtgaccctggccggcagctggagactgctggccgtgaccgacaccggcgccctgtacctgtacgacgtggaggtgaagtgctgggagcagctgctggaggacaagcacttccagagctactgcctgctggaggccgcccccggccccgagggcttcggcctgtgcgccatggccaacggcgagggcagagtgaaggtggtgcccatcaacacccccaccgccgccgtggaccagaccctgttccccggcaaggtgcacagcctgagctgggccctgagaggctacgaggagctgctgctgctggccagcggccccggcggcgtggtggcctgcctggagatcagcgccgcccccagcggcaaggccatcttcgtgaaggagagatgcagatacctgctgccccccagcaagcagagatggcacacctgcagcgccttcctgccccccggcgacttcctggtgtgcggcgacagaagaggcagcgtgctgctgttccccagcagacccggcctgctgaaggaccccggcgtgggcggcaaggccagagccggcgccggcgcccccgtggtgggcagcggcagcagcggcggcggcaacgccttcaccggcctgggccccgtgagcaccctgcccagcctgcacggcaagcagggcgtgaccagcgtgacctgccacggcggctacgtgtacaccaccggcagagacggcgcctactaccagctgttcgtgagagacggccagctgcagcccgtgctgagacagaagagctgcagaggcatgaactggctggccggcctgagaatcgtgcccgacggcagcatggtgatcctgggcttccacgccaacgagttcgtggtgtggaaccccagaagccacgagaagctgcacatcgtgaactgcggcggcggccacagaagctgggccttcagcgacaccgaggccgccatggccttcgcctacctgaaggacggcgacgtgatgctgtacagagccctgggcggctgcaccagaccccacgtgatcctgagagagggcctgcacggcagagagatcacctgcgtgaagagagtgggcaccatcaccctgggccccgagtacggcgtgcccagcttcatgcagcccgacgacctggagcccggcagcgagggccccgacctgaccgacatcgtgatcacctgcagcgaggacaccaccgtgtgcgtgctggccctgcccaccaccaccggcagcgcccacgccctgaccgccgtgtgcaaccacatcagcagcgtgagagccgtggccgtgtggggcatcggcacccccggcggcccccaggacccccagcccggcctgaccgcccacgtggtgagcgccggcggcagagccgagatgcactgcttcagcatcatggtgacccccgaccccagcacccccagcagactggcctgccacgtgatgcacctgagcagccacagactggacgagtactgggacagacagagaaacagacacagaatggtgaaggtggaccccgagaccagatacatgagcctggccgtgtgcgagctggaccagcccggcctgggccccctggtggccgccgcctgcagcgacggcgccgtgagactgttcctgctgcaggacagcggcagaatcctgcagctgctggccgagaccttccaccacaagagatgcgtgctgaaggtgcacagcttcacccacgaggcccccaaccagagaagaagactgctgctgtgcagcgccgccaccgacggcagcctggccttctgggacctgaccaccatgctggaccacgacagcaccgtgctggagccccccgtggaccccggcctgccctacagactgggcacccccagcctgaccctgcaggcccacagctgcggcatcaacagcctgcacaccctgcccaccagagagggccaccacctggtggccagcggcagcgaggacggcagcctgcacgtgttcgtgctggccgtggagatgctgcagctggaggaggccgtgggcgaggccggcctggtgccccagctgagagtgctggaggagtacagcgtgccctgcgcccacgccgcccacgtgaccggcctgaagatcctgagccccagcatcatggtgagcgccagcatcgaccagagactgaccttctggagactgggccacggcgagcccaccttcatgaacagcaccgtgttccacgtgcccgacgtggccgacatggactgctggcccgtgagccccgagttcggccacagatgcgccctgggcggccagggcctggaggtgtacaactggtacgactag

SEQ ID NO: 105230 - DNA, 4557 bp, synthetic construct
  misc_feature 1..4557: note = Description of Artificial Sequence: Synthetic coding sequence
  source 1..4557: mol_type = other DNA
atggccgccgtgggcagcggcggctacgccagaaacgacgccggcgagaagctgcccagcgtgatggccggcgtgcccgccagaagaggccagagcagccccccccccgccccccccatctgcctgagaagaagaaccagactgagcaccgccagcgaggagaccgtgcagaacagagtgagcctggagaaggtgctgggcatcaccgcccagaacagcagcggcctgacctgcgaccccggcaccggccacgtggcctacctggccggctgcgtggtggtgatcctggaccccaaggagaacaagcagcagcacatcttcaacaccgccagaaagagcctgagcgccctggccttcagccccgacggcaagtacatcgtgaccggcgagaacggccacagacccgccgtgagaatctgggacgtggaggagaagaaccaggtggccgagatgctgggccacaagtacggcgtggcctgcgtggccttcagccccaacatgaagcacatcgtgagcatgggctaccagcacgacatggtgctgaacgtgtgggactggaagaaggacatcgtggtggccagcaacaaggtgagctgcagagtgatcgccctgagcttcagcgaggacagcagctacttcgtgaccgtgggcaacagacacgtgagattctggttcctggaggtgagcaccgagaccaaggtgaccagcaccgtgcccctggtgggcagaagcggcatcctgggcgagctgcacaacaacatcttctgcggcgtggcctgcggcagaggcagaatggccggcagcaccttctgcgtgagctacagcggcctgctgtgccagttcaacgagaagagagtgctggagaagtggatcaacctgaaggtgagcctgagcagctgcctgtgcgtgagccaggagctgatcttctgcggctgcaccgacggcatcgtgagaatcttccaggcccacagcctgcactacctggccaacctgcccaagccccactacctgggcgtggacgtggcccagggcctggagcccagcttcctgttccacagaaaggccgaggccgtgtaccccgacaccgtggccctgaccttcgaccccatccaccagtggctgagctgcgtgtacaaggaccacagcatctacatctgggacgtgaaggacatcaacagagtgggcaaggtgtggagcgagctgttccacagcagctacgtgtggaacgtggaggtgtaccccgagttcgaggaccagagagcctgcctgcccagcggcagcttcctgacctgcagcagcgacaacaccatcagattctggaacctggacagcagccccgacagccactggcagaagaacatcttcagcaacaccctgctgaaggtggtgtacgtggagaacgacatccagcacctgcaggacatgagccacttccccgacagaggcagcgagaacggcacccccatggacgtgaaggccggcgtgagagtgatgcaggtgagccccgacggccagcacctggccagcggcgacagaagcggcaacctgagaatccacgagctgcacttcatggacgagctggtgaaggtggaggcccacgacgccgaggtgctgtgcctggagtacagcaagcccgagaccggcctgaccctgctggccagcgccagcagagacagactgatccacgtgctgaacgtggagaagaactacaacctggagcagaccctggacgaccacagcagcagcatcaccgccatcaagttcgccggcaacagagacatccagatgatcagctgcggcgccgacaagagcatctacttcagaagcgcccagcagggcagcgacggcctgcacttcgtgagaacccaccacgtggccgagaagaccaccctgtacgacatggacatcgacatcacccagaagtacgtggccgtggcctgccaggacagaaacgtgagagtgtacaacaccgtgaacggcaagcagaagaagtgctacaagggcagccagggcgacgagggcagcctgctgaaggtgcacgtggaccccagcggcaccttcctggccaccagctgcagcgacaagagcatcagcgtgatcgacttctacagcggcgagtgcatcgccaagatgttcggccacagcgagatcatcaccagcatgaagttcacctacgactgccaccacctgatcaccgtgagcggcgacagctgcgtgttcatctggcacctgggccccgagatcaccaactgcatgaagcagcacctgctggagatcgaccacagacagcagcagcagcacaccaacgacaagaagagaagcggccaccccagacaggacacctacgtgagcacccccagcgagatccacagcctgagccccggcgagcagaccgaggacgacctggaggaggagtgcgagcccgaggagatgctgaagacccccagcaaggacagcctggaccccgaccccagatgcctgctgaccaacggcaagctgcccctgtgggccaagagactgctgggcgacgacgacgtggccgacggcctggccttccacgccaagagaagctaccagccccacggcagatgggccgagagagccggccaggagcccctgaagaccatcctggacgcccaggacctggactgctacttcacccccatgaagcccgagagcctggagaacagcatcctggacagcctggagccccagagcctggccagcctgctgagcgagagcgagagcccccaggaggccggcagaggccaccccagcttcctgccccagcagaaggagagcagcgaggccagcgagctgatcctgtacagcctggaggccgaggtgaccgtgaccggcaccgacagccagtactgcagaaaggaggtggaggccggccccggcgaccagcagggcgacagctacctgagagtgagcagcgacagccccaaggaccagagcccccccgaggacagcggcgagagcgaggccgacctggagtgcagcttcgccgccatccacagccccgcccccccccccgaccccgcccccagattcgccaccagcctgccccacttccccggctgcgccggccccaccgaggacgagctgagcctgcccgagggccccagcgtgcccagcagcagcctgccccagacccccgagcaggagaagttcctgagacaccacttcgagaccctgaccgagagcccctgcagagccctgggcgacgtggaggccagcgaggccgaggaccacttcttcaaccccagactgagcatcagcacccagttcctgagcagcctgcagaaggccagcagattcacccacaccttcccccccagagccacccagtgcctggtgaagagccccgaggtgaagctgatggacagaggcggcagccagcccagagccggcaccggctacgccagccccgacagaacccacgtgctggccgccggcaaggccgaggagaccctggaggcctggagacccccccccccctgcctgaccagcctggccagctgcgtgcccgccagcagcgtgctgcccaccgacagaaacctgcccacccccaccagcgcccccacccccggcctggcccagggcgtgcacgcccccagcacctgcagctacatggaggccaccgccagcagcagagccagaatcagcagaagcatcagcctgggcgacagcgagggccccatcgtggccaccctggcccagcccctgagaagacccagcagcgtgggcgagctggccagcctgggccaggagctgcaggccatcaccaccgccaccacccccagcctggacagcgagggccaggagcccgccctgagaagctggggcaaccacgaggccagagccaacctgagactgaccctgagcagcgcctgcgacggcctgctgcagccccccgtggacacccagcccggcgtgaccgtgcccgccgtgagcttccccgcccccagccccgtggaggagagcgccctgagactgcacggcagcgccttcagacccagcctgcccgcccccgagagccccggcctgcccgcccaccccagcaacccccagctgcccgaggccagacccggcatccccggcggcaccgccagcctgctggagcccaccagcggcgccctgggcctgctgcagggcagccccgccagatggagcgagccctgggtgcccgtggaggccctgccccccagccccctggagctgagcagagtgggcaacatcctgcacagactgcagaccaccttccaggaggccctggacctgtacagagtgctggtgagcagcggccaggtggacaccggccagcagcaggccagaaccgagctggtgagcaccttcctgtggatccacagccagctggaggccgagtgcctggtgggcaccagcgtggcccccgcccaggccctgcccagccccggcccccccagcccccccaccctgtaccccctggccagccccgacctgcaggccctgctggagcactacagcgagctgctggtgcaggccgtgagaagaaaggccagaggccactag

SEQ ID NO: 105231 - DNA, 1245 bp, synthetic construct
  misc_feature 1..1245: note = Description of Artificial Sequence: Synthetic coding sequence
  source 1..1245: mol_type = other DNA
atggccgccgtgggcagcggcggctacgccagaaacgacgccggcgagaagctgcccagcgtgatggccggcgtgcccgccagaagaggccagagcagccccccccccgccccccccatctgcctgagaagaagaaccagactgagcaccgccagcgaggagaccgtgcagaacagagtgagcctggagaaggtgctgggcatcaccgcccagaacagcagcggcctgacctgcgaccccggcaccggccacgtggcctacctggccggctgcgtggtggtgatcctggaccccaaggagaacaagcagcagcacatcttcaacaccgccagaaagagcctgagcgccctggccttcagccccgacggcaagtacatcgtgaccggcgagaacggccacagacccgccgtgagaatctgggacgtggaggagaagaaccaggtggccgagatgctgggccacaagtacggcgtggcctgcgtggccttcagccccaacatgaagcacatcgtgagcatgggctaccagcacgacatggtgctgaacgtgtgggactggaagaaggacatcgtggtggccagcaacaaggtgagctgcagagtgatcgccctgagcttcagcgaggacagcagctacttcgtgaccgtgggcaacagacacgtgagattctggttcctggaggtgagcaccgagaccaaggtgaccagcaccgtgcccctggtgggcagaagcggcatcctgggcgagctgcacaacaacatcttctgcggcgtggcctgcggcagaggcagaatggccggcagcaccttctgcgtgagctacagcggcctgctgtgccagttcaacgagaagagagtgctggagaagtggatcaacctgaaggtgagcctgagcagctgcctgtgcgtgagccaggagctgatcttctgcggctgcaccgacggcatcgtgagaatcttccaggcccacagcctgcactacctggccaacctgcccaagccccactacctgggcgtggacgtggcccagggcctggagcccagcttcctgttccacagaaaggccgaggccgtgtaccccgacaccgtggccctgaccttcgaccccatccaccagtggctgagctgcgtgtacaaggaccacagcatctacatctgggacgtgaaggacatcaacagagtgggcaaggtgtggagcgagctgttccacagcagctacgtgtggaacgtggaggccctgagctag

SEQ ID NO: 105232 - DNA, 1452 bp, synthetic construct
  misc_feature 1..1452: note = Description of Artificial Sequence: Synthetic coding sequence
  source 1..1452: mol_type = other DNA
atggccgccgtgggcagcggcggctacgccagaaacgacgccggcgagaagctgcccagcgtgatggccggcgtgcccgccagaagaggccagagcagccccccccccgccccccccatctgcctgagaagaagaaccagactgagcaccgccagcgaggagaccgtgcagaacagagtgagcctggagaaggtgctgggcatcaccgcccagaacagcagcggcctgacctgcgaccccggcaccggccacgtggcctacctggccggctgcgtggtggtgatcctggaccccaaggagaacaagcagcagcacatcttcaacaccgccagaaagagcctgagcgccctggccttcagccccgacggcaagtacatcgtgaccggcgagaacggccacagacccgccgtgagaatctgggacgtggaggagaagaaccaggtggccgagatgctgggccacaagtacggcgtggcctgcgtggccttcagccccaacatgaagcacatcgtgagcatgggctaccagcacgacatggtgctgaacgtgtgggactggaagaaggacatcgtggtggccagcaacaaggtgagctgcagagtgatcgccctgagcttcagcgaggacagcagctacttcgtgaccgtgggcaacagacacgtgagattctggttcctggaggtgagcaccgagaccaaggtgaccagcaccgtgcccctggtgggcagaagcggcatcctgggcgagctgcacaacaacatcttctgcggcgtggcctgcggcagaggcagaatggccggcagcaccttctgcgtgagctacagcggcctgctgtgccagttcaacgagaagagagtgctggagaagtggatcaacctgaaggtgagcctgagcagctgcctgtgcgtgagccaggagctgatcttctgcggctgcaccgacggcatcgtgagaatcttccaggcccacagcctgcactacctggccaacctgcccaagccccactacctgggcgtggacgtggcccagggcctggagcccagcttcctgttccacagaaaggccgaggccgtgtaccccgacaccgtggccctgaccttcgaccccatccaccagtggctgagctgcgtgtacaaggaccacagcatctacatctgggacgtgaaggacatcaacagagtgggcaaggtgtggagcgagctgttccacagcagctacgtgtggaacgtggaggtgtaccccgagttcgaggaccagagagcctgcctgcccagcggcagcttcctgacctgcagcagcgacaacaccatcagattctggaacctggacagcagccccgacagccactggcagaagaacatcttcagcaacctggcccccgccctgcagatgtgcggcagaggccacagcagacagcccaacacccccagccccggcgagatcgccagctag

SEQ ID NO: 105233 - DNA, 4572 bp, synthetic construct
  misc_feature 1..4572: note = Description of Artificial Sequence: Synthetic coding sequence
  source 1..4572: mol_type = other DNA
atggccgccgtgggcagcggcggctacgccagaaacgacgccggcgagaagctgcccagcgtgatggccggcgtgcccgccagaagaggccagagcagccccccccccgccccccccatctgcctgagaagaagaaccagactgagcaccgccagcgaggagaccgtgcagaacagagtgagcctggagaaggtgctgggcatcaccgcccagaacagcagcggcctgacctgcgaccccggcaccggccacgtggcctacctggccggctgcgtggtggtgatcctggaccccaaggagaacaagcagcagcacatcttcaacaccgccagaaagagcctgagcgccctggccttcagccccgacggcaagtacatcgtgaccggcgagaacggccacagacccgccgtgagaatctgggacgtggaggagaagaaccaggtggccgagatgctgggccacaagtacggcgtggcctgcgtggccttcagccccaacatgaagcacatcgtgagcatgggctaccagcacgacatggtgctgaacgtgtgggactggaagaaggacatcgtggtggccagcaacaaggtgagctgcagagtgatcgccctgagcttcagcgaggacagcagctacttcgtgaccgtgggcaacagacacgtgagattctggttcctggaggtgagcaccgagaccaaggtgaccagcaccgtgcccctggtgggcagaagcggcatcctgggcgagctgcacaacaacatcttctgcggcgtggcctgcggcagaggcagaatggccggcagcaccttctgcgtgagctacagcggcctgctgtgccagttcaacgagaagagagtgctggagaagtggatcaacctgaaggtgagcctgagcagctgcctgtgcgtgagccaggagctgatcttctgcggctgcaccgacggcatcgtgagaatcttccaggcccacagcctgcactacctggccaacctgcccaagccccactacctgggcgtggacgtggcccagggcctggagcccagcttcctgttccacagaaaggccgaggccgtgtaccccgacaccgtggccctgaccttcgaccccatccaccagtggctgagctgcgtgtacaaggaccacagcatctacatctgggacgtgaaggacatcaacagagtgggcaaggtgtggagcgagctgttccacagcagctacgtgtggaacgtggaggtgtaccccgagttcgaggaccagagagcctgcctgcccagcggcagcttcctgacctgcagcagcgacaacaccatcagattctggaacctggacagcagccccgacagccactggcagaagaacatcttcagcaacaccctgctgaaggtggtgtacgtggagaacgacatccagcacctgcaggacatgagccacttccccgacagaggcagcgagaacggcacccccatggacgtgaaggccggcgtgagagtgatgcaggtgagccccgacggccagcacctggccagcggcgacagaagcggcaacctgagaatccacgagctgcacttcatggacgagctggtgaaggtggaggcccacgacgccgaggtgctgtgcctggagtacagcaagcccgagaccggcctgaccctgctggccagcgccagcagagacagactgatccacgtgctgaacgtggagaagaactacaacctggagcagaccctggacgaccacagcagcagcatcaccgccatcaagttcgccggcaacagagacatccagatgatcagctgcggcgccgacaagagcatctacttcagaagcgcccagcagggcagcgacggcctgcacttcgtgagaacccaccacgtggccgagaagaccaccctgtacgacatggacatcgacatcacccagaagtacgtggccgtggcctgccaggacagaaacgtgagagtgtacaacaccgtgaacggcaagcagaagaagtgctacaagggcagccagggcgacgagggcagcctgctgaaggtgcacgtggaccccagcggcaccttcctggccaccagctgcagcgacaagagcatcagcgtgatcgacttctacagcggcgagtgcatcgccaagatgttcggccacagcgagatcatcaccagcatgaagttcacctacgactgccaccacctgatcaccgtgagcggcgacagctgcgtgttcatctggcacctgggccccgagatcaccaactgcatgaagcagcacctgctggagatcgaccacagacagcagcagcagcacaccaacgacaagaagagaagcggccaccccagacaggacacctacgtgagcacccccagcgagatccacagcctgagccccggcgagcagaccgaggacgacctggaggaggagtgcgagcccgaggagatgctgaagacccccagcaaggacagcctggaccccgaccccagatgcctgctgaccaacggcaagctgcccctgtgggccaagagactgctgggcgacgacgacgtggccgacggcctggccttccacgccaagagaagctaccagccccacggcagatgggccgagagagccggccaggagcccctgaagaccatcctggacgcccaggacctggactgctacttcacccccatgaagcccgagagcctggagaacagcatcctggacagcctggagccccagagcctggccagcctgctgagcgagagcgagagcccccaggaggccggcagaggccaccccagcttcctgccccagcagaaggagagcagcgaggccagcgagctgatcctgtacagcctggaggccgaggtgaccgtgaccggcaccgacagccagtactgcagaaaggaggtggaggccggccccggcgaccagcagggcgacagctacctgagagtgagcagcgacagccccaaggaccagagcccccccgaggacagcggcgagagcgaggccgacctggagtgcagcttcgccgccatccacagccccgcccccccccccgaccccgcccccagattcgccaccagcctgccccacttccccggctgcgccggccccaccgaggacgagctgagcctgcccgagggccccagcgtgcccagcagcagcctgccccagacccccgagcaggagaagttcctgagacaccacttcgagaccctgaccgagagcccctgcagagagctgttccccgccgccctgggcgacgtggaggccagcgaggccgaggaccacttcttcaaccccagactgagcatcagcacccagttcctgagcagcctgcagaaggccagcagattcacccacaccttcccccccagagccacccagtgcctggtgaagagccccgaggtgaagctgatggacagaggcggcagccagcccagagccggcaccggctacgccagccccgacagaacccacgtgctggccgccggcaaggccgaggagaccctggaggcctggagacccccccccccctgcctgaccagcctggccagctgcgtgcccgccagcagcgtgctgcccaccgacagaaacctgcccacccccaccagcgcccccacccccggcctggcccagggcgtgcacgcccccagcacctgcagctacatggaggccaccgccagcagcagagccagaatcagcagaagcatcagcctgggcgacagcgagggccccatcgtggccaccctggcccagcccctgagaagacccagcagcgtgggcgagctggccagcctgggccaggagctgcaggccatcaccaccgccaccacccccagcctggacagcgagggccaggagcccgccctgagaagctggggcaaccacgaggccagagccaacctgagactgaccctgagcagcgcctgcgacggcctgctgcagccccccgtggacacccagcccggcgtgaccgtgcccgccgtgagcttccccgcccccagccccgtggaggagagcgccctgagactgcacggcagcgccttcagacccagcctgcccgcccccgagagccccggcctgcccgcccaccccagcaacccccagctgcccgaggccagacccggcatccccggcggcaccgccagcctgctggagcccaccagcggcgccctgggcctgctgcagggcagccccgccagatggagcgagccctgggtgcccgtggaggccctgccccccagccccctggagctgagcagagtgggcaacatcctgcacagactgcagaccaccttccaggaggccctggacctgtacagagtgctggtgagcagcggccaggtggacaccggccagcagcaggccagaaccgagctggtgagcaccttcctgtggatccacagccagctggaggccgagtgcctggtgggcaccagcgtggcccccgcccaggccctgcccagccccggcccccccagcccccccaccctgtaccccctggccagccccgacctgcaggccctgctggagcactacagcgagctgctggtgcaggccgtgagaagaaaggccagaggccactag

SEQ ID NO: 105234 - DNA, 1302 bp, synthetic construct
  misc_feature 1..1302: note = Description of Artificial Sequence: Synthetic coding sequence
  source 1..1302: mol_type = other DNA
ggcggctacgccagaaacgacgccggcgagaagctgcccagcgtgatggccggcgtgcccgccagaagaggccagagcagccccccccccgccccccccatctgcctgagaagaagaaccagactgagcaccgccagcgaggagaccgtgcagaacagagtgagcctggagaaggtgctgggcatcaccgcccagaacagcagcggcctgacctgcgaccccggcaccggccacgtggcctacctggccggcatgtggagaatgggccccgccagcgagagctgcggcgaggacagcatcgcccccagcctgagcagaaccgtgcccggcatgtactgcgtggtggtgatcctggaccccaaggagaacaagcagcagcacatcttcaacaccgccagaaagagcctgagcgccctggccttcagccccgacggcaagtacatcgtgaccggcgagaacggccacagacccgccgtgagaatctgggacgtggaggagaagaaccaggtggccgagatgctgggccacaagtacggcgtggcctgcgtggccttcagccccaacatgaagcacatcgtgagcatgggctaccagcacgacatggtgctgaacgtgtgggactggaagaaggacatcgtggtggccagcaacaaggtgagctgcagagtgatcgccctgagcttcagcgaggacagcagctacttcgtgaccgtgggcaacagacacgtgagattctggttcctggaggtgagcaccgagaccaaggtgaccagcaccgtgcccctggtgggcagaagcggcatcctgggcgagctgcacaacaacatcttctgcggcgtggcctgcggcagaggcagaatggccggcagcaccttctgcgtgagctacagcggcctgctgtgccagttcaacgagaagagagtgctggagaagtggatcaacctgaaggtgagcctgagcagctgcctgtgcgtgagccaggagctgatcttctgcggctgcaccgacggcatcgtgagaatcttccaggcccacagcctgcactacctggccaacctgcccaagccccactacctgggcgtggacgtggcccagggcctggagcccagcttcctgttccacagaaaggccgaggccgtgtaccccgacaccgtggccctgaccttcgaccccatccaccagtggctgagctgcgtgtacaaggaccacagcatctacatctgggacgtgaaggacatcaacagagtgggcaaggtgtggagcgagctgttccacagcagctacgtgtggaacgtggagtag

SEQ ID NO: 105235 - DNA, 2097 bp, synthetic construct
  misc_feature 1..2097: note = Description of Artificial Sequence: Synthetic coding sequence
  source 1..2097: mol_type = other DNA
atgagcgccgtggtggcccagaccctgcacgtgttcggcctgagaagccacgtggccaacaacatcttctacttcgacgagcagatcatcatcttccccagcggcaaccactgcgtgaagtacaacgtggaccagaagtggcagaagttcatccccggcagcgagaagagccagggcatgctggccctgagcatcagccccaacagaagatacctggccatcagcgagaccgtgcaggagaagcccgccatcaccatctacgagctgagcagcatcccctgcagaaagagaaaggtgctgaacaacttcgacttccaggtgcagaagttcatcagcatggccttcagccccgacagcaagtacctgctggcccagaccagcccccccgagagcaacctggtgtactggctgtgggagaagcagaaggtgatggccatcgtgagaatcgacacccagaacaaccccgtgtaccaggtgagcttcagcccccaggacaacacccaggtgtgcgtgaccggcaacggcatgttcaagctgctgagattcgccgagggcaccctgaagcagaccagcttccagagaggcgagccccagaactacctggcccacacctgggtggccgacgacaagatcgtggtgggcaccgacaccggcaagctgttcctgttcgagagcggcgaccagagatgggagaccagcatcatggtgaaggagcccaccaacggcagcaagagcctggacgtgatccaggagagcgagagcctgatcgagttcccccccgtgagcagccccctgcccagctacgagcagatggtggccgccagcagccacagccagatgagcatgccccaggtgttcgccatcgccgcctacagcaagggcttcgcctgcagcgccggccccggcagagtgctgctgttcgagaagatggaggagaaggacttctacagagagagcagagagatcagaatccccgtggacccccagagcaacgaccccagccagagcgacaagcaggacgtgctgtgcctgtgcttcagccccagcgaggagaccctggtggccagcaccagcaagaaccagctgtacagcatcaccatgagcctgaccgagatcagcaagggcgagcccgcccacttcgagtacctgatgtaccccctgcacagcgcccccatcaccggcctggccacctgcatcagaaagcccctgatcgccacctgcagcctggacagaagcatcagactgtggaactacgagaccaacaccctggagctgttcaaggagtaccaggaggaggcctacagcatcagcctgcaccccagcggccacttcatcgtggtgggcttcgccgacaagctgagactgatgaacctgctgatcgacgacatcagaagcttcaaggagtacagcgtgagaggctgcggcgagtgcagcttcagcaacggcggccacctgttcgccgccgtgaacggcaacgtgatccacgtgtacaccaccaccagcctggagaacatcagcagcctgaagggccacaccggcaagatcagaagcatcgtgtggaacgccgacgacagcaagctgatcagcggcggcaccgacggcgccgtgtacgagtggaacctgagcaccggcaagagagagaccgagtgcgtgctgaagagctgcagctacaactgcgtgaccgtgagccccgacgccaagatcatcttcgccgtgggcagcgaccacaccctgaaggagatcgccgacagcctgatcctgagagagatcagcgccttcgacgtgacctacaccgccatcgtgatcagccacagcggcagaatgatgttcgtgggcaccagcgtgggcaccatcagagccatgaagtaccccctgcccctgcagaaggagttcaacgagtaccaggcccacgccggccccatcaccaaggtgagcagagccctgagccccggcacccagagccacacctgcctgctgagagccctgttcatccccagcaccagccagtgcctgttcagcctgctgctgctgagctacctgttcatccaccacagcctgaaccaccacctgctgaccatgaacatcctgttcgtgtag

SEQ ID NO: 105236 - DNA, 501 bp, synthetic construct
  misc_feature 1..501: note = Description of Artificial Sequence: Synthetic coding sequence
  source 1..501: mol_type = other DNA
atgagcgccgtggtggcccagaccctgcacgtgttcggcctgagaagccacgtggccaacaacatcttctacttcgacgagcagatcatcatcttccccagcggcaaccactgcgtgaagtacaacgtggaccagaagtggcagaagttcatccccggcagcgagaagagccagggcatgctggccctgagcatcagccccaacagaagatacctggccatcagcgagaccgtgcaggagaagcccgccatcaccatctacgagctgagcagcatcccctgcagaaagagaaaggtgctgaacaacttcgacttccaggtgcagaagttcatcagcatggccttcagccccgacagcaagtacctgctggcccagaccagcccccccgagagcaacctggtgtactggctgtgggagaagcagaaggtgatggccatcgtgagaatcgacacccagaacaaccccgtgtaccaggtgagcttcagcccccaggacaactag

SEQ ID NO: 105237 - DNA, 4473 bp, synthetic construct
  misc_feature 1..4473: note = Description of Artificial Sequence: Synthetic coding sequence
  source 1..4473: mol_type = other DNA
atggccggcaacagcctggtgctgcccatcgtgctgtggggcagaaaggcccccacccactgcatcagcgccgtgctgctgaccgacgacggcgccaccatcgtgaccggctgccacgacggccagatctgcctgtgggacctgagcgtggagctgcagatcaaccccagagccctgctgttcggccacaccgccagcatcacctgcctgagcaaggcctgcgccagcagcgacaagcagtacatcgtgagcgccagcgagagcggcgagatgtgcctgtgggacgtgagcgacggcagatgcatcgagttcaccaagctggcctgcacccacaccggcatccagttctaccagttcagcgtgggcaaccagagagagggcagactgctgtgccacggccactaccccgagatcctggtggtggacgccaccagcctggaggtgctgtacagcctggtgagcaagatcagccccgactggatcagcagcatgagcatcatcagaagccacagaacccaggaggacaccgtggtggccctgagcgtgaccggcatcctgaaggtgtggatcgtgaccagcgagatcagcgacatgcaggacaccgagcccatcttcgaggaggagagcaagcccatctactgccagaactgccagagcatcagcttctgcgccttcacccagagaagcctgctggtggtgtgcagcaagtactggagagtgttcgacgccggcgactacagcctgctgtgcagcggccccagcgagaacggccagacctggaccggcggcgacttcgtgagcagcgacaaggtgatcatctggaccgagaacggccagagctacatctacaagctgcccgccagctgcctgcccgccagcgacagcttcagaagcgacgtgggcaaggccgtggagaacctgatcccccccgtgcagcacatcctgctggacagaaaggacaaggagctgctgatctgcccccccgtgaccagattcttctacggctgcagagagtacttccacaagctgctgatccagggcgacagcagcggcagactgaacatctggaacatcagcgacaccgccgacaagcagggcagcgaggagggcctggccatgaccaccagcatcagcctgcaggaggccttcgacaagctgaacccctgccccgccggcatcatcgaccagctgagcgtgatccccaacagcaacgagcccctgaaggtgaccgccagcgtgtacatccccgcccacggcagactggtgtgcggcagagaggacggcagcatcgtgatcgtgcccgccacccagaccgccatcgtgcagctgctgcagggcgagcacatgctgagaagaggctggcccccccacagaaccctgagaggccacagaaacaaggtgacctgcctgctgtacccccaccaggtgagcgccagatacgaccagagatacctgatcagcggcggcgtggacttcagcgtgatcatctgggacatcttcagcggcgagatgaagcacatcttctgcgtgcacggcggcgagatcacccagctgctggtgccccccgagaactgcagcgccagagtgcagcactgcatctgcagcgtggccagcgaccacagcgtgggcctgctgagcctgagagagaagaagtgcatcatgctggccagcagacacctgttccccatccaggtgatcaagtggagacccagcgacgactacctggtggtgggctgcagcgacggcagcgtgtacgtgtggcagatggacaccggcgccctggacagatgcgtgatgggcatcaccgccgtggagatcctgaacgcctgcgacgaggccgtgcccgccgccgtggacagcctgagccaccccgccgtgaacctgaagcaggccatgaccagaagaagcctggccgccctgaagaacatggcccaccacaagctgcagaccctggccaccaacctgctggccagcgaggccagcgacaagggcaacctgcccaagtacagccacaacagcctgatggtgcaggccatcaagaccaacctgaccgaccccgacatccacgtgctgttcttcgacgtggaggccctgatcatccagctgctgaccgaggaggccagcagacccaacaccgccctgatcagccccgagaacctgcagaaggccagcggcagcagcgacaagggcggcagcttcctgaccggcaagagagccgccgtgctgttccagcaggtgaaggagaccatcaaggagaacatcaaggagcacctgctggacgacgaggaggaggacgaggagatcatgagacagagaagagaggagagcgaccccgagtacagaagcagcaagagcaagcccctgaccctgctggagtacaacctgaccatggacaccgccaagctgttcatgagctgcctgcacgcctggggcctgaacgaggtgctggacgaggtgtgcctggacagactgggcatgctgaagccccactgcaccgtgagcttcggcctgctgagcagaggcggccacatgagcctgatgctgcccggctacaaccagcccgcctgcaagctgagccacggcaagaccgaggtgggcagaaagctgcccgccagcgagggcgtgggcaagggcacctacggcgtgagcagagccgtgaccacccagcacctgctgagcatcatcagcctggccaacaccctgatgagcatgaccaacgccaccttcatcggcgaccacatgaagaagggccccaccagaccccccagacccagcacccccgacctgagcaaggccagaggcagcccccccaccagcagcaacatcgtgcagggccagatcaagcaggtggccgcccccgtggtgagcgccagaagcgacgccgaccacagcggcagcgacccccccagcgcccccgccctgcacacctgcttcctggtgaacgagggctggagccagctggccgccatgcactgcgtgatgctgcccgacctgctgggcctggacaagttcagaccccccctgctggagatgctggccagaagatggcaggacagatgcctggaggtgagagaggccgcccaggccctgctgctggccgagctgagaagaatcgagcaggccggcagaaaggaggccatcgacgcctgggccccctacctgccccagtacatcgaccacgtgatcagccccggcgtgaccagcgaggccgcccagaccatcaccaccgcccccgacgccagcggccccgaggccaaggtgcaggaggaggagcacgacctggtggacgacgacatcaccaccggctgcctgagcagcgtgccccagatgaagaagatcagcaccagctacgaggagagaagaaagcaggccaccgccatcgtgctgctgggcgtgatcggcgccgagttcggcgccgagatcgagccccccaagctgctgaccagacccagaagcagcagccagatccccgagggcttcggcctgaccagcggcggcagcaactacagcctggccagacacacctgcaaggccctgaccttcctgctgctgcagccccccagccccaagctgcccccccacagcaccatcagaagaaccgccatcgacctgatcggcagaggcttcaccgtgtgggagccctacatggacgtgagcgccgtgctgatgggcctgctggagctgtgcgccgacgccgagaagcagctggccaacatcaccatgggcctgcccctgagccccgccgccgacagcgccagaagcgccagacacgccctgagcctgatcgccaccgccagaccccccgccttcatcaccaccatcgccaaggaggtgcacagacacaccgccctggccgccaacacccagagccagcagaacatgcacaccaccaccctggccagagccaagggcgagatcctgagagtgatcgagatcctgatcgagaagatgcccaccgacgtggtggacctgctggtggaggtgatggacatcatcatgtactgcctggagggcagcctggtgaagaagaagggcctgcaggagtgcttccccgccatctgcagattctacatggtgagctactacgagagaaaccacagaatcgccgtgggcgccagacacggcagcgtggccctgtacgacatcagaaccggcaagtgccagaccatccacggccacaagggccccatcaccgccgtggccttcgcccccgacggcagatacctggccacctacagcaacaccgacagccacatcagcttctggcagatgaacaccagcctgctgggcagcatcggcatgctgaacagcgccccccagctgagatgcatcaagacctaccaggtgccccccgtgcagcccgccagccccggcagccacaacgccctgaagctggccagactgatctggaccagcaacagaaacgtgatcctgatggcccacgacggcaaggagcacagattcatggtgtag

SEQ ID NO: 105238 - DNA, 4374 bp, synthetic construct
  misc_feature 1..4374: note = Description of Artificial Sequence: Synthetic coding sequence
  source 1..4374: mol_type = other DNA
atggccggcaacagcctggtgctgcccatcgtgctgtggggcagaaaggcccccacccactgcatcagcgccgtgctgctgaccgacgacggcgccaccatcgtgaccggctgccacgacggccagatctgcctgtgggacctgagcgtggagctgcagatcaaccccagagccctgctgttcggccacaccgccagcatcacctgcctgagcaaggcctgcgccagcagcgacaagcagtacatcgtgagcgccagcgagagcggcgagatgtgcctgtgggacgtgagcgacggcagatgcatcgagttcaccaagctggcctgcacccacaccggcatccagttctaccagttcagcgtgggcaaccagagagagggcagactgctgtgccacggccactaccccgagatcctggtggtggacgccaccagcctggaggtgctgtacagcctggtgagcaagatcagccccgactggatcagcagcatgagcatcatcagaagccacagaacccaggaggacaccgtggtggccctgagcgtgaccggcatcctgaaggtgtggatcgtgaccagcgagatcagcgacatgcaggacaccgagcccatcttcgaggaggagagcaagcccatctactgccagaactgccagagcatcagcttctgcgccttcacccagagaagcctgctggtggtgtgcagcaagtactggagagtgttcgacgccggcgactacagcctgctgtgcagcggccccagcgagaacggccagacctggaccggcggcgacttcgtgagcagcgacaaggtgatcatctggaccgagaacggccagagctacatctacaagctgcccgccagctgcctgcccgccagcgacagcttcagaagcgacgtgggcaaggccgtggagaacctgatcccccccgtgcagcacatcctgctggacagaaaggacaaggagctgctgatctgcccccccgtgaccagattcttctacggctgcagagagtacttccacaagctgctgatccagggcgacagcagcggcagactgaacatctggaacatcagcgacaccgccgacaagcagggcagcgaggagggcctggccatgaccaccagcatcagcctgcaggaggccttcgacaagctgaacccctgccccgccggcatcatcgaccagctgagcgtgatccccaacagcaacgagcccctgaaggtgaccgccagcgtgtacatccccgcccacggcagactggtgtgcggcagagaggacggcagcatcgtgatcgtgcccgccacccagaccgccatcgtgcagctgctgcagggcgagcacatgctgagaagaggctggcccccccacagaaccctgagaggccacagaaacaaggtgacctgcctgctgtacccccaccaggtgagcgccagatacgaccagagatacctgatcagcggcggcgtggacttcagcgtgatcatctgggacatcttcagcggcgagatgaagcacatcttctgcgtgcacggcggcgagatcacccagctgctggtgccccccgagaactgcagcgccagagtgcagcactgcatctgcagcgtggccagcgaccacagcgtgggcctgctgagcctgagagagaagaagtgcatcatgctggccagcagacacctgttccccatccaggtgatcaagtggagacccagcgacgactacctggtggtgggctgcagcgacggcagcgtgtacgtgtggcagatggacaccggcgccctggacagatgcgtgatgggcatcaccgccgtggagatcctgaacgcctgcgacgaggccgtgcccgccgccgtggacagcctgagccaccccgccgtgaacctgaagcaggccatgaccagaagaagcctggccgccctgaagaacatggcccaccacaagctgcagaccctggccaccaacctgctggccagcgaggccagcgacaagggcaacctgcccaagtacagccacaacagcctgatggtgcaggccatcaagaccaacctgaccgaccccgacatccacgtgctgttcttcgacgtggaggccctgatcatccagctgctgaccgaggaggccagcagacccaacaccgccctgatcagccccgagaacctgcagaaggccagcggcagcagcgacaagggcggcagcttcctgaccggcaagagagccgccgtgctgttccagcaggtgaaggagaccatcaaggagaacatcaaggagcacctgctggacgacgaggaggaggacgaggagatcatgagacagagaagagaggagagcgaccccgagtacagaagcagcaagagcaagcccctgaccctgctggagtacaacctgaccatggacaccgccaagctgttcatgagctgcctgcacgcctggggcctgaacgaggtgctggacgaggtgtgcctggacagactgggcatgctgaagccccactgcaccgtgagcttcggcctgctgagcagaggcggccacatgagcctgatgctgcccggctacaaccagcccgcctgcaagctgagccacggcaagaccgaggtgggcagaaagctgcccgccagcgagggcgtgggcaagggcacctacggcgtgagcagagccgtgaccacccagcacctgctgagcatcatcagcctggccaacaccctgatgagcatgaccaacgccaccttcatcggcgaccacatgaagaagggccccaccagaccccccagacccagcacccccgacctgagcaaggccagaggcagcccccccaccagcagcaacatcgtgcagggccagatcaagcagggctggagccagctggccgccatgcactgcgtgatgctgcccgacctgctgggcctggacaagttcagaccccccctgctggagatgctggccagaagatggcaggacagatgcctggaggtgagagaggccgcccaggccctgctgctggccgagctgagaagaatcgagcaggccggcagaaaggaggccatcgacgcctgggccccctacctgccccagtacatcgaccacgtgatcagccccggcgtgaccagcgaggccgcccagaccatcaccaccgcccccgacgccagcggccccgaggccaaggtgcaggaggaggagcacgacctggtggacgacgacatcaccaccggctgcctgagcagcgtgccccagatgaagaagatcagcaccagctacgaggagagaagaaagcaggccaccgccatcgtgctgctgggcgtgatcggcgccgagttcggcgccgagatcgagccccccaagctgctgaccagacccagaagcagcagccagatccccgagggcttcggcctgaccagcggcggcagcaactacagcctggccagacacacctgcaaggccctgaccttcctgctgctgcagccccccagccccaagctgcccccccacagcaccatcagaagaaccgccatcgacctgatcggcagaggcttcaccgtgtgggagccctacatggacgtgagcgccgtgctgatgggcctgctggagctgtgcgccgacgccgagaagcagctggccaacatcaccatgggcctgcccctgagccccgccgccgacagcgccagaagcgccagacacgccctgagcctgatcgccaccgccagaccccccgccttcatcaccaccatcgccaaggaggtgcacagacacaccgccctggccgccaacacccagagccagcagaacatgcacaccaccaccctggccagagccaagggcgagatcctgagagtgatcgagatcctgatcgagaagatgcccaccgacgtggtggacctgctggtggaggtgatggacatcatcatgtactgcctggagggcagcctggtgaagaagaagggcctgcaggagtgcttccccgccatctgcagattctacatggtgagctactacgagagaaaccacagaatcgccgtgggcgccagacacggcagcgtggccctgtacgacatcagaaccggcaagtgccagaccatccacggccacaagggccccatcaccgccgtggccttcgcccccgacggcagatacctggccacctacagcaacaccgacagccacatcagcttctggcagatgaacaccagcctgctgggcagcatcggcatgctgaacagcgccccccagctgagatgcatcaagacctaccaggtgccccccgtgcagcccgccagccccggcagccacaacgccctgaagctggccagactgatctggaccagcaacagaaacgtgatcctgatggcccacgacggcaaggagcacagattcatggtgtag

SEQ ID NO: 105239 - DNA, 4374 bp, synthetic construct; identical to SEQ ID NO: 105238
  misc_feature 1..4374: note = Description of Artificial Sequence: Synthetic coding sequence
  source 1..4374: mol_type = other DNA

SEQ ID NO: 105240 - DNA, 2448 bp, synthetic construct
  misc_feature 1..2448: note = Description of Artificial Sequence: Synthetic coding sequence
  source 1..2448: mol_type = other DNA
atggccggcaacagcctggtgctgcccatcgtgctgtggggcagaaaggcccccacccactgcatcagcgccgtgctgctgaccgacgacggcgccaccatcgtgaccggctgccacgacggccagatctgcctgtgggacctgagcgtggagctgcagatcaaccccagagccctgctgttcggccacaccgccgtgctgttccagcaggtgaaggagaccatcaaggagaacatcaaggagcacctgctggacgacgaggaggaggacgaggagatcatgagacagagaagagaggagagcgaccccgagtacagaagcagcaagagcaagcccctgaccctgctggagtacaacctgaccatggacaccgccaagctgttcatgagctgcctgcacgcctggggcctgaacgaggtgctggacgaggtgtgcctggacagactgggcatgctgaagccccactgcaccgtgagcttcggcctgctgagcagaggcggccacatgagcctgatgctgcccggctacaaccagcccgcctgcaagctgagccacggcaagaccgaggtgggcagaaagctgcccgccagcgagggcgtgggcaagggcacctacggcgtgagcagagccgtgaccacccagcacctgctgagcatcatcagcctggccaacaccctgatgagcatgaccaacgccaccttcatcggcgaccacatgaagaagggccccaccagaccccccagacccagcacccccgacctgagcaaggccagaggcagcccccccaccagcagcaacatcgtgcagggccagatcaagcaggtggccgcccccgtggtgagcgccagaagcgacgccgaccacagcggcagcgacccccccagcgcccccgccctgcacacctgcttcctggtgaacgagggctggagccagctggccgccatgcactgcgtgatgctgcccgacctgctgggcctggacaagttcagaccccccctgctggagatgctggccagaagatggcaggacagatgcctggaggtgagagaggccgcccaggccctgctgctggccgagctgagaagaatcgagcaggccggcagaaaggaggccatcgacgcctgggccccctacctgccccagtacatcgaccacgtgatcagccccggcgtgaccagcgaggccgcccagaccatcaccaccgcccccgacgccagcggccccgaggccaaggtgcaggaggaggagcacgacctggtggacgacgacatcaccaccggctgcctgagcagcgtgccccagatgaagaagatcagcaccagctacgaggagagaagaaagcaggccaccgccatcgtgctgctgggcgtgatcggcgccgagttcggcgccgagatcgagccccccaagctgctgaccagacccagaagcagcagccagatccccgagggcttcggcctgaccagcggcggcagcaactacagcctggccagacacacctgcaaggccctgaccttcctgctgctgcagccccccagccccaagctgcccccccacagcaccatcagaagaaccgccatcgacctgatcggcagaggcttcaccgtgtgggagccctacatggacgtgagcgccgtgctgatgggcctgctggagctgtgcgccgacgccgagaagcagctggccaacatcaccatgggcctgcccctgagccccgccgccgacagcgccagaagcgccagacacgccctgagcctgatcgccaccgccagaccccccgccttcatcaccaccatcgccaaggaggtgcacagacacaccgccctggccgccaacacccagagccagcagaacatgcacaccaccaccctggccagagccaagggcgagatcctgagagtgatcgagatcctgatcgagaagatgcccaccgacgtggtggacctgctggtggaggtgatggacatcatcatgtactgcctggagggcagcctggtgaagaagaagggcctgcaggagtgcttccccgccatctgcagattctacatggtgagctactacgagagaaaccacagaatcgccgtgggcgccagacacggcagcgtggccctgtacgacatcagaaccggcaagtgccagaccatccacggccacaagggccccatcaccgccgtggccttcgcccccgacggcagatacctggccacctacagcaacaccgacagccacatcagcttctggcagatgaacaccagcctgctgggcagcatcggcatgctgaacagcgccccccagctgagatgcatcaagacctaccaggtgccccccgtgcagcccgccagccccggcagccacaacgccctgaagctggccagactgatctggaccagcaacagaaacgtgatcctgatggcccacgacggcaaggagcacagattcatggtgtag

SEQ ID NO: 105241 - DNA, 3309 bp, synthetic construct
  misc_feature 1..3309: note = Description of Artificial Sequence: Synthetic coding sequence
  source 1..3309: mol_type = other DNA
atgagaaccagcctgcaggccgtggccctgtggggccagaaggcccccccccacagcatcaccgccatcatgatcaccgacgaccagagaaccatcgtgaccggcagccaggagggccagctgtgcctgtggaacctgagccacgagctgaagatcagcgccaaggagctgctgttcggccacagcgccagcgtgacctgcctggccagagccagagacttcagcaagcagccctacatcgtgagcgccgccgagaacggcgagatgtgcgtgtggaacgtgaccaacggccagtgcatggagaaggccaccctgccctacagacacaccgccatctgctactaccactgcagcttcagaatgaccggcgagggctggctgctgtgctgcggcgagtaccaggacgtgctgatcatcgacgccaagaccctggccgtggtgcacagcttcagaagcagccagttccccgactggatcaactgcatgtgcatcgtgcacagcatgagaatccaggaggacagcctgctggtggtgagcgtggccggcgagctgaaggtgtgggacctgagcagcagcatcaacagcatccaggagaagcaggacgtgtacgagaaggagagcaagttcctggagagcctgaactgccagaccatcagattctgcacctacaccgagagactgctgctggtggtgttcagcaagtgctggaaggtgtacgactactgcgacttcagcctgctgctgaccgaggtgagcagaaacggccagttcttcgccggcggcgaggtgatcgccgcccacagaatcctgatctggaccgaggacggccacagctacatctaccagctgctgaacagcggcctgagcaagagcatctaccccgccgacggcagagtgctgaaggagaccatctacccccacctgctgtgcagcaccagcgtgcaggagaacaaggagcagagcagacccttcgtgatgggctacatgaacgagagaaaggagcccttctacaaggtgctgttcagcggcgaggtgagcggcagaatcaccctgtggcacatccccgacgtgcccgtgagcaagttcgacggcagccccagagagatccccgtgaccgccacctggaccctgcaggacaacttcgacaagcacgacaccatgagccagagcatcatcgactacttcagcggcctgaaggacggcgccggcaccgccgtggtgaccagcagcgagtacatccccagcctggacaagctgatctgcggctgcgaggacggcaccatcatcatcacccaggccctgaacgccgccaaggccagactgctggagggcggcagcctggtgaaggacagccccccccacaaggtgctgaagggccaccaccagagcgtgaccagcctgctgtacccccacggcctgagcagcaagctggaccagagctggatgctgagcggcgacctggacagctgcgtgatcctgtgggacatcttcaccgaggagatcctgcacaagttcttcctggaggccggccccgtgaccagcctgctgatgagccccgagaagttcaagctgagaggcgagcagatcatctgctgcgtgtgcggcgaccacagcgtggccctgctgcacctggagggcaagagctgcctgctgcacgccagaaagcacctgttccccgtgagaatgatcaagtggcaccccgtggagaacttcctgatcgtgggctgcgccgacgacagcgtgtacatctgggagatcgagaccggcaccctggagagacacgagaccggcgagagagccagaatcatcctgaactgctgcgacgacagccagctggtgaagagcgtgctgcccatcgccagcgagaccctgaagcacaagagcatcgagcagagaagcagcagcccctaccagctgggccccctgccctgccccggcctgcaggtggagagcagctgcaaggtgaccgacgccaagttctgccccagacccttcaacgtgctgcccgtgaagaccaagtggagcaacgtgggcttccacatcctgctgttcgacctggagaacctggtggagctgctgctgcccacccccctgagcgacgtggacagcagcagcagcttctacggcggcgaggtgctgagaagagccaagagcaccgtggagaagaagaccctgaccctgagaaagagcaagaccgcctgcggccccctgagcgccgaggccctggccaagcccatcaccgagagcctggcccagggcgacaacaccatcaagttcagcgaggagaacgacggcatcaagagacagaagaagatgaagatcagcaagaagatgcagcccaagcccagcagaaaggtggacgccagcctgaccatcgacaccgccaagctgttcctgagctgcctgctgccctggggcgtggacaaggacctggactacctgtgcatcaagcacctgaacatcctgaagctgcagggccccatcagcctgggcatcagcctgaacgaggacaacttcagcctgatgctgcccggctgggacctgtgcaacagcggcatgatcaaggactacagcggcgtgaacctgttcagcagaaaggtgctggacctgagcgacaagtacaccgccaccctgcccaaccaggtgggcatccccagaggcctggagaacaactgcgacagcctgagagagagcgacaccatcgtgtacctgctgagcagactgttcctggtgaacaagctggtgaacatgcccctggagctggcctgcagagtgggcagcagcttcagaatggagagcatccacaacaagatgagaggcgccggcaacgacatcctgaacatgagcagcttctacagctgcctgagaaacggcaagaacgagagccacgtgcccgaggccgacctgagcctgctgaagctgatcagctgctggagagaccagagcgtgcaggtgaccgaggccatccaggccgtgctgctggccgaggtgcagcagcacatgaagagcctgggcaagatccccgtgaacagccagcccgtgagcatggccgagaacggcaactgcgagatgaagcagatgctgcccaagctggagtggaccgaggagctggagctgcagtgcgtgagaaacaccctgcccctgcagacccccgtgagccccgtgaagcacgacagcaacagcaacagcgccaacttccaggacgtggaggacatgcccgacagatgcgccctggaggagagcgagagccccggcgagcccagacaccacagctggatcgccaaggtgtgcccctgcaaggtgagctag

SEQ ID NO: 105242 - DNA, 3309 bp, synthetic construct; identical to SEQ ID NO: 105241
  misc_feature 1..3309: note = Description of Artificial Sequence: Synthetic coding sequence
  source 1..3309: mol_type = other DNA

SEQ ID NO: 105243 - DNA, 3300 bp, synthetic construct
  misc_feature 1..3300: note = Description of Artificial Sequence: Synthetic coding sequence
  source 1..3300: mol_type = other DNA
atgagaaccagcctgcaggccgtggccctgtggggccagaaggcccccccccacagcatcaccgccatcatgatcaccgacgaccagagaaccatcgtgaccggcagccaggagggccagctgtgcctgtggaacctgagccacgagctgaagatcagcgccaaggagctgctgttcggccacagcgccagcgtgacctgcctggccagagccagagacttcagcaagcagccctacatcgtgagcgccgccgagaacggcgagatgtgcgtgtggaacgtgaccaacggccagtgcatggagaaggccaccctgccctacagacacaccgccatctgctactaccactgcagcttcagaatgaccggcgagggctggctgctgtgctgcggcgagtaccaggacgtgctgatcatcgacgccaagaccctggccgtggtgcacagcttcagaagcagccagttccccgactggatcaactgcatgtgcatcgtgcacagcatgagaatccaggacagcctgctggtggtgagcgtggccggcgagctgaaggtgtgggacctgagcagcagcatcaacagcatccaggagaagcaggacgtgtacgagaaggagagcaagttcctggagagcctgaactgccagaccatcagattctgcacctacaccgagagactgctgctggtggtgttcagcaagtgctggaaggtgtacgactactgcgacttcagcctgctgctgaccgaggtgagcagaaacggccagttcttcgccggcggcgaggtgatcgccgcccacagaatcctgatctggaccgaggacggccacagctacatctaccagctgctgaacagcggcctgagcaagagcatctaccccgccgacggcagagtgctgaaggagaccatctacccccacctgctgtgcagcaccagcgtgcaggagaacaagagcagacccttcgtgatgggctacatgaacgagagaaaggagcccttctacaaggtgctgttcagcggcgaggtgagcggcagaatcaccctgtggcacatccccgacgtgcccgtgagcaagttcgacggcagccccagagagatccccgtgaccgccacctggaccctgcaggacaacttcgacaagcacgacaccatgagccagagcatcatcgactacttcagcggcctgaaggacggcgccggcaccgccgtggtgaccagcagcgagtacatccccagcctggacaagctgatctgcggctgcgaggacggcaccatcatcatcacccaggccctgaacgccgccaaggccagactgctggagggcggcagcctggtgaaggacagccccccccacaaggtgctgaagggccaccaccagagcgtgaccagcctgctgtacccccacggcctgagcagcaagctggaccagagctggatgctgagcggcgacctggacagctgcgtgatcctgtgggacatcttcaccgaggagatcctgcacaagttcttcctggaggccggccccgtgaccagcctgctgatgagccccgagaagttcaagctgagaggcgagcagatcatctgctgcgtgtgcggcgaccacagcgtggccctgctgcacctggagggcaagagctgcctgctgcacgccagaaagcacctgttccccgtgagaatgatcaagtggcaccccgtggagaacttcctgatcgtgggctgcgccgacgacagcgtgtacatctgggagatcgagaccggcaccctggagagacacgagaccggcgagagagccagaatcatcctgaactgctgcgacgacagccagctggtgaagagcgtgctgcccatcgccagcgagaccctgaagcacaagagcatcgagcagagaagcagcagcccctaccagctgggccccctgccctgccccggcctgcaggtggagagcagctgcaaggtgaccgacgccaagttctgccccagacccttcaacgtgctgcccgtgaagaccaagtggagcaacgtgggcttccacatcctgctgttcgacctggagaacctggtggagctgctgctgcccacccccctgagcgacgtggacagcagcagcagcttctacggcggcgaggtgctgagaagagccaagagcaccgtggagaagaagaccctgaccctgagaaagagcaagaccgcctgcggccccctgagcgccgaggccctggccaagcccatcaccgagagcctggcccagggcgacaacaccatcaagttcagcgaggagaacgacggcatcaagagacagaagaagatgaagatcagcaagaagatgcagcccaagcccagcagaaaggtggacgccagcctgaccatcgacaccgccaagctgttcctgagctgcctgctgccctggggcgtggacaaggacctggactacctgtgcatcaagcacctgaacatcctgaagctgcagggccccatcagcctgggcatcagcctgaacgaggacaacttcagcctgatgctgcccggctgggacctgtgcaacagcggcatgatcaaggactacagcggcgtgaacctgttcagcagaaaggtgctggacctgagcgacaagtacaccgccaccctgcccaaccaggtgggcatccccagaggcctggagaacaactgcgacagcctgagagagagcgacaccatcgtgtacctgctgagcagactgttcctggtgaacaagctggtgaacatgcccctggagctggcctgcagagtgggcagcagcttcagaatggagagcatccacaacaagatgagaggcgccggcaacgacatcctgaacatgagcagcttctacagctgcctgagaaacggcaagaacgagagccacgtgcccgaggccgacctgagcctgctgaagctgatcagctgctggagagaccagagcgtgcaggtgaccgaggccatccaggccgtgctgctggccgaggtgcagcagcacatgaagagcctgggcaagatccccgtgaacagccagcccgtgagcatggccgagaacggcaactgcgagatgaagcagatgctgcccaagctggagtggaccgaggagctggagctgcagtgcgtgagaaacaccctgcccctgcagacccccgtgagccccgtgaagcacgacagcaacagcaacagcgccaacttccaggacgtggaggacatgcccgacagatgcgccctggaggagagcgagagccccggcgagcccagacaccacagctggatcgccaaggtgtgcccctgcaaggtgagctag

SEQ ID NO: 105244 - DNA, 2328 bp, synthetic construct
  misc_feature 1..2328: note = Description of Artificial Sequence: Synthetic coding sequence
  source 1..2328: mol_type = other DNA
atgagaaccagcctgcaggccgtggccctgtggggccagaaggcccccccccacagcatcaccgccatcatgatcaccgacgaccagagaaccatcgtgaccggcagccaggagggccagctgtgcctgtggaacctgagccacgagctgaagatcagcgccaaggagctgctgttcggccacagcgccagcgtgacctgcctggccagagccagagacttcagcaagcagccctacatcgtgagcgccgccgagaacggcgagatgtgcgtgtggaacgtgaccaacggccagtgcatggagaaggccaccctgccctacagacacaccgccatctgctactaccactgcagcttcagaatgaccggcgagggctggctgctgtgctgcggcgagtaccaggacgtgctgatcatcgacgccaagaccctggccgtggtgcacagcttcagaagcagccagttccccgactggatcaactgcatgtgcatcgtgcacagcatgagaatccaggaggacagcctgctggtggtgagcgtggccggcgagctgaaggtgtgggacctgagcagcagcatcaacagcatccaggagaagcaggacgtgtacgagaaggagagcaagttcctggagagcctgaactgccagaccatcagattctgcacctacaccgagagactgctgctggtggtgttcagcaagtgctggaaggtgtacgactactgcgacttcagcctgctgctgaccgaggtgagcagaaacggccagttcttcgccggcggcgaggtgatcgccgcccacagaatcctgatctggaccgaggacggccacagctacatctaccagctgctgaacagcggcctgagcaagagcatctaccccgccgacggcagagtgctgaaggagaccatctacccccacctgctgtgcagcaccagcgtgcaggagaacaaggagcagagcagacccttcgtgatgggctacatgaacgagagaaaggagcccttctacaaggtgctgttcagcggcgaggtgagcggcagaatcaccctgtggcacatccccgacgtgcccgtgagcaagttcgacggcagccccagagagatccccgtgaccgccacctggaccctgcaggacaacttcgacaagcacgacaccatgagccagagcatcatcgactacttcagcggcctgaaggacggcgccggcaccgccgtggtgaccagcagcgagtacatccccagcctggacaagctgatctgcggctgcgaggacggcaccatcatcatcacccaggccctgaacgccgccaaggccagactgctggagggcggcagcctggtgaaggacagccccccccacaaggtgctgaagggccaccaccagagcgtgaccagcctgctgtacccccacggcctgagcagcaagctggaccagagctggatgctgagcggcgacctggacagctgcgtgatcctgtgggacatcttcaccgaggagatcctgcacaagttcttcctggaggccggccccgtgaccagcctgctgatgagccccgagaagttcaagctgagaggcgagcagatcatctgctgcgtgtgcggcgaccacagcgtggccctgctgcacctggagggcaagagctgcctgctgcacgccagaaagcacctgttccccgtgagaatgatcaagtggcaccccgtggagaacttcctgatcgtgggctgcgccgacgacagcgtgtacatctgggagatcgagaccggcaccctggagagacacgagaccggcgagagagccagaatcatcctgaactgctgcgacgacagccagctggtgaagagcgtgctgcccatcgccagcgagaccctgaagcacaagagcatcgagcagagaagcagcagcccctaccagctgggccccctgccctgccccggcctgcaggtggagagcagctgcaaggtgaccgacgccaagttctgccccagacccttcaacgtgctgcccgtgaagaccaagtggagcaacgtgggcttccacatcctgctgttcgacctggagaacctggtggagctgctgctgcccacccccctgagcgacgtggacagcagcagcagcttctacggcggcgaggtgctgagaagagccaagagcaccgtggagaagaagaccctgaccctgagaaagagcaagaccgcctgcggccccctgagcgccgaggccctggccaagcccatcaccgagagcctggcccagggcgacaacaccatcaagttcagcgaggagaacgacggcatcaagagacagaagaagatgaagatcagctag

SEQ ID NO: 105245 - DNA, 1119 bp, synthetic construct
  misc_feature 1..1119: note = Description of Artificial Sequence: Synthetic coding sequence
  source 1..1119: mol_type = other DNA
atggagcccgcccccagcgccggcgccgagctgcagccccccctgttcgccaacgccagcgacgcctaccccagcgcctgccccagcgccggcgccaacgccagcggcccccccggcgccagaagcgccagcagcctggccctggccatcgccatcaccgccctgtacagcgccgtgtgcgccgtgggcctgctgggcaacgtgctggtgatgttcggcatcgtgagatacaccaagatgaagaccgccaccaacatctacatcttcaacctggccctggccgacgccctggccaccagcaccctgcccttccagagcgccaagtacctgatggagacctggcccttcggcgagctgctgtgcaaggccgtgctgagcatcgactactacaacatgttcaccagcatcttcaccctgaccatgatgagcgtggacagatacatcgccgtgtgccaccccgtgaaggccctggacttcagaacccccgccaaggccaagctgatcaacatctgcatctgggtgctggccagcggcgtgggcgtgcccatcatggtgatggccgtgaccagacccagagacggcgccgtggtgtgcatgctgcagttccccagccccagctggtactgggacaccgtgaccaagatctgcgtgttcctgttcgccttcgtggtgcccatcctgatcatcaccgtgtgctacggcctgatgctgctgagactgagaagcgtgagactgctgagcggcagcaaggagaaggacagaagcctgagaagaatcaccagaatggtgctggtggtggtgggcgccttcgtggtgtgctgggcccccatccacatcttcgtgatcgtgtggaccctggtggacatcgacagaagagaccccctggtggtggccgccctgcacctgtgcatcgccctgggctacgccaacagcagcctgaaccccgtgctgtacgccttcctggacgagaacttcaagagatgcttcagacagctgtgcagaaagccctgcggcagacccgaccccagcagcttcagcagagccagagaggccaccgccagagagagagtgaccgcctgcacccccagcgacggccccggcggcggcgccgccgcctag

SEQ ID NO: 105246 - DNA, 837 bp, synthetic construct
  misc_feature 1..837: note = Description of Artificial Sequence: Synthetic coding sequence
  source 1..837: mol_type = other DNA
atgagaaaggagacccccccccccctggtgccccccgccgccagagagtggaacctgccccccaacgcccccgcctgcatggagagacagctggaggccgccagatacagaagcgacggcgccctgctgctgggcgccagcagcctgagcggcagatgctgggccggcagcctgtggctgttcaaggacccctgcgccgcccccaacgagggcttctgcagcgccggcgtgcagaccgaggccggcgtggccgacctgacctgggtgggcgagagaggcatcctggtggccagcgacagcgcccacgccgcccaggtgacctgcgtggccgccagcccccacaaggacagcgtgttcctgagctgcagcgaggacaacagaatcctgctgtgggacaccagatgccccaagcccgccagccagatcggctgcagcgcccccggctacctgcccaccagcctggcctggcacccccagcagagcgaggtgttcgtgttcggcgacgagaacggcaccgtgagcctggtggacaccaagagcaccagctgcgtgctgagcagcgccgtgcacagccagtgcgtgaccggcctggtgttcagcccccacagcgtgcccttcctggccagcctgagcgaggactgcagcctggccgtgctggacagcagcctgagcgagctgttcagaagccaggcccacagagacttcgtgagagacgccacctggagccccctgaaccacagcctgctgaccaccgtgggctgggaccaccaggtggtgcaccacgtggtgcccaccgagcccctgcccgcccccggccccgccagcgtgaccgagtag

SEQ ID NO: 105247 - DNA, 876 bp, synthetic construct
  misc_feature 1..876: note = Description of Artificial Sequence: Synthetic coding sequence
  source 1..876: mol_type = other DNA
tgatgcgccgcccccaacgagggcttctgcagcgccggcgtgcagaccgaggccggcgtggccgacctgacctgggtgggcgagagaggcatcctggtggccagcgacagcggcgccgtggagctgtgggagctggacgagaacgagaccctgatcgtgagcaagttctgcaagtacgagcacgacgacatcgtgagcaccgtgagcgtgctgagcagcggcacccaggccgtgagcggcagcaaggacatctgcatcaaggtgtgggacctggcccagcaggtggtgctgagcagctacagagcccacgccgcccaggtgacctgcgtggccgccagcccccacaaggacagcgtgttcctgagctgcagcgaggacaacagaatcctgctgtgggacaccagatgccccaagcccgccagccagatcggctgcagcgcccccggctacctgcccaccagcctggcctggcacccccagcagagcgaggtgttcgtgttcggcgacgagaacggcaccgtgagcctggtggacaccaagagcaccagctgcgtgctgagcagcgccgtgcacagccagtgcgtgaccggcctggtgttcagcccccacagactggacctgagccagcccagcccccccagcgacagcgtgcccttcctggccagcctgagcgaggactgcagcctggccgtgctggacagcagcctgagcgagctgttcagaagccaggcccacagagacttcgtgagagacgccacctggagccccctgaaccacagcctgctgaccaccgtgggctgggaccaccaggtggtgcaccacgtggtgcccaccgagcccctgcccgcccccggccccgccagcgtgaccgagtag

SEQ ID NO: 105248 - DNA, 942 bp, synthetic construct
  misc_feature 1..942: note = Description of Artificial Sequence: Synthetic coding sequence
  source 1..942: mol_type = other DNA
atgaagctgaccgacagcgtgctgagaagcttcagagtggccaaggtgttcagagagaacagcgacaagatcaactgcttcgacttcagccccaacggcgagaccgtgatcagcagcagcgacgacgacagcatcgtgctgtacgactgccaggagggcaagcccaagagaaccctgtacagcaagaagtacggcgtggacctgatcagatacacccacgccgccaacaccgtggtgtacagcagcaacaagatcgacgacaccatcagatacctgagcctgcacgacaacaagtacatcagatacttccccggccacagcaagagagtggtggccctgagcatgagccccgtggacgacaccttcatcagcggcagcctggacaagaccatcagactgtgggacctgagaagccccaactgccagggcctgatgcacctgcagggcaagcccgtgtgcagcttcgaccccgagggcctgatcttcgccgccggcgtgaacagcgagatggtgaagctgtacgacctgagaagcttcgacaagggccccttcgccaccttcaagatgcagtacgacagaacctgcgagtggaccggcctgaagttcagcaacgacggcaagctgatcctgatcagcaccaacggcagcttcatcagactgatcgacgccttcaagggcgtggtgatgcacaccttcggcggctacgccaacagcaaggccgtgaccctggaggccagcttcacccccgacagccagttcatcatgatcggcagcgaggacggcaagatccacgtgtggaacggcgagagcggcatcaaggtggccgtgctggacggcaagcacaccggccccatcacctgcctgcagttcaaccccaagttcatgaccttcgccagcgcctgcagcaacatggccttctggctgcccaccatcgacgactag

SEQ ID NO: 105249 - DNA, 1359 bp, synthetic construct
  misc_feature 1..1359: note = Description of Artificial Sequence: Synthetic coding sequence
  source 1..1359: mol_type = other DNA
atgatgggctgcttcgccctgcagaccgtggacaccgagctgaccgccgacagcgtggagtggtgccccctgcagggctgcagacacctgctggcctgcggcacctaccagctgagaagacccgaggacagacccgccggcccccagaacaagggcggcatggaggtgaaggagccccaggtgagactgggcagactgttcctgtacagcttcaacgacaacaacagcatccaccccctggtggaggtgcagagaaaggacaccagcgccatcctggacatgaagtggtgccacatccccgtggccggccacgccctgctgggcctggccgacgccagcggcagcatccagctgctgagactggtggagagcgagaagagccacgtgctggagcccctgagcagcctggccctggaggagcagtgcctggccctgagcctggactggagcaccggcaagaccggcagagccggcgaccagcccctgaagatcatcagcagcgacagcaccggccagctgcacctgctgatggtgaacgagaccagacccagactgcagaaggtggccagctggcaggcccaccagttcgaggcctggatcgccgccttcaactactggcaccccgagatcgtgtacagcggcggcgacgacggcctgctgagaggctgggacaccagagtgcccggcaagttcctgttcaccagcaagagacacaccatgggcgtgtgcagcatccagagcagcccccacagagagcacatcctggccaccggcagctacgacgagcacatcctgctgtgggacaccagaaacatgaagcagcccctggccgacacccccgtgcagggcggcgtgtggagaatcaagtggcaccccttccaccaccacctgctgctggccgcctgcatgcacagcggcttcaagatcctgaactgccagaaggccatggaggagagacaggaggccaccgtgctgaccagccacaccctgcccgacagcctggtgtacggcgccgactggagctggctgctgttcagaagcctgcagagagcccccagctggagcttccccagcaacctgggcaccaagaccgccgacctgaagggcgccagcgagctgcccaccccctgccacgagtgcagagaggacaacgacggcgagggccacgccagaccccagagcggcatgaagcccctgaccgagggcatgagaaagaacggcacctggctgcaggccaccgccgccaccaccagagactgcggcgtgaaccccgaggaggccgacagcgccttcagcctgctggccacctgcagcttctacgaccacgccctgcacctgtgggagtgggagggcaactag

SEQ ID NO: 105250 - DNA, 1074 bp, synthetic construct
  misc_feature 1..1074: note = Description of Artificial Sequence: Synthetic coding sequence
  source 1..1074: mol_type = other DNA
atgagcgccttcgagaagccccagatcatcgcccacatccagaagggcttcaactacaccgtgttcgactgcaagtgggtgccctgcagcgccaagttcgtgaccatgggcaacttcgccagaggcaccggcgtgatccagctgtacgagatccagcacggcgacctgaagctgctgagagagatcgagaaggccaagcccatcaagtgcggcaccttcggcgccaccagcctgcagcagagatacctggccaccggcgacttcggcggcaacctgcacatctggaacctggaggcccccgagatgcccgtgtacagcgtgaagggccacaaggagatcatcaacgccatcgacggcatcggcggcctgggcatcggcgagggcgcccccgagatcgtgaccggcagcagagacggcaccgtgaaggtgtgggaccccagacagaaggacgaccccgtggccaacatggagcccgtgcagggcgagaacaagagagactgctggaccgtggccttcggcaacgcctacaaccaggaggagagagtggtgtgcgccggctacgacaacggcgacatcaagctgttcgacctgagaaacatggccctgagatgggagaccaacatcaagaacggcgtgtgcagcctggagttcgacagaaaggacatcagcatgaacaagctggtggccaccagcctggagggcaagttccacgtgttcgacatgagaacccagcaccccaccaagggcttcgccagcgtgagcgagaaggcccacaagagcaccgtgtggcaggtgagacacctgccccagaacagagagctgttcctgaccgccggcggcgccggcggcctgcacctgtggaagtacgagtaccccatccagagaagcaagaaggacagcgagggcatcgagatgggcgtggccggcagcgtgagcctgctgcagaacgtgaccctgagcacccagcccatcagcagcctggactggagccccgacaagagaggcctgtgcgtgtgcagcagcttcgaccagaccgtgagagtgctgatcgtgaccaagctgaacaagatctag

SEQ ID NO: 105251 - DNA, 867 bp, synthetic construct
  misc_feature 1..867: note = Description of Artificial Sequence: Synthetic coding sequence
  source 1..867: mol_type = other DNA
atgagcgccttcgagaagccccagatcatcgcccacatccagaagggcttcaactacaccgtgttcgactgcaagtgggtgccctgcagcgccaagttcgtgaccatgggcaacttcgccagaggcaccggcgtgatccagctgtacgagatccagcacggcgacctgaagctgctgagagagatcgagaaggccaagcccatcaagtgcggcaccttcggcgccaccagcctgcagcagagatacctggccaccggcgacttcggcggcaacctgcacatctggaacctggaggcccccgagatgcccgtgtacagcgtgaagggccacaaggagatcatcaacgccatcgacggcatcggcggcctgggcatcggcgagggcgcccccgagatcgtgaccggcagcagagacggcaccgtgaaggtgtgggaccccagacagaaggacgaccccgtggccaacatggagcccgtgcagggcgagaacaagagagactgctggaccgtggccttcggcaacgcctacaaccaggaggagagagtggtgtgcgccggctacgacaacggcgacatcaagctgttcgacctgagaaacatggccctgagatgggagaccaacatcaagaacggcgtgtgcagcctggagttcgacagaaaggacatcagcatgaacaagctggtggccaccagcctggagggcaagttccacgtgttcgacatgagaacccagcaccccaccaagggcttcgccagcgtgagcgagaaggcccacaagagcaccgtgtggcaggtgagacacctgccccagaacagagagctgttcctgaccgccggcggcgccggcggcctgcacctgtggaagtag

SEQ ID NO: 105252 - DNA, 3816 bp, synthetic construct
  misc_feature 1..3816: note = Description of Artificial Sequence: Synthetic coding sequence
  source 1..3816: mol_type = other DNA
tgaagagacttccagagcgaggtgctgctgagcgccatggagctgttccacatgaccagcggcggcgacgccgccatgttcagagacggcaaggagccccagcccagcgccgaggccgccgccgcccccagcctggccaacatcagctgcttcacccagaagctggtggagaagctgtacagcggcatgttcagcgccgaccccagacacatcctgctgttcatcctggagcacatcatggtggtgatcgagaccgccagcagccagagagacaccgtgctgagcaccctgtacagcagcctgaacaaggtgatcctgtactgcctgagcaagccccagcagagcctgagcgagtgcctgggcctgctgagcatcctgggcttcctgcaggagcactgggacgtggtgttcgccacctacaacagcaacatcagcttcctgctgtgcctgatgcactgcctgctgctgctgaacgagagaagctaccccgagggcttcggcctggagcccaagcccagaatgagcacctaccaccaggtgttcctgagccccaacgaggacgtgaaggagaagagagaggacctgcccagcctgagcgacgtgcagcacaacatccagaagaccgtgcagaccctgtggcagcagctggtggcccagagacagcagaccctggaggacgccttcaagatcgacctgagcgtgaagcccggcgagagagaggtgaagatcgaggaggtgacccccctgtgggaggagaccatgctgaaggcctggcagcactacctggccagcgagaagaagagcctggccagcagaagcaacgtggcccaccacagcaaggtgaccctgtggagcggcagcctgagcagcgccatgaagctgatgcccggcagacaggccaaggaccccgagtgcaagaccgaggacttcgtgagctgcatcgagaactacagaagaagaggccaggagctgtacgccagcctgtacaaggaccacgtgcagagaagaaagtgcggcaacatcaaggccgccaacgcctgggccagaatccaggagcagctgttcggcgagctgggcctgtggagccagggcgaggagaccaagccctgcagcccctgggagctggactggagagagggccccgccagaatgagaaagagaatcaagagactgagccccctggaggccctgagcagcggcagacacaaggagagccaggacaagaacgaccacatcagccagaccaacgccgagaaccaggacgagctgaccctgagagaggccgagggcgagcccgacgaggtgggcgtggactgcacccagctgaccttcttccccgccctgcacgagagcctgcacagcgaggacttcctggagctgtgcagagagagacaggtgatcctgcaggagctgctggacaaggagaaggtgacccagaagttcagcctggtgatcgtgcagggccacctggtgagcgagggcgtgctgctgttcggccaccagcacttctacatctgcgagaacttcaccctgagccccaccggcgacgtgtactgcaccagacactgcctgagcaacatcagcgaccccttcatcttcaacctgtgcagcaaggacagaagcaccgaccactacagctgccagtgccacagctacgccgacatgagagagctgagacaggccagattcctgctgcaggacatcgccctggagatcttcttccacaacggctacagcaagttcctggtgttctacaacaacgacagaagcaaggccttcaagagcttctgcagcttccagcccagcctgaagggcaaggccaccagcgaggacaccctgagcctgagaagataccccggcagcgacagaatcatgctgcagaagtggcagaagagagacatcagcaacttcgagtacctgatgtacctgaacaccgccgccggcagaacctgcaacgactacatgcagtaccccgtgttcccctgggtgctggccgactacaccagcgagaccctgaacctggccaaccccaagatcttcagagacctgagcaagcccatgggcgcccagaccaaggagagaaagctgaagttcatccagagattcaaggaggtggagaagaccgagggcgacatgaccgtgcagtgccactactacacccactacagcagcgccatcatcgtggccagctacctggtgagaatgccccccttcacccaggccttctgcgccctgcagggcggcagcttcgacgtggccgacagaatgttccacagcgtgaagagcacctgggagagcgccagcagagagaacatgagcgacgtgagagagctgacccccgagttcttctacctgcccgagttcctgaccaactgcaacggcgtggagttcggctgcatgcaggacggcaccgtgctgggcgacgtgcagctgcccccctgggccgacggcgaccccagaaagttcatcagcctgcacagaaaggccctggagagcgacttcgtgagcgccaacctgcaccactggatcgacctgatcttcggctacaagcagcagggccccgccgccgtggacgccgtgaacatcttccacccctacttctacggcgacagaatggacctgagcagcatcaccgaccccctgatcaagagcaccatcctgggcttcgtgagcaacttcggccaggtgcccaagcagctgttcaccaagccccaccccgccagaaccgccgccggcaagcccctgcccggcaaggacgtgagcacccccgtgagcctgcccggccacccccagcccttcttctacagcctgcagagcctgagacccagccaggtgaccgtgaaggacatgtacctgttcagcctgggcagcgagagccccaagggcgccatcggccacatcgtgagcaccgagaagaccatcctggccgtggagagaaacaaggtgctgctgccccccctgtggaacagaaccttcagctggggcttcgacgacttcagctgctgcctgggcagctacggcagcgacaaggtgctgatgaccttcgagaacctggccgcctggggcagatgcctgtgcgccgtgtgccccagccccaccaccatcgtgaccagcggcaccagcaccgtggtgtgcgtgtgggagctgagcatgaccaagggcagacccagaggcctgagactgagacaggccctgtacggccacacccaggccgtgacctgcctggccgccagcgtgaccttcagcctgctggtgagcggcagccaggactgcacctgcatcctgtgggacctggaccacctgacccacgtgaccagactgcccgcccacagagagggcatcagcgccatcaccatcagcgacgtgagcggcaccatcgtgagctgcgccggcgcccacctgagcctgtggaacgtgaacggccagcccctggccagcatcaccaccgcctggggccccgagggcgccatcacctgctgctgcctgatggagggccccgcctgggacaccagccagatcatcatcaccggcagccaggacggcatggtgagagtgtggaagaccgaggacgtgaagatgagcgtgcccggcagacccgccggcgaggagccccccgcccagccccccagccccagaggccacaagtgggagaagaacctggccctgagcagagagctggacgtgagcatcgccctgaccggcaagcccagcaagaccagccccgccgtgaccgccctggccgtgagcagaaaccacaccaagctgctggtgggcgacgagagaggcagaatcttctgctggagcgccgacggctag

SEQ ID NO: 105253 - DNA, 6804 bp, synthetic construct
  misc_feature 1..6804: note = Description of Artificial Sequence: Synthetic coding sequence
  source 1..6804: mol_type = other DNA
tgaaagctggccagccaggccatcgagcccgacgtgctgagacagttcctgggcctgggcatccccagcagcctgagcgccaccaccaagatcctggacagcagccacacccacagaggcaaccccggctgcagcggcagccagaccgcccagggcctggccgagggcccctggcccgccgcccccgacgccggcctgcaccccggcgtgacccaggccccccagcccctgggcgagagccaggacagcaccaccgccctgcagaccgccctgagcctgatcagcatgaccagccccagaaacctgcagccccagagagccgccctggcccccagcttcgtggagttcgacatgagcgtggagggctacggctgcctgttcatccccaccctgagcaccgtgatgggcaccagcaccgagtacagcgtgagcggcggcatcggcaccggcgccaccagacccttccccccccccggcggcctgaccttcagctgctggttcctgatcagcagacacggcgccgccaccgagggccaccccctgagattcctgaccctggtgagacacctggccagaaccgagcagcccttcgtgtgcttcagcgtgagcctgtgccccgacgacctgagcctggtggtgagcaccgaggagaaggagttccagcccctggacgtgatggagcccgaggacgacagcgagcccagcgccggctgccagctgcaggtgagatgcggccagctgctggcctgcggccagtggcaccacctggccgtggtggtgaccaaggagatgaagagacactgcaccgtgagcacctgcctggacggccaggtgatcggcagcgccaagatgctgtacatccaggccctgcccggccccttcctgagcatggaccccagcgccttcgtggacgtgtacggctacatcgccacccccagagtgtggaagcagaagagcagcctgatctggagactgggccccacctacctgttcgaggaggccatcagcatggagaccctggaggtgatcaacaagctgggccccagatactgcggcaacttccaggccgtgcacgtgcagggcgaggacctggacagcgaggccacccccttcgtggccgaggagagagtgagcttcggcctgcacatcgccagcagcagcatcaccagcgtggccgacatcagaaacgcctacaacgaggtggacagcagactgatcgccaaggagatgaacatcagcagcagagacaacgccatgcccgtgttcctgctgagaaactgcgccggccacctgagcggcagcctgagaaccatcggcgccgtggccgtgggccagctgggcgtgagagtgttccacagcagccccgccgccagcagcctggacttcatcggcggccccgccatcctgctgggcctgatcagcctggccaccgacgaccacaccatgtacgccgccgtgaaggtgctgcacagcgtgctgaccagcaacgccatgtgcgacttcctgatgcagcacatctgcggctaccagatcatggccttcctgctgagaaagaaggccagcctgctgaaccacagaatcttccagctgatcctgagcgtggccggcaccgtggagctgggcttcagaagcagcgccatcaccaacaccggcgtgttccagcacatcctgtgcaacttcgagctgtggatgaacaccgccgacaacctggagctgagcctgttcagccacctgctggagatcctgcagagccccagagagggccccagaaacgccgaggccgcccaccaggcccagctgatccccaagctgatcttcctgttcaacgagcccagcctgatccccagcaagatcagcaccatcatcggcatcctggcctgccagctgagaggccacttcagcacccaggacctgctgagaatcggcctgttcgtggtgtacaccctgaagcccagcagcgtgaacgagagacagatctgcatggacggcgccctggaccccagcctgcccgccggcagccagaccagcggcaagaccatctggctgagaaaccagctgctggagatgctgctgagcgtgatcagcagcccccagctgcacctgagcagcgagagcaaggaggagatgttcctgaagctgggccccgactggttcctgctgctgctgcagggccacctgcacgccagcaccaccgtgctggccctgaagctgctgctgtacttcctggccagccccagcctgagaaccagattcagagacggcctgtgcgccggcagctgggtggagagaagcaccgagggcgtggacatcgtgatggacaacctgaagagccagagccccctgcccgagcagagcccctgcctgctgcccggcttcagagtgctgaacgacttcctggcccaccacgtgcacatccccgaggtgtacctgatcgtgagcaccttcttcctgcagacccccctgaccgagctgatggacggccccaaggacagcctggacgccatgctgcagtggctgctgcagagacaccaccaggaggaggtgctgcaggccggcctgtgcaccgagggcgccctgctgctgctggagatgctgaaggccaccatgagccagcccctggccggcagcgaggacggcgcctgggcccagaccttccccgccagcgtgctgcagttcctgagcctggtgcacagaacctacccccaggaccccgcctggagagcccccgagttcctgcagaccctggccatcgccgccttccccctgggcgcccagaagggcgtgggcgccgagagcaccagaaacaccagcagccccgaggccgccgccgagggcgacagcaccgtggagggcctgcaggcccccaccaaggcccaccccgccagaagaaagctgagagagttcacccagctgctgctgagagagctgctgctgggcgccagcagccccaagcagtggctgcccctggaggtgctgctggaggccagccccgaccacgccaccagccagcagaagagagacttccagagcgaggtgctgctgagcgccatggagctgttccacatgaccagcggcggcgacgccgccatgttcagagacggcaaggagccccagcccagcgccgaggccgccgccgcccccagcctggccaacatcagctgcttcacccagaagctggtggagaagctgtacagcggcatgttcagcgccgaccccagacacatcctgctgttcatcctggagcacatcatggtggtgatcgagaccgccagcagccagagagacaccgtgctgagcaccctgtacagcagcctgaacaaggtgatcctgtactgcctgagcaagccccagcagagcctgagcgagtgcctgggcctgctgagcatcctgggcttcctgcaggagcactgggacgtggtgttcgccacctacaacagcaacatcagcttcctgctgtgcctgatgcactgcctgctgctgctgaacgagagaagctaccccgagggcttcggcctggagcccaagcccagaatgagcacctaccaccaggtgttcctgagccccaacgaggacgtgaaggagaagagagaggacctgcccagcctgagcgacgtgcagcacaacatccagaagaccgtgcagaccctgtggcagcagctggtggcccagagacagcagaccctggaggacgccttcaagatcgacctgagcgtgaagcccggcgagagagaggtgaagatcgaggaggtgacccccctgtgggaggagaccatgctgaaggcctggcagcactacctggccagcgagaagaagagcctggccagcagaagcaacgtggcccaccacagcaaggtgaccctgtggagcggcagcctgagcagcgccatgaagctgatgcccggcagacaggccaaggaccccgagtgcaagaccgaggacttcgtgagctgcatcgagaactacagaagaagaggccaggagctgtacgccagcctgtacaaggaccacgtgcagagaagaaagtgcggcaacatcaaggccgccaacgcctgggccagaatccaggagcagctgttcggcgagctgggcctgtggagccagggcgaggagaccaagccctgcagcccctgggagctggactggagagagggccccgccagaatgagaaagagaatcaagagactgagccccctggaggccctgagcagcggcagacacaaggagagccaggacaagaacgaccacatcagccagaccaacgccgagaaccaggacgagctgaccctgagagaggccgagggcgagcccgacgaggtgggcgtggactgcacccagctgaccttcttccccgccctgcacgagagcctgcacagcgaggacttcctggagctgtgcagagagagacaggtgatcctgcaggagctgctggacaaggagaaggtgacccagaagttcagcctggtgatcgtgcagggccacctggtgagcgagggcgtgctgctgttcggccaccagcacttctacatctgcgagaacttcaccctgagccccaccggcgacgtgtactgcaccagacactgcctgagcaacatcagcgaccccttcatcttcaacctgtgcagcaaggacagaagcaccgaccactacagctgccagtgccacagctacgccgacatgagagagctgagacaggccagattcctgctgcaggacatcgccctggagatcttcttccacaacggctacagcaagttcctggtgttctacaacaacgacagaagcaaggccttcaagagcttctgcagcttccagcccagcctgaagggcaaggccaccagcgaggacaccctgagcctgagaagataccccggcagcgacagaatcatgctgcagaagtggcagaagagagacatcagcaacttcgagtacctgatgtacctgaacaccgccgccggcagaacctgcaacgactacatgcagtaccccgtgttcccctgggtgctggccgactacaccagcgagaccctgaacctggccaaccccaagatcttcagagacctgagcaagcccatgggcgcccagaccaaggagagaaagctgaagttcatccagagattcaaggaggtggagaagaccgagggcgacatgaccgtgcagtgccactactacacccactacagcagcgccatcatcgtggccagctacctggtgagaatgccccccttcacccaggccttctgcgccctgcagggcggcagcttcgacgtggccgacagaatgttccacagcgtgaagagcacctgggagagcgccagcagagagaacatgagcgacgtgagagagctgacccccgagttcttctacctgcccgagttcctgaccaactgcaacggcgtggagttcggctgcatgcaggacggcaccgtgctgggcgacgtgcagctgcccccctgggccgacggcgaccccagaaagttcatcagcctgcacagaaaggccctggagagcgacttcgtgagcgccaacctgcaccactggatcgacctgatcttcggctacaagcagcagggccccgccgccgtggacgccgtgaacatcttccacccctacttctacggcgacagaatggacctgagcagcatcaccgaccccctgatcaagagcaccatcctgggcttcgtgagcaacttcggccaggtgcccaagcagctgttcaccaagccccaccccgccagaaccgccgccggcaagcccctgcccggcaaggacgtgagcacccccgtgagcctgcccggccacccccagcccttcttctacagcctgcagagcctgagacccagccaggtgaccgtgaaggacatgtacctgttcagcctgggcagcgagagccccaagggcgccatcggccacatcgtgagcaccgagaagaccatcctggccgtggagagaaacaaggtgctgctgccccccctgtggaacagaaccttcagctggggcttcgacgacttcagctgctgcctgggcagctacggcagcgacaaggtgctgatgaccttcgagaacctggccgcctggggcagatgcctgtgcgccgtgtgccccagccccaccaccatcgtgaccagcggcaccagcaccgtggtgtgcgtgtgggagctgagcatgaccaagggcagacccagaggcctgagactgagacaggccctgtacggccacacccaggccgtgacctgcctggccgccagcgtgaccttcagcctgctggtgagcggcagccaggactgcacctgcatcctgtgggacctggaccacctgacccacgtgaccagactgcccgcccacagagagggcatcagcgccatcaccatcagcgacgtgagcggcaccatcgtgagctgcgccggcgcccacctgagcctgtggaacgtgaacggccagcccctggccagcatcaccaccgcctggggccccgagggcgccatcacctgctgctgcctgatggagggccccgcctgggacaccagccagatcatcatcaccggcagccaggacggcatggtgagagtgtggaagaccgaggacgtgaagatgagcgtgcccggcctgcagatgggcagaaagagagaggccgccgaggccctggcccagcagtgccaggccgagggcggcagaggcgactggggcctgagcagcgcctacagaagaaacccccagggcctgctgccccacagcagccagggcagagccagcggcaaccacagcagcgccgcccagcccagcccctggcccatgggcctgctgtag

SEQ ID NO: 105254 - DNA, 9555 bp, synthetic construct
  misc_feature 1..9555: note = Description of Artificial Sequence: Synthetic coding sequence
  source 1..9555: mol_type = other DNA
atggaggccgaggacctgagcaaggccgaggacagaaacgaggaccccggcagcaagaacgagggccagctggccgccgtgcagcccgacgtgccccacggcggccagagcagcagccccaccgccctgtgggacatgctggagagaaagttcctggagtaccagcagctgacccacaagagccccatcgagagacagaagagcctgctgagcctgctgcccctgttcctgaaggcctgggagcacagcgtgggcatcatctgcttccccagcctgcagagactggccgaggacgtgagcgaccagctggcccagcagctgcagaaggccctggtgggcaagcccgccgagcaggccagactggccgccggccagctgctgtggtggaagggcgacgtggaccaggacggctacctgctgctgaagagcgtgtacgtgctgaccggcaccgacagcgagaccctgggcagagtggccgagagcggcctgcccgccctgctgctgcagtgcctgtacctgttcttcgtgttccccctggacaaggacgagctgctggagagcgacctgcaggtgcagaagatgttcgtgcagatgctgctgaacatctgcagcgacagccagggcctggagggcctgctgagcggcagcgagctgcagagcctgctgatcgccaccacctgcctgagagagcacagctgctgcttctggaaggagcccaccttctgcgtgctgagagccatcagcaaggcccagaacctgagcatcatccagtacctgcaggccaccgactgcgtgagactgagcctgcagaacctgagcagactgaccgacaccctgcccgcccccgaggtgagcgaggccgtgagcctgatcctgggcttcgtgaaggacagctaccccgtgagcagcgccctgttcctggagttcgagaacagcgagggctaccccctgctgctgaaggtgctgctgagatacgacggcctgacccagagcgaggtggacccccacctggaggagctgctgggcctggtggtgtggctgaccacctgcggcagaagcgagctgaaggtgttcgacagcatcacctacccccagctggagggcttcaagttccaccacgaggccagcggcgtgaccgtgaagaacctgcaggccttccaggtgctgcagaacgtgttccacaaggccagcgacagcgtgctgtgcatccaggtgctgagcgtgatcagaaccatgtgggcctggaacgccagaaacttcttcctgctggagtggaccctgcagcccatcagccagttcgtggagatcatgcccctgaagcccgcccccgtgcaggagcacttcttccagctgctggaggccctggtgttcgagctgcactacgtgccccacgagatcctgagaaaggtgcagcacctgatcaaggagagccccggccccagctgcaccctgatggccctgcagagcatcctgagcatcgccggcggcgaccccctgttcaccgacatcttcagagacagcggcctgctgggcctgctgctggcccagctgagaaagcaggccaagatcatgagaaagagcggcaacaaggtgagcacccccggcgtgcaggaccccgagagagagctgacctgcgtgatgctgagaatcgtggtgaccctgctgaagggcagcgtgagaaacgccgtggtgctgaaggaccacggcatggtgcccttcatcaagatcttcctggacgacgagtgctacagagaggccagcctgagcatcctggagcagctgagcgccatcaacgccgaggagtacatgagcatcatcgtgggcgccctgtgcagcagcacccagggcgagctgcagctgaagctggacctgctgaagagcctgctgagaatcctggtgacccccaagggcagagccgccttcagagtgagcagcggcttcaacggcctgctgagcctgctgagcgacctggagggcagcctgcaggagccccccctgcaggcctggggcgccgtgagccccagacagaccctggagctggtgctgtacaccctgtgcgccgtgagcgccgccctgcactgggaccccgtgaacggctacttcttcagaagaaacggcctgttcgagaagctggccgaggacctgtgcctgctgggctgcttcggcgccctggaggaggagggcaacctgctgagaagctgggtggacaccaaggccagacccttcgccgacctgctgggcaccgccttcagcagcagcggcagcctgccccccagaatccagagctgcctgcagatcctgggcttcctggacagcatggccagcggcaccctgcacctgagaggcgacctgaaggagagcctgagaaccaagcagggccccgtggtggacgtgcagaagggcgagaccggcagcgacccccagagaaacttcaagcagtggcccgacctggaggagagaatggacgagggcgacgccgccatcatgcaccccggcgtggtgtgcatcatggtgagactgctgcccagactgtaccacgaggaccacccccagctgagcgaggagatccagtgcagcctggccagccacatccagagcctggtgaagagcgagaagaacagacaggtgatgtgcgaggccggcctgctgggcaccctgatggccagctgccacagagccctggtgaccagcggcagccccctgcacagcagactgatcagaatcttcgagaagctggccagccaggccatcgagcccgacgtgctgagacagttcctgggcctgggcatccccagcagcctgagcgccaccaccaagatcctggacagcagccacacccacagaggcaaccccggctgcagcggcagccagaccgcccagggcctggccgagggcccctggcccgccgcccccgacgccggcctgcaccccggcgtgacccaggccccccagcccctgggcgagagccaggacagcaccaccgccctgcagaccgccctgagcctgatcagcatgaccagccccagaaacctgcagccccagagagccgccctggcccccagcttcgtggagttcgacatgagcgtggagggctacggctgcctgttcatccccaccctgagcaccgtgatgggcaccagcaccgagtacagcgtgagcggcggcatcggcaccggcgccaccagacccttccccccccccggcggcctgaccttcagctgctggttcctgatcagcagacacggcgccgccaccgagggccaccccctgagattcctgaccctggtgagacacctggccagaaccgagcagcccttcgtgtgcttcagcgtgagcctgtgccccgacgacctgagcctggtggtgagcaccgaggagaaggagttccagcccctggacgtgatggagcccgaggacgacagcgagcccagcgccggctgccagctgcaggtgagatgcggccagctgctggcctgcggccagtggcaccacctggccgtggtggtgaccaaggagatgaagagacactgcaccgtgagcacctgcctggacggccaggtgatcggcagcgccaagatgctgtacatccaggccctgcccggccccttcctgagcatggaccccagcgccttcgtggacgtgtacggctacatcgccacccccagagtgtggaagcagaagagcagcctgatctggagactgggccccacctacctgttcgaggaggccatcagcatggagaccctggaggtgatcaacaagctgggccccagatactgcggcaacttccaggccgtgcacgtgcagggcgaggacctggacagcgaggccacccccttcgtggccgaggagagagtgagcttcggcctgcacatcgccagcagcagcatcaccagcgtggccgacatcagaaacgcctacaacgaggtggacagcagactgatcgccaaggagatgaacatcagcagcagagacaacgccatgcccgtgttcctgctgagaaactgcgccggccacctgagcggcagcctgagaaccatcggcgccgtggccgtgggccagctgggcgtgagagtgttccacagcagccccgccgccagcagcctggacttcatcggcggccccgccatcctgctgggcctgatcagcctggccaccgacgaccacaccatgtacgccgccgtgaaggtgctgcacagcgtgctgaccagcaacgccatgtgcgacttcctgatgcagcacatctgcggctaccagatcatggccttcctgctgagaaagaaggccagcctgctgaaccacagaatcttccagctgatcctgagcgtggccggcaccgtggagctgggcttcagaagcagcgccatcaccaacaccggcgtgttccagcacatcctgtgcaacttcgagctgtggatgaacaccgccgacaacctggagctgagcctgttcagccacctgctggagatcctgcagagccccagagagggccccagaaacgccgaggccgcccaccaggcccagctgatccccaagctgatcttcctgttcaacgagcccagcctgatccccagcaagatcagcaccatcatcggcatcctggcctgccagctgagaggccacttcagcacccaggacctgctgagaatcggcctgttcgtggtgtacaccctgaagcccagcagcgtgaacgagagacagatctgcatggacggcgccctggaccccagcctgcccgccggcagccagaccagcggcaagaccatctggctgagaaaccagctgctggagatgctgctgagcgtgatcagcagcccccagctgcacctgagcagcgagagcaaggaggagatgttcctgaagctgggccccgactggttcctgctgctgctgcagggccacctgcacgccagcaccaccgtgctggccctgaagctgctgctgtacttcctggccagccccagcctgagaaccagattcagagacggcctgtgcgccggcagctgggtggagagaagcaccgagggcgtggacatcgtgatggacaacctgaagagccagagccccctgcccgagcagagcccctgcctgctgcccggcttcagagtgctgaacgacttcctggcccaccacgtgcacatccccgaggtgtacctgatcgtgagcaccttcttcctgcagacccccctgaccgagctgatggacggccccaaggacagcctggacgccatgctgcagtggctgctgcagagacaccaccaggaggaggtgctgcaggccggcctgtgcaccgagggcgccctgctgctgctggagatgctgaaggccaccatgagccagcccctggccggcagcgaggacggcgcctgggcccagaccttccccgccagcgtgctgcagttcctgagcctggtgcacagaacctacccccaggaccccgcctggagagcccccgagttcctgcagaccctggccatcgccgccttccccctgggcgcccagaagggcgtgggcgccgagagcaccagaaacaccagcagccccgaggccgccgccgagggcgacagcaccgtggagggcctgcaggcccccaccaaggcccaccccgccagaagaaagctgagagagttcacccagctgctgctgagagagctgctgctgggcgccagcagccccaagcagtggctgcccctggaggtgctgctggaggccagccccgaccacgccaccagccagcagaagagagacttccagagcgaggtgctgctgagcgccatggagctgttccacatgaccagcggcggcgacgccgccatgttcagagacggcaaggagccccagcccagcgccgaggccgccgccgcccccagcctggccaacatcagctgcttcacccagaagctggtggagaagctgtacagcggcatgttcagcgccgaccccagacacatcctgctgttcatcctggagcacatcatggtggtgatcgagaccgccagcagccagagagacaccgtgctgagcaccctgtacagcagcctgaacaaggtgatcctgtactgcctgagcaagccccagcagagcctgagcgagtgcctgggcctgctgagcatcctgggcttcctgcaggagcactgggacgtggtgttcgccacctacaacagcaacatcagcttcctgctgtgcctgatgcactgcctgctgctgctgaacgagagaagctaccccgagggcttcggcctggagcccaagcccagaatgagcacctaccaccaggtgttcctgagccccaacgaggacgtgaaggagaagagagaggacctgcccagcctgagcgacgtgcagcacaacatccagaagaccgtgcagaccctgtggcagcagctggtggcccagagacagcagaccctggaggacgccttcaagatcgacctgagcgtgaagcccggcgagagagaggtgaagatcgaggaggtgacccccctgtgggaggagaccatgctgaaggcctggcagcactacctggccagcgagaagaagagcctggccagcagaagcaacgtggcccaccacagcaaggtgaccctgtggagcggcagcctgagcagcgccatgaagctgatgcccggcagacaggccaaggaccccgagtgcaagaccgaggacttcgtgagctgcatcgagaactacagaagaagaggccaggagctgtacgccagcctgtacaaggaccacgtgcagagaagaaagtgcggcaacatcaaggccgccaacgcctgggccagaatccaggagcagctgttcggcgagctgggcctgtggagccagggcgaggagaccaagccctgcagcccctgggagctggactggagagagggccccgccagaatgagaaagagaatcaagagactgagccccctggaggccctgagcagcggcagacacaaggagagccaggacaagaacgaccacatcagccagaccaacgccgagaaccaggacgagctgaccctgagagaggccgagggcgagcccgacgaggtgggcgtggactgcacccagctgaccttcttccccgccctgcacgagagcctgcacagcgaggacttcctggagctgtgcagagagagacaggtgatcctgcaggagctgctggacaaggagaaggtgacccagaagttcagcctggtgatcgtgcagggccacctggtgagcgagggcgtgctgctgttcggccaccagcacttctacatctgcgagaacttcaccctgagccccaccggcgacgtgtactgcaccagacactgcctgagcaacatcagcgaccccttcatcttcaacctgtgcagcaaggacagaagcaccgaccactacagctgccagtgccacagctacgccgacatgagagagctgagacaggccagattcctgctgcaggacatcgccctggagatcttcttccacaacggctacagcaagttcctggtgttctacaacaacgacagaagcaaggccttcaagagcttctgcagcttccagcccagcctgaagggcaaggccaccagcgaggacaccctgagcctgagaagataccccggcagcgacagaatcatgctgcagaagtggcagaagagagacatcagcaacttcgagtacctgatgtacctgaacaccgccgccggcagaacctgcaacgactacatgcagtaccccgtgttcccctgggtgctggccgactacaccagcgagaccctgaacctggccaaccccaagatcttcagagacctgagcaagcccatgggcgcccagaccaaggagagaaagctgaagttcatccagagattcaaggaggtggagaagaccgagggcgacatgaccgtgcagtgccactactacacccactacagcagcgccatcatcgtggccagctacctggtgagaatgccccccttcacccaggccttctgcgccctgcagggcggcagcttcgacgtggccgacagaatgttccacagcgtgaagagcacctgggagagcgccagcagagagaacatgagcgacgtgagagagctgacccccgagttcttctacctgcccgagttcctgaccaactgcaacggcgtggagttcggctgcatgcaggacggcaccgtgctgggcgacgtgcagctgcccccctgggccgacggcgaccccagaaagttcatcagcctgcacagaaaggccctggagagcgacttcgtgagcgccaacctgcaccactggatcgacctgatcttcggctacaagcagcagggccccgccgccgtggacgccgtgaacatcttccacccctacttctacggcgacagaatggacctgagcagcatcaccgaccccctgatcaagagcaccatcctgggcttcgtgagcaacttcggccaggtgcccaagcagctgttcaccaagccccaccccgccagaaccgccgccggcaagcccctgcccggcaaggacgtgagcacccccgtgagcctgcccggccacccccagcccttcttctacagcctgcagagcctgagacccagccaggtgaccgtgaaggacatgtacctgttcagcctgggcagcgagagccccaagggcgccatcggccacatcgtgagcaccgagaagaccatcctggccgtggagagaaacaaggtgctgctgccccccctgtggaacagaaccttcagctggggcttcgacgacttcagctgctgcctgggcagctacggcagcgacaaggtgctgatgaccttcgagaacctggccgcctggggcagatgcctgtgcgccgtgtgccccagccccaccaccatcgtgaccagcggcaccagcaccgtggtgtgcgtgtgggagctgagcatgaccaagggcagacccagaggcctgagactgagacaggccctgtacggccacacccaggccgtgacctgcctggccgccagcgtgaccttcagcctgctggtgagcggcagccaggactgcacctgcatcctgtgggacctggaccacctgacccacgtgaccagactgcccgcccacagagagggcatcagcgccatcaccatcagcgacgtgagcggcaccatcgtgagctgcgccggcgcccacctgagcctgtggaacgtgaacggccagcccctggccagcatcaccaccgcctggggccccgagggcgccatcacctgctgctgcctgatggagggccccgcctgggacaccagccagatcatcatcaccggcagccaggacggcatggtgagagtgtggaagaccgaggacgtgaagatgagcgtgcccggcagacccgccggcgaggagccccccgcccagccccccagccccagaggccacaagtgggagaagaacctggccctgagcagagagctggacgtgagcatcgccctgaccggcaagcccagcaagaccagccccgccgtgaccgccctggccgtgagcagaaaccacaccaagctgctggtgggcgacgagagaggcagaatcttctgctggagcgccgacggctag

SEQ ID NO: 105255 - DNA, 1965 bp, synthetic construct
  misc_feature 1..1965: note = Description of Artificial Sequence: Synthetic coding sequence
  source 1..1965: mol_type = other DNA
atggaggccgaggacctgagcaaggccgaggacagaaacgaggaccccggcagcaagaacgagggccagctggccgccgtgcagcccgacgtgccccacggcggccagagcagcagccccaccgccctgtgggacatgctggagagaaagttcctggagtaccagcagctgacccacaagagccccatcgagagacagaagagcctgctgagcctgctgcccctgttcctgaaggcctgggagcacagcgtgggcatcatctgcttccccagcctgcagagactggccgaggacgtgagcgaccagctggcccagcagctgcagaaggccctggtgggcaagcccgccgagcaggccagactggccgccggccagctgctgtggtggaagggcgacgtggaccaggacggctacctgctgctgaagagcgtgtacgtgctgaccggcaccgacagcgagaccctgggcagagtggccgagagcggcctgcccgccctgctgctgcagtgcctgtacctgttcttcgtgttccccctggacaaggacgagctgctggagagcgacctgcaggtgcagaagatgttcgtgcagatgctgctgaacatctgcagcgacagccagggcctggagggcctgctgagcggcagcgagctgcagagcctgctgatcgccaccacctgcctgagagagcacagctgctgcttctggaaggagcccaccttctgcgtgctgagagccatcagcaaggcccagaacctgagcatcatccagtacctgcaggccaccgactgcgtgagactgagcctgcagaacctgagcagactgaccgacaccctgcccgcccccgaggtgagcgaggccgtgagcctgatcctgggcttcgtgaaggacagctaccccgtgagcagcgccctgttcctggagttcgagaacagcgagggctaccccctgctgctgaaggtgctgctgagatacgacggcctgacccagagcgaggtggacccccacctggaggagctgctgggcctggtggtgtggctgaccacctgcggcagaagcgagctgaaggtgttcgacagcatcacctacccccagctggagggcttcaagttccaccacgaggccagcggcgtgaccgtgaagaacctgcaggccttccaggtgctgcagaacgtgttccacaaggccagcgacagcgtgctgtgcatccaggtgctgagcgtgatcagaaccatgtgggcctggaacgccagaaacttcttcctgctggagtggaccctgcagcccatcagccagttcgtggagatcatgcccctgaagcccgcccccgtgcaggagcacttcttccagctgctggaggccctggtgttcgagctgcactacgtgccccacgagatcctgagaaaggtgcagcacctgatcaaggagagccccggccccagctgcaccctgatggccctgcagagcatcctgagcatcgccggcggcgaccccctgttcaccgacatcttcagagacagcggcctgctgggcctgctgctggcccagctgagaaagcaggccaagatcatgagaaagagcggcaacaaggtgagcacccccggcgtgcaggaccccgagagagagctgacctgcgtgatgctgagaatcgtggtgaccctgctgaagggcagcgtgagaaacgccgtggtgctgaaggaccacggcatggtgcccttcatcaagatcttcctggacgacgagtgctacagagaggccagcctgagcatcctggagcagctgagcgccatcaacgccgaggagtacatgagcatcatcgtgggcgccctgtgcagcagcacccagggcgagctgcagctgaagctggacctgctgaaggtgatcagcagcccccccctgagactggccagcctgtggatctgcaccaagagaagcaccttcgcccaggccttcgtgttcatgtag

SEQ ID NO: 105256 - DNA, 1659 bp, synthetic construct
  misc_feature 1..1659: note = Description of Artificial Sequence: Synthetic coding sequence
  source 1..1659: mol_type = other DNA
tgagacgacaccgtggtgtgggccgaggagtgcgtggcctgcgccaactggctgtggatgaacaccgccgacaacctggagctgagcctgttcagccacctgctggagatcctgcagagccccagagagggccccagaaacgccgaggccgcccaccaggcccagctgatccccaagctgatcttcctgttcaacgagcccagcctgatccccagcaagatcagcaccatcatcggcatcctggcctgccagctgagaggccacttcagcacccaggacctgctgagaatcggcctgttcgtggtgtacaccctgaagcccagcagcgtgaacgagagacagatctgcatggacggcgccctggaccccagcctgcccgccggcagccagaccagcggcaagaccatctggctgagaaaccagctgctggagatgctgctgagcgtgatcagcagcccccagctgcacctgagcagcgagagcaaggaggagatgttcctgaagctgggccccgactggttcctgctgctgctgcagggccacctgcacgccagcaccaccgtgctggccctgaagctgctgctgtacttcctggccagccccagcctgagaaccagattcagagacggcctgtgcgccggcagctgggtggagagaagcaccgagggcgtggacatcgtgatggacaacctgaagagccagagccccctgcccgagcagagcccctgcctgctgcccggcttcagagtgctgaacgacttcctggcccaccacgtgcacatccccgaggtgtacctgatcgtgagcaccttcttcctgcagacccccctgaccgagctgatggacggccccaaggacagcctggacgccatgctgcagtggctgctgcagagacaccaccaggaggaggtgctgcaggccggcctgtgcaccgagggcgccctgctgctgctggagatgctgaaggccaccatgagccagcccctggccggcagcgaggacggcgcctgggcccagaccttccccgccagcgtgctgcagttcctgagcctggtgcacagaacctacccccaggaccccgcctggagagcccccgagttcctgcagaccctggccatcgccgccttccccctgggcgcccagaagggcgtgggcgccgagagcaccagaaacaccagcagccccgaggccgccgccgagggcgacagcaccgtggagggcctgcaggcccccaccaaggcccaccccgccagaagaaagctgagagagttcacccagctgctgctgagagagctgctgctgggcgccagcagccccaagcagtggctgcccctggaggtgctgctggaggccagccccgaccacgccaccagccagcagaagagagacttccagagcgaggtgctgctgagcgccatggagctgttccacatgaccagcggcggcgacgccgccatgttcagagacggcaaggagccccagcccagcgccgaggccgccgccgcccccagcctggccaacatcagctgcttcacccagaagctggtggagaagctgtacagcggcatgttcagcgccgaccccagacacatcctgctgttcatcctggagcacatcatggtgatcagcgcccccctgcaggccagagacttcagctag

SEQ ID NO: 105257 - DNA, 3129 bp, synthetic construct
  misc_feature 1..3129: note = Description of Artificial Sequence: Synthetic coding sequence
  source 1..3129: mol_type = other DNA
atggaggccgaggacctgagcaaggccgaggacagaaacgaggaccccggcagcaagaacgagggccagctggccgccgtgcagcccgacgtgccccacggcggccagagcagcagccccaccgccctgtgggacatgctggagagaaagttcctggagtaccagcagctgacccacaagagccccatcgagagacagaagagcctgctgagcctgctgcccctgttcctgaaggcctgggagcacagcgtgggcatcatctgcttccccagcctgcagagactggccgaggacgtgagcgaccagctggcccagcagctgcagaaggccctggtgggcaagcccgccgagcaggccagactggccgccggccagctgctgtggtggaagggcgacgtggaccaggacggctacctgctgctgaagagcgtgtacgtgctgaccggcaccgacagcgagaccctgggcagagtggccgagagcggcctgcccgccctgctgctgcagtgcctgtacctgttcttcgtgttccccctggacaaggacgagctgctggagagcgacctgcaggtgcagaagatgttcgtgcagatgctgctgaacatctgcagcgacagccagggcctggagggcctgctgagcggcagcgagctgcagagcctgctgatcgccaccacctgcctgagagagcacagctgctgcttctggaaggagcccaccttctgcgtgctgagagccatcagcaaggcccagaacctgagcatcatccagtacctgcaggccaccgactgcgtgagactgagcctgcagaacctgagcagactgaccgacaccctgcccgcccccgaggtgagcgaggccgtgagcctgatcctgggcttcgtgaaggacagctaccccgtgagcagcgccctgttcctggagttcgagaacagcgagggctaccccctgctgctgaaggtgctgctgagatacgacggcctgacccagagcgaggtggacccccacctggaggagctgctgggcctggtggtgtggctgaccacctgcggcagaagcgagctgaaggtgttcgacagcatcacctacccccagctggagggcttcaagttccaccacgaggccagcggcgtgaccgtgaagaacctgcaggccttccaggtgctgcagaacgtgttccacaaggccagcgacagcgtgctgtgcatccaggtgctgagcgtgatcagaaccatgtgggcctggaacgccagaaacttcttcctgctggagtggaccctgcagcccatcagccagttcgtggagatcatgcccctgaagcccgcccccgtgcaggagcacttcttccagctgctggaggccctggtgttcgagctgcactacgtgccccacgagatcctgagaaaggtgcagcacctgatcaaggagagccccggccccagctgcaccctgatggccctgcagagcatcctgagcatcgccggcggcgaccccctgttcaccgacatcttcagagacagcggcctgctgggcctgctgctggcccagctgagaaagcaggccaagatcatgagaaagagcggcaacaaggtgagcacccccggcgtgcaggaccccgagagagagctgacctgcgtgatgctgagaatcgtggtgaccctgctgaagggcagcgtgagaaacgccgtggtgctgaaggaccacggcatggtgcccttcatcaagatcttcctggacgacgagtgctacagagaggccagcctgagcatcctggagcagctgagcgccatcaacgccgaggagtacatgagcatcatcgtgggcgccctgtgcagcagcacccagggcgagctgcagctgaagctggacctgctgaagagcctgctgagaatcctggtgacccccaagggcagagccgccttcagagtgagcagcggcttcaacggcctgctgagcctgctgagcgacctggagggcagcctgcaggagccccccctgcaggcctggggcgccgtgagccccagacagaccctggagctggtgctgtacaccctgtgcgccgtgagcgccgccctgcactgggaccccgtgaacggctacttcttcagaagaaacggcctgttcgagaagctggccgaggacctgtgcctgctgggctgcttcggcgccctggaggaggagggcaacctgctgagaagctgggtggacaccaaggccagacccttcgccgacctgctgggcaccgccttcagcagcagcggcagcctgccccccagaatccagagctgcctgcagatcctgggcttcctggacagcatggccagcggcaccctgcacctgagaggcgacctgaaggagagcctgagaaccaagcagggccccgtggtggacgtgcagaagggcgagaccggcagcgacccccagagaaacttcaagcagtggcccgacctggaggagagaatggacgagggcgacgccgccatcatgcaccccggcgtggtgtgcatcatggtgagactgctgcccagactgtaccacgaggaccacccccagctgagcgaggagatccagtgcagcctggccagccacatccagagcctggtgaagagcgagaagaacagacaggtgatgtgcgaggccggcctgctgggcaccctgatggccagctgccacagagccctggtgaccagcggcagccccctgcacagcagactgatcagaatcttcgagaagctggccagccaggccatcgagcccgacgtgctgagacagttcctgggcctgggcatccccagcagcctgagcgccaccaccaagatcctggacagcagccacacccacagaggcaaccccggctgcagcggcagccagaccgcccagggcctggccgagggcccctggcccgccgcccccgacgccggcctgcaccccggcgtgacccaggccccccagcccctgggcgagagccaggacagcaccaccgccctgcagaccgccctgagcctgatcagcatgaccagcccccacatctggaagcccaacatctggaaggacaacctggcccagaagcccgtggccggcgacgccgcccagtgcaacatcttcccccccgccagcagcgtgctgtag

SEQ ID NO: 105258 - DNA, 9531 bp, synthetic construct
  misc_feature 1..9531: note = Description of Artificial Sequence: Synthetic coding sequence
  source 1..9531: mol_type = other DNA
atggaggccgaggacctgagcaaggccgaggacagaaacgaggaccccggcagcaagaacgagggccagctggccgccgtgcagcccgacgtgccccacggcggccagagcagcagccccaccgccctgtgggacatgctggagagaaagttcctggagtaccagcagctgacccacaagagccccatcgagagacagaagagcctgctgagcctgctgcccctgttcctgaaggcctgggagcacagcgtgggcatcatctgcttccccagcctgcagagactggccgaggacgtgagcgaccagctggcccagcagctgcagaaggccctggtgggcaagcccgccgagcaggccagactggccgccggccagctgctgtggtggaagggcgacgtggaccaggacggctacctgctgctgaagagcgtgtacgtgctgaccggcaccgacagcgagaccctgggcagagtggccgagagcggcctgcccgccctgctgctgcagtgcctgtacctgttcttcgtgttccccctggacaaggacgagctgctggagagcgacctgcaggtgcagaagatgttcgtgcagatgctgctgaacatctgcagcgacagccagggcctggagggcctgctgagcggcagcgagctgcagagcctgctgatcgccaccacctgcctgagagagcacagctgctgcttctggaaggagcccaccttctgcgtgctgagagccatcagcaaggcccagaacctgagcatcatccagtacctgcaggccaccgactgcgtgagactgagcctgcagaacctgagcagactgaccgacaccctgcccgcccccgaggtgagcgaggccgtgagcctgatcctgggcttcgtgaaggacagctaccccgtgagcagcgccctgttcctggagttcgagaacagcgagggctaccccctgctgctgaaggtgctgctgagatacgacggcctgacccagagcgaggtggacccccacctggaggagctgctgggcctggtggtgtggctgaccacctgcggcagaagcgagctgaaggtgttcgacagcatcacctacccccagctggagggcttcaagttccaccacgaggccagcggcgtgaccgtgaagaacctgcaggccttccaggtgctgcagaacgtgttccacaaggccagcgacagcgtgctgtgcatccaggtgctgagcgtgatcagaaccatgtgggcctggaacgccagaaacttcttcctgctggagtggaccctgcagcccatcagccagttcgtggagatcatgcccctgaagcccgcccccgtgcaggagcacttcttccagctgctggaggccctggtgttcgagctgcactacgtgccccacgagatcctgagaaaggtgcagcacctgatcaaggagagccccggccccagctgcaccctgatggccctgcagagcatcctgagcatcgccggcggcgaccccctgttcaccgacatcttcagagacagcggcctgctgggcctgctgctggcccagctgagaaagcaggccaagatcatgagaaagagcggcaacaaggtgagcacccccggcgtgcaggaccccgagagagagctgacctgcgtgatgctgagaatcgtggtgaccctgctgaagggcagcgtgagaaacgccgtggtgctgaaggaccacggcatggtgcccttcatcaagatcttcctggacgacgagtgctacagagaggccagcctgagcatcctggagcagctgagcgccatcaacgccgaggagtacatgagcatcatcgtgggcgccctgtgcagcagcacccagggcgagctgcagctgaagctggacctgctgaagagcctgctgagaatcctggtgacccccaagggcagagccgccttcagagtgagcagcggcttcaacggcctgctgagcctgctgagcgacctggagggcagcctgcaggagccccccctgcaggcctggggcgccgtgagccccagacagaccctggagctggtgctgtacaccctgtgcgccgtgagcgccgccctgcactgggaccccgtgaacggctacttcttcagaagaaacggcctgttcgagaagctggccgaggacctgtgcctgctgggctgcttcggcgccctggaggaggagggcaacctgctgagaagctgggtggacaccaaggccagacccttcgccgacctgctgggcaccgccttcagcagcagcggcagcctgccccccagaatccagagctgcctgcagatcctgggcttcctggacagcatggccagcggcaccctgcacctgagaggcgacctgaaggagagcctgagaaccaagcagggccccgtggtggacgtgcagaagggcgagaccggcagcgacccccagagaaacttcaagcagtggcccgacctggaggagagaatggacgagggcgacgccgccatcatgcaccccggcgtggtgtgcatcatggtgagactgctgcccagactgtaccacgaggaccacccccagctgagcgaggagatccagtgcagcctggccagccacatccagagcctggtgaagagcgagaagaacagacaggtgatgtgcgaggccggcctgctgggcaccctgatggccagctgccacagagccctggtgaccagcggcagccccctgcacagcagactgatcagaatcttcgagaagctggccagccaggccatcgagcccgacgtgctgagacagttcctgggcctgggcatccccagcagcctgagcgccaccaccaagatcctggacagcagccacacccacagaggcaaccccggctgcagcggcagccagaccgcccagggcctggccgagggcccctggcccgccgcccccgacgccggcctgcaccccggcgtgacccaggccccccagcccctgggcgagagccaggacagcaccaccgccctgcagaccgccctgagcctgatcagcatgaccagccccagaaacctgcagccccagagagccgccctggcccccagcttcgtggagttcgacatgagcgtggagggctacggctgcctgttcatccccaccctgagcaccgtgatgggcaccagcaccgagtacagcgtgagcggcggcatcggcaccggcgccaccagacccttccccccccccggcggcctgaccttcagctgctggttcctgatcagcagacacggcgccgccaccgagggccaccccctgagattcctgaccctggtgagacacctggccagaaccgagcagcccttcgtgtgcttcagcgtgagcctgtgccccgacgacctgagcctggtggtgagcaccgaggagaaggagttccagcccctggacgtgatggagcccgaggacgacagcgagcccagcgccggctgccagctgcaggtgagatgcggccagctgctggcctgcggccagtggcaccacctggccgtggtggtgaccaaggagatgaagagacactgcaccgtgagcacctgcctggacggccaggtgatcggcagcgccaagatgctgtacatccaggccctgcccggccccttcctgagcatggaccccagcgccttcgtggacgtgtacggctacatcgccacccccagagtgtggaagcagaagagcagcctgatctggagactgggccccacctacctgttcgaggaggccatcagcatggagaccctggaggtgatcaacaagctgggccccagatactgcggcaacttccaggccgtgcacgtgcagggcgaggacctggacagcgaggccacccccttcgtggccgaggagagagtgagcttcggcctgcacatcgccagcagcagcatcaccagcgtggccgacatcagaaacgcctacaacgaggtggacagcagactgatcgccaaggagatgaacatcagcagcagagacaacgccatgcccgtgttcctgctgagaaactgcgccggccacctgagcggcagcctgagaaccatcggcgccgtggccgtgggccagctgggcgtgagagtgttccacagcagccccgccgccagcagcctggacttcatcggcggccccgccatcctgctgggcctgatcagcctggccaccgacgaccacaccatgtacgccgccgtgaaggtgctgcacagcgtgctgaccagcaacgccatgtgcgacttcctgatgcagcacatctgcggctaccagatcatggccttcctgctgagaaagaaggccagcctgctgaaccacagaatcttccagctgatcctgagcgtggccggcaccgtggagctgggcttcagaagcagcgccatcaccaacaccggcgtgttccagcacatcctgtgcaacttcgagctgtggatgaacaccgccgacaacctggagctgagcctgttcagccacctgctggagatcctgcagagccccagagagggccccagaaacgccgaggccgcccaccaggcccagctgatccccaagctgatcttcctgttcaacgagcccagcctgatccccagcaagatcagcaccatcatcggcatcctggcctgccagctgagaggccacttcagcacccaggacctgctgagaatcggcctgttcgtggtgtacaccctgaagcccagcagcgtgaacgagagacagatctgcatggacggcgccctggaccccagcctgcccgccggcagccagaccagcggcaagaccatctggctgagaaaccagctgctggagatgctgctgagcgtgatcagcagcccccagctgcacctgagcagcgagagcaaggaggagatgttcctgaagctgggccccgactggttcctgctgctgctgcagggccacctgcacgccagcaccaccgtgctggccctgaagctgctgctgtacttcctggccagccccagcctgagaaccagattcagagacggcctgtgcgccggcagctgggtggagagaagcaccgagggcgtggacatcgtgatggacaacctgaagagccagagccccctgcccgagcagagcccctgcctgctgcccggcttcagagtgctgaacgacttcctggcccaccacgtgcacatccccgaggtgtacctgatcgtgagcaccttcttcctgcagacccccctgaccgagctgatggacggccccaaggacagcctggacgccatgctgcagtggctgctgcagagacaccaccaggaggaggtgctgcaggccggcctgtgcaccgagggcgccctgctgctgctggagatgctgaaggccaccatgagccagcccctggccggcagcgaggacggcgcctgggcccagaccttccccgccagcgtgctgcagttcctgagcctggtgcacagaacctacccccaggaccccgcctggagagcccccgagttcctgcagaccctggccatcgccgccttccccctgggcgcccagaagggcgtgggcgccgagagcaccagaaacaccagcagccccgaggccgccgccgagggcgacagcaccgtggagggcctgcaggcccccaccaaggcccaccccgccagaagaaagctgagagagttcacccagctgctgctgagagagctgctgctgggcgccagcagccccaagcagtggctgcccctggaggtgctgctggaggccagccccgaccacgccaccagccagcagaagagagacttccagagcgaggtgctgctgagcgccatggagctgttccacatgaccagcggcggcgacgccgccatgttcagagacggcaaggagccccagcccagcgccgaggccgccgccgcccccagcctggccaacatcagctgcttcacccagaagctggtggagaagctgtacagcggcatgttcagcgccgaccccagacacatcctgctgttcatcctggagcacatcatggtggtgatcgagaccgccagcagccagagagacaccgtgctgagcaccctgtacagcagcctgaacaaggtgatcctgtactgcctgagcaagccccagcagagcctgagcgagtgcctgggcctgctgagcatcctgggcttcctgcaggagcactgggacgtggtgttcgccacctacaacagcaacatcagcttcctgctgtgcctgatgcactgcctgctgctgctgaacgagagaagctaccccgagggcttcggcctggagcccaagcccagaatgagcacctaccaccaggtgttcctgagccccaacgaggacgtgaaggagaagagagaggacctgcccagcctgagcgacgtgcagcacaacatccagaagaccgtgcagaccctgtggcagcagctggtggcccagagacagcagaccctggaggacgccttcaagatcgacctgagcgtgaagcccggcgagagagaggtgaagatcgaggaggtgacccccctgtgggaggagaccatgctgaaggcctggcagcactacctggccagcgagaagaagagcctggccagcagaagcaacgtggcccaccacagcaaggtgaccctgtggagcggcagcctgagcagcgccatgaagctgatgcccggcagacaggccaaggaccccgagtgcaagaccgaggacttcgtgagctgcatcgagaactacagaagaagaggccaggagctgtacgccagcctgtacaaggaccacgtgcagagaagaaagtgcggcaacatcaaggccgccaacgcctgggccagaatccaggagcagctgttcggcgagctgggcctgtggagccagggcgaggagaccaagccctgcagcccctgggagctggactggagagagggccccgccagaatgagaaagagaatcaagagactgagccccctggaggccctgagcagcggcagacacaaggagagccaggacaagaacgaccacatcagccagaccaacgccgagaaccaggacgagctgaccctgagagaggccgagggcgagcccgacgaggtgggcgtggactgcacccagctgaccttcttccccgccctgcacgagagcctgcacagcgaggacttcctggagctgtgcagagagagacaggtgatcctgcaggagctgctggacaaggagaaggtgacccagaagttcagcctggtgatcgtgcagggccacctggtgagcgagggcgtgctgctgttcggccaccagcacttctacatctgcgagaacttcaccctgagccccaccggcgacgtgtactgcaccagacactgcctgagcaacatcagcgaccccttcatcttcaacctgtgcagcaaggacagaagcaccgaccactacagctgccagtgccacagctacgccgacatgagagagctgagacaggccagattcctgctgcaggacatcgccctggagatcttcttccacaacggctacagcaagttcctggtgttctacaacaacgacagaagcaaggccttcaagagcttctgcagcttccagcccagcctgaagggcaaggccaccagcgaggacaccctgagcctgagaagataccccggcagcgacagaatcatgctgcagaagtggcagaagagagacatcagcaacttcgagtacctgatgtacctgaacaccgccgccggcagaacctgcaacgactacatgcagtaccccgtgttcccctgggtgctggccgactacaccagcgagaccctgaacctggccaaccccaagatcttcagagacctgagcaagcccatgggcgcccagaccaaggagagaaagctgaagttcatccagagattcaaggaggtggagaagaccgagggcgacatgaccgtgcagtgccactactacacccactacagcagcgccatcatcgtggccagctacctggtgagaatgccccccttcacccaggccttctgcgccctgcagggcggcagcttcgacgtggccgacagaatgttccacagcgtgaagagcacctgggagagcgccagcagagagaacatgagcgacgtgagagagctgacccccgagttcttctacctgcccgagttcctgaccaactgcaacggcgtggagttcggctgcatgcaggacggcaccgtgctgggcgacgtgcagctgcccccctgggccgacggcgaccccagaaagttcatcagcctgcacagaaaggccctggagagcgacttcgtgagcgccaacctgcaccactggatcgacctgatcttcggctacaagcagcagggccccgccgccgtggacgccgtgaacatcttccacccctacttctacggcgacagaatggacctgagcagcatcaccgaccccctgatcaagagcaccatcctgggcttcgtgagcaacttcggccaggtgcccaagcagctgttcaccaagccccaccccgccagaaccgccgccggcaagcccctgcccggcaaggacgtgagcacccccgtgagcctgcccggccacccccagcccttcttctacagcctgcagagcctgagacccagccaggtgaccgtgaaggacatgtacctgttcagcctgggcagcgagagccccaagggcgccatcggccacatcgtgagcaccgagaagaccatcctggccgtggagagaaacaaggtgctgctgccccccctgtggaacagaaccttcagctggggcttcgacgacttcagctgctgcctgggcagctacggcagcgacaaggtgctgatgaccttcgagaacctggccgcctggggcagatgcctgtgcgccgtgtgccccagccccaccaccatcgtgaccagcggcaccagcaccgtggtgtgcgtgtgggagctgagcatgaccaagggcagacccagaggcctgagactgagacaggccctgtacggccacacccaggccgtgacctgcctggccgccagcgtgaccttcagcctgctggtgagcggcagccaggactgcacctgcatcctgtgggacctggaccacctgacccacgtgaccagactgcccgcccacagagagggcatcagcgccatcaccatcagcgacgtgagcggcaccatcgtgagctgcgccggcgcccacctgagcctgtggaacgtgaacggccagcccctggccagcatcaccaccgcctggggccccgagggcgccatcacctgctgctgcctgatggagggccccgcctgggacaccagccagatcatcatcaccggcagccaggacggcatggtgagagtgtggaagaccgaggacgtgaagatgagcgtgcccggcctgcagatgggcagaaagagagaggccgccgaggccctggcccagcagtgccaggccgagggcggcagaggcgactggggcctgagcagcgcctacagaagaaacccccagggcctgctgccccacagcagccagggcagagccagcggcaaccacagcagcgccgcccagcccagcccctggcccatgggcctgctgtag

SEQ ID NO: 105259 - DNA, 3159 bp, synthetic construct
  misc_feature 1..3159: note = Description of Artificial Sequence: Synthetic coding sequence
  source 1..3159: mol_type = other DNA
ctgaacagcgacctgctgtgccacggcatggaggccgaggacctgagcaaggccgaggacagaaacgaggaccccggcagcaagaacgagggccagctggccgccgtgcagcccgacgtgccccacggcggccagagcagcagccccaccgccctgtgggacatgctggagagaaagttcctggagtaccagcagctgacccacaagagccccatcgagagacagaagagcctgctgagcctgctgcccctgttcctgaaggcctgggagcacagcgtgggcatcatctgcttccccagcctgcagagactggccgaggacgtgagcgaccagctggcccagcagctgcagaaggccctggtgggcaagcccgccgagcaggccagactggccgccggccagctgctgtggtggaagggcgacgtggaccaggacggctacctgctgctgaagagcgtgtacgtgctgaccggcaccgacagcgagaccctgggcagagtggccgagagcggcctgcccgccctgctgctgcagtgcctgtacctgttcttcgtgttccccctggacaaggacgagctgctggagagcgacctgcaggtgcagaagatgttcgtgcagatgctgctgaacatctgcagcgacagccagggcctggagggcctgctgagcggcagcgagctgcagagcctgctgatcgccaccacctgcctgagagagcacagctgctgcttctggaaggagcccaccttctgcgtgctgagagccatcagcaaggcccagaacctgagcatcatccagtacctgcaggccaccgactgcgtgagactgagcctgcagaacctgagcagactgaccgacaccctgcccgcccccgaggtgagcgaggccgtgagcctgatcctgggcttcgtgaaggacagctaccccgtgagcagcgccctgttcctggagttcgagaacagcgagggctaccccctgctgctgaaggtgctgctgagatacgacggcctgacccagagcgaggtggacccccacctggaggagctgctgggcctggtggtgtggctgaccacctgcggcagaagcgagctgaaggtgttcgacagcatcacctacccccagctggagggcttcaagttccaccacgaggccagcggcgtgaccgtgaagaacctgcaggccttccaggtgctgcagaacgtgttccacaaggccagcgacagcgtgctgtgcatccaggtgctgagcgtgatcagaaccatgtgggcctggaacgccagaaacttcttcctgctggagtggaccctgcagcccatcagccagttcgtggagatcatgcccctgaagcccgcccccgtgcaggagcacttcttccagctgctggaggccctggtgttcgagctgcactacgtgccccacgagatcctgagaaaggtgcagcacctgatcaaggagagccccggccccagctgcaccctgatggccctgcagagcatcctgagcatcgccggcggcgaccccctgttcaccgacatcttcagagacagcggcctgctgggcctgctgctggcccagctgagaaagcaggccaagatcatgagaaagagcggcaacaaggtgagcacccccggcgtgcaggaccccgagagagagctgacctgcgtgatgctgagaatcgtggtgaccctgctgaagggcagcgtgagaaacgccgtggtgctgaaggaccacggcatggtgcccttcatcaagatcttcctggacgacgagtgctacagagaggccagcctgagcatcctggagcagctgagcgccatcaacgccgaggagtacatgagcatcatcgtgggcgccctgtgcagcagcacccagggcgagctgcagctgaagctggacctgctgaagagcctgctgagaatcctggtgacccccaagggcagagccgccttcagagtgagcagcggcttcaacggcctgctgagcctgctgagcgacctggagggcagcctgcaggagccccccctgcaggcctggggcgccgtgagccccagacagaccctggagctggtgctgtacaccctgtgcgccgtgagcgccgccctgcactgggaccccgtgaacggctacttcttcagaagaaacggcctgttcgagaagctggccgaggacctgtgcctgctgggctgcttcggcgccctggaggaggagggcaacctgctgagaagctgggtggacaccaaggccagacccttcgccgacctgctgggcaccgccttcagcagcagcggcagcctgccccccagaatccagagctgcctgcagatcctgggcttcctggacagcatggccagcggcaccctgcacctgagaggcgacctgaaggagagcctgagaaccaagcagggccccgtggtggacgtgcagaagggcgagaccggcagcgacccccagagaaacttcaagcagtggcccgacctggaggagagaatggacgagggcgacgccgccatcatgcaccccggcgtggtgtgcatcatggtgagactgctgcccagactgtaccacgaggaccacccccagctgagcgaggagatccagtgcagcctggccagccacatccagagcctggtgaagagcgagaagaacagacaggtgatgtgcgaggccggcctgctgggcaccctgatggccagctgccacagagccctggtgaccagcggcagccccctgcacagcagactgatcagaatcttcgagaagctggccagccaggccatcgagcccgacgtgctgagacagttcctgggcctgggcatccccagcagcctgagcgccaccaccaagatcctggacagcagccacacccacagaggcaaccccggctgcagcggcagccagaccgcccagggcctggccgagggcccctggcccgccgcccccgacgccggcctgcaccccggcgtgacccaggccccccagcccctgggcgagagccaggacagcaccaccgccctgcagaccgccctgagcctgatcagcatgaccagccccgtggccggcagccagaccagcggcaagaccatctggctgagaaaccagctgctggagatgctgctgagcgtgatcagcagcccccagctgcacctgagcagcgagtag

SEQ ID NO: 105260 - DNA, 1875 bp, synthetic construct
  misc_feature 1..1875: note = Description of Artificial Sequence: Synthetic coding sequence
  source 1..1875: mol_type = other DNA
atgctgcagaagtggcagaagagagacatcagcaacttcgagtacctgatgtacctgaacaccgccgccggcagaacctgcaacgactacatgcagtaccccgtgttcccctgggtgctggccgactacaccagcgagaccctgaacctggccaaccccaagatcttcagagacctgagcaagcccatgggcgcccagaccaaggagagaaagctgaagttcatccagagattcaaggaggtggagaagaccgagggcgacatgaccgtgcagtgccactactacacccactacagcagcgccatcatcgtggccagctacctggtgagaatgccccccttcacccaggccttctgcgccctgcagggcggcagcttcgacgtggccgacagaatgttccacagcgtgaagagcacctgggagagcgccagcagagagaacatgagcgacgtgagagagctgacccccgagttcttctacctgcccgagttcctgaccaactgcaacggcgtggagttcggctgcatgcaggacggcaccgtgctgggcgacgtgcagctgcccccctgggccgacggcgaccccagaaagttcatcagcctgcacagaaaggccctggagagcgacttcgtgagcgccaacctgcaccactggatcgacctgatcttcggctacaagcagcagggccccgccgccgtggacgccgtgaacatcttccacccctacttctacggcgacagaatggacctgagcagcatcaccgaccccctgatcaagagcaccatcctgggcttcgtgagcaacttcggccaggtgcccaagcagctgttcaccaagccccaccccgccagaaccgccgccggcaagcccctgcccggcaaggacgtgagcacccccgtgagcctgcccggccacccccagcccttcttctacagcctgcagagcctgagacccagccaggtgaccgtgaaggacatgtacctgttcagcctgggcagcgagagccccaagggcgccatcggccacatcgtgagcaccgagaagaccatcctggccgtggagagaaacaaggtgctgctgccccccctgtggaacagaaccttcagctggggcttcgacgacttcagctgctgcctgggcagctacggcagcgacaaggtgctgatgaccttcgagaacctggccgcctggggcagatgcctgtgcgccgtgtgccccagccccaccaccatcgtgaccagcggcaccagcaccgtggtgtgcgtgtgggagctgagcatgaccaagggcagacccagaggcctgagactgagacaggccctgtacggccacacccaggccgtgacctgcctggccgccagcgtgaccttcagcctgctggtgagcggcagccaggactgcacctgcatcctgtgggacctggaccacctgacccacgtgaccagactgcccgcccacagagagggcatcagcgccatcaccatcagcgacgtgagcggcaccatcgtgagctgcgccggcgcccacctgagcctgtggaacgtgaacggccagcccctggccagcatcaccaccgcctggggccccgagggcgccatcacctgctgctgcctgatggagggccccgcctgggacaccagccagatcatcatcaccggcagccaggacggcatggtgagagtgtggaagaccgaggacgtgaagatgagcgtgcccggcagacccgccggcgaggagccccccgcccagccccccaccctgagcatggccgacggcaccagcatgaagagaatgagcacccacaccagaagagccgagcagcacgccggcaactgcgacctggtgatgcccagctgcaccagaaactacacctag

SEQ ID NO: 105261 - DNA, 1704 bp, synthetic construct
  misc_feature 1..1704: note = Description of Artificial Sequence: Synthetic coding sequence
  source 1..1704: mol_type = other DNA
atggacgacaaggacatcgacaaggagctgagacagaagctgaacttcagctactgcgaggagaccgagatcgagggccagaagaaggtggaggagagcagagaggccagcagccagacccccgagaagggcgaggtgcaggacagcgaggccaagggcacccccccctggacccccctgagcaacgtgcacgagctggacaccagcagcgagaaggacaaggagagccccgaccagatcctgagaacccccgtgagccaccccctgaagtgccccgagacccccgcccagcccgacagcagaagcaagctgctgcccagcgacagccccagcacccccaagaccatgctgagcagactggtgatcagccccaccggcaagctgcccagcagaggccccaagcacctgaagctgacccccgcccccctgaaggacgagatgaccagcctggccctggtgaacatcaaccccttcacccccgagagctacaagaagctgttcctgcagagcggcggcaagagaaagatcagaggcgacctggaggaggccggccccgaggagggcaagggcggcctgcccgccaagagatgcgtgctgagagagaccaacatggccagcagatacgagaaggagttcctggaggtggagaagatcggcgtgggcgagttcggcaccgtgtacaagtgcatcaagagactggacggctgcgtgtacgccatcaagagaagcatgaagaccttcaccgagctgagcaacgagaacagcgccctgcacgaggtgtacgcccacgccgtgctgggccaccacccccacgtggtgagatactacagcagctgggccgaggacgaccacatgatcatccagaacgagtactgcaacggcggcagcctgcaggccgccatcagcgagaacaccaagagcggcaaccacttcgaggagcccaagctgaaggacatcctgctgcagatcagcctgggcctgaactacatccacaacagcagcatggtgcacctggacatcaagcccagcaacatcttcatctgccacaagatgcagagcgagagcagcggcgtgatcgaggaggtggagaacgaggccgactggttcctgagcgccaacgtgatgtacaagatcggcgacctgggccacgccaccagcatcaacaagcccaaggtggaggagggcgacagcagattcctggccaacgagatcctgcaggaggactacagacacctgcccaaggccgacatcttcgccctgggcctgaccatcgccgtggccgccggcgccgagagcctgcccaccaacggcgccgcctggcaccacatcagaaagggcaacttccccgacgtgccccaggagctgagcgagagcttcagcagcctgctgaagaacatgatccagcccgacgccgagcagagacccagcgccgccgccctggccagaaacaccgtgctgagacccagcctgggcaagaccgaggagctgcagcagcagctgaacctggagaagttcaagaccgccaccctggagagagagctgagagaggcccagcaggcccagagcccccagggctacacccaccacggcgacaccggcgtgagcggcacccacaccggcagcagaagcaccaagagactggtgggcggcaagagcgccagaagcagcagcttcaccagcggcgagagagagcccctgcactag

SEQ ID NO: 105262 - DNA, 846 bp, synthetic construct
  misc_feature 1..846: note = Description of Artificial Sequence: Synthetic coding sequence
  source 1..846: mol_type = other DNA
atggtgaccatcctgatgagagccatcaacagcctgggcatccacgtgctggacagcagcagacccaccgaccccctgagccacagcagcaacagcagcagcgagcccgccatgttcatcgaggacaaggccgtggacaccctggcctacctgagcgacggcgacgccagagccggcctgaacggcctgcagctggccgtgctggccagactgagcagcagaaagatgttctgcaagaagagcggccagagctacagccccagcagagtgctgatcaccgagaacgacgtgaaggagggcctgcagagaagccacatcctgtacgacagagccggcgaggagcactacaactgcatcagcgccctgcacaagagcatgagaggcagcgaccagaacgccagcctgtactggctggccagaatgctggagggcggcgaggaccccctgtacgtggccagaagactggtgagattcgccagcgaggacatcggcctggccgaccccagcgccctgacccaggccgtggccgcctaccagggctgccacttcatcggcatgcccgagtgcgaggtgctgctggcccagtgcgtggtgtacttcgccagagcccccaagagcatcgaggtgtacagcgcctacaacaacgtgaaggcctgcctgagaaaccaccagggccccctgccccccgtgcccctgcacctgagaaacgcccccaccagactgatgaaggacctgggctacggcaagggctacaagtacaaccccatgtacagcgagcccgtggaccaggagtacctgcccgaggagctgagaggcgtggacttcttcaagcagagaagatgctag

SEQ ID NO: 105263 - DNA, 1338 bp, synthetic construct
  misc_feature 1..1338: note = Description of Artificial Sequence: Synthetic coding sequence
  source 1..1338: mol_type = other DNA
atgctgcagggcaagcccctggccgacaccatgagacccgacaccctgcaggactacttcggccagagcaaggccgtgggccaggacaccctgctgagaagcctgctggagaccaacgagatccccagcctgatcctgtggggcccccccggctgcggcaagaccaccctggcccacatcatcgccagcaacagcaagaagcacagcatcagattcgtgaccctgagcgccaccaacgccaagaccaacgacgtgagagacgtgatcaagcaggcccagaacgagaagagcttcttcaagagaaagaccatcctgttcatcgacgagatccacagattcaacaagagccagcaggacaccttcctgccccacgtggagtgcggcaccatcaccctgatcggcgccaccaccgagaaccccagcttccaggtgaacgccgccctgctgagcagatgcagagtgatcgtgctggagaagctgcccgtggaggccatggtgaccatcctgatgagagccatcaacagcctgggcatccacgtgctggacagcagcagacccaccgaccccctgagccacagcagcaacagcagcagcgagcccgccatgttcatcgaggacaaggccgtggacaccctggcctacctgagcgacggcgacgccagagccggcctgaacggcctgcagctggccgtgctggccagactgagcagcagaaagatgttctgcaagaagagcggccagagctacagccccagcagagtgctgatcaccgagaacgacgtgaaggagggcctgcagagaagccacatcctgtacgacagagccggcgaggagcactacaactgcatcagcgccctgcacaagagcatgagaggcagcgaccagaacgccagcctgtactggctggccagaatgctggagggcggcgaggaccccctgtacgtggccagaagactggtgagattcgccagcgaggacatcggcctggccgaccccagcgccctgacccaggccgtggccgcctaccagggctgccacttcatcggcatgcccgagtgcgaggtgctgctggcccagtgcgtggtgtacttcgccagagcccccaagagcatcgaggtgtacagcgcctacaacaacgtgaaggcctgcctgagaaaccaccagggccccctgccccccgtgcccctgcacctgagaaacgcccccaccagactgatgaaggacctgggctacggcaagggctacaagtacaaccccatgtacagcgagcccgtggaccaggagtacctgcccgaggagctgagaggcgtggacttcttcaagcagagaagatgctag

SEQ ID NO: 105264 - DNA, 1923 bp, synthetic construct
  misc_feature 1..1923: note = Description of Artificial Sequence: Synthetic coding sequence
  source 1..1923: mol_type = other DNA
atggaggtgagcggccccgaggacgaccccttcctgagccagctgcaccaggtgcagtgccccgtgtgccagcagatgatgcccgccgcccacatcaacagccacctggacagatgcctgctgctgcaccccgccggccacgccgagcccgccgccggcagccacagagccggcgagagagccaagggccccagcccccccggcgccaagagaagaagactgagcgagagcagcgccctgaagcagcccgccacccccaccgccgccgagagcagcgagggcgagggcgaggagggcgacgacggcggcgagaccgagagcagagagagctacgacgccccccccacccccagcggcgccagactgatccccgacttccccgtggccagaagcagcagccccggcagaaagggcagcggcaagagacccgccgccgccgccgccgccggcagcgccagccccagaagctgggacgaggccgaggcccaggaggaggaggaggccgtgggcgacggcgacggcgacggcgacgccgacgccgacggcgaggacgaccccggccactgggacgccgacgccgccgaggccgccaccgccttcggcgccagcggcggcggcagaccccaccccagagccctggccgccgaggagatcagacagatgctgcagggcaagcccctggccgacaccatgagacccgacaccctgcaggactacttcggccagagcaaggccgtgggccaggacaccctgctgagaagcctgctggagaccaacgagatccccagcctgatcctgtggggcccccccggctgcggcaagaccaccctggcccacatcatcgccagcaacagcaagaagcacagcatcagattcgtgaccctgagcgccaccaacgccaagaccaacgacgtgagagacgtgatcaagcaggcccagaacgagaagagcttcttcaagagaaagaccatcctgttcatcgacgagatccacagattcaacaagagccagcaggtgaacgccgccctgctgagcagatgcagagtgatcgtgctggagaagctgcccgtggaggccatggtgaccatcctgatgagagccatcaacagcctgggcatccacgtgctggacagcagcagacccaccgaccccctgagccacagcagcaacagcagcagcgagcccgccatgttcatcgaggacaaggccgtggacaccctggcctacctgagcgacggcgacgccagagccggcctgaacggcctgcagctggccgtgctggccagactgagcagcagaaagatgttctgcaagaagagcggccagagctacagccccagcagagtgctgatcaccgagaacgacgtgaaggagggcctgcagagaagccacatcctgtacgacagagccggcgaggagcactacaactgcatcagcgccctgcacaagagcatgagaggcagcgaccagaacgccagcctgtactggctggccagaatgctggagggcggcgaggaccccctgtacgtggccagaagactggtgagattcgccagcgaggacatcggcctggccgaccccagcgccctgacccaggccgtggccgcctaccagggctgccacttcatcggcatgcccgagtgcgaggtgctgctggcccagtgcgtggtgtacttcgccagagcccccaagagcatcgaggtgtacagcgcctacaacaacgtgaaggcctgcctgagaaaccaccagggccccctgccccccgtgcccctgcacctgagaaacgcccccaccagactgatgaaggacctgggctacggcaagggctacaagtacaaccccatgtacagcgagcccgtggaccaggagtacctgcccgaggagctgagaggcgtggacttcttcaagcagagaagatgctag

SEQ ID NO: 105265 - DNA, 1998 bp, synthetic construct
  misc_feature 1..1998: note = Description of Artificial Sequence: Synthetic coding sequence
  source 1..1998: mol_type = other DNA
atggaggtgagcggccccgaggacgaccccttcctgagccagctgcaccaggtgcagtgccccgtgtgccagcagatgatgcccgccgcccacatcaacagccacctggacagatgcctgctgctgcaccccgccggccacgccgagcccgccgccggcagccacagagccggcgagagagccaagggccccagcccccccggcgccaagagaagaagactgagcgagagcagcgccctgaagcagcccgccacccccaccgccgccgagagcagcgagggcgagggcgaggagggcgacgacggcggcgagaccgagagcagagagagctacgacgccccccccacccccagcggcgccagactgatccccgacttccccgtggccagaagcagcagccccggcagaaagggcagcggcaagagacccgccgccgccgccgccgccggcagcgccagccccagaagctgggacgaggccgaggcccaggaggaggaggaggccgtgggcgacggcgacggcgacggcgacgccgacgccgacggcgaggacgaccccggccactgggacgccgacgccgccgaggccgccaccgccttcggcgccagcggcggcggcagaccccaccccagagccctggccgccgaggagatcagacagatgctgcagggcaagcccctggccgacaccatgagacccgacaccctgcaggactacttcggccagagcaaggccgtgggccaggacaccctgctgagaagcctgctggagaccaacgagatccccagcctgatcctgtggggcccccccggctgcggcaagaccaccctggcccacatcatcgccagcaacagcaagaagcacagcatcagattcgtgaccctgagcgccaccaacgccaagaccaacgacgtgagagacgtgatcaagcaggcccagaacgagaagagcttcttcaagagaaagaccatcctgttcatcgacgagatccacagattcaacaagagccagcaggacaccttcctgccccacgtggagtgcggcaccatcaccctgatcggcgccaccaccgagaaccccagcttccaggtgaacgccgccctgctgagcagatgcagagtgatcgtgctggagaagctgcccgtggaggccatggtgaccatcctgatgagagccatcaacagcctgggcatccacgtgctggacagcagcagacccaccgaccccctgagccacagcagcaacagcagcagcgagcccgccatgttcatcgaggacaaggccgtggacaccctggcctacctgagcgacggcgacgccagagccggcctgaacggcctgcagctggccgtgctggccagactgagcagcagaaagatgttctgcaagaagagcggccagagctacagccccagcagagtgctgatcaccgagaacgacgtgaaggagggcctgcagagaagccacatcctgtacgacagagccggcgaggagcactacaactgcatcagcgccctgcacaagagcatgagaggcagcgaccagaacgccagcctgtactggctggccagaatgctggagggcggcgaggaccccctgtacgtggccagaagactggtgagattcgccagcgaggacatcggcctggccgaccccagcgccctgacccaggccgtggccgcctaccagggctgccacttcatcggcatgcccgagtgcgaggtgctgctggcccagtgcgtggtgtacttcgccagagcccccaagagcatcgaggtgtacagcgcctacaacaacgtgaaggcctgcctgagaaaccaccagggccccctgccccccgtgcccctgcacctgagaaacgcccccaccagactgatgaaggacctgggctacggcaagggctacaagtacaaccccatgtacagcgagcccgtggaccaggagtacctgcccgaggagctgagaggcgtggacttcttcaagcagagaagatgctag

SEQ ID NO: 105266 - DNA, 4299 bp, synthetic construct
  misc_feature 1..4299: note = Description of Artificial Sequence: Synthetic coding sequence
  source 1..4299: mol_type = other DNA
atgagcgagaagaagctggagaccaccgcccagcagagaaagtgccccgagtggatgaacgtgcagaacaagagatgcgccgtggaggagagaaaggcctgcgtgagaaagagcgtgttcgaggacgacctgcccttcctggagttcaccggcagcatcgtgtacagctacgacgccagcgactgcagcttcctgagcgaggacatcagcatgagcctgagcgacggcgacgtggtgggcttcgacatggagtggccccccctgtacaacagaggcaagctgggcaaggtggccctgatccagctgtgcgtgagcgagagcaagtgctacctgttccacgtgagcagcatgagcgtgttcccccagggcctgaagatgctgctggagaacaaggccgtgaagaaggccggcgtgggcatcgagggcgaccagtggaagctgctgagagacttcgacatcaagctgaagaacttcgtggagctgaccgacgtggccaacaagaagctgaagtgcaccgagacctggagcctgaacagcctggtgaagcacctgctgggcaagcagctgctgaaggacaagagcatcagatgcagcaactggagcaagttccccctgaccgaggaccagaagctgtacgccgccaccgacgcctacgccggcttcatcatctacagaaacctggagatcctggacgacaccgtgcagagattcgccatcaacaaggaggaggagatcctgctgagcgacatgaacaagcagctgaccagcatcagcgaggaggtgatggacctggccaagcacctgccccacgccttcagcaagctggagaaccccagaagagtgagcatcctgctgaaggacatcagcgagaacctgtacagcctgagaagaatgatcatcggcagcaccaacatcgagaccgagctgagacccagcaacaacctgaacctgctgagcttcgaggacagcaccaccggcggcgtgcagcagaagcagatcagagagcacgaggtgctgatccacgtggaggacgagacctgggaccccaccctggaccacctggccaagcacgacggcgaggacgtgctgggcaacaaggtggagagaaaggaggacggcttcgaggacggcgtggaggacaacaagctgaaggagaacatggagagagcctgcctgatgagcctggacatcaccgagcacgagctgcagatcctggagcagcagagccaggaggagtacctgagcgacatcgcctacaagagcaccgagcacctgagccccaacgacaacgagaacgacaccagctacgtgatcgagagcgacgaggacctggagatggagatgctgaagcacctgagccccaacgacaacgagaacgacaccagctacgtgatcgagagcgacgaggacctggagatggagatgctgaagagcctggagaacctgaacagcggcaccgtggagcccacccacagcaagtgcctgaagatggagagaaacctgggcctgcccaccaaggaggaggaggaggacgacgagaacgaggccaacgagggcgaggaggacgacgacaaggacttcctgtggcccgcccccaacgaggagcaggtgacctgcctgaagatgtacttcggccacagcagcttcaagcccgtgcagtggaaggtgatccacagcgtgctggaggagagaagagacaacgtggccgtgatggccaccggctacggcaagagcctgtgcttccagtacccccccgtgtacgtgggcaagatcggcctggtgatcagccccctgatcagcctgatggaggaccaggtgctgcagctgaagatgagcaacatccccgcctgcttcctgggcagcgcccagagcgagaacgtgctgaccgacatcaagctgggcaagtacagaatcgtgtacgtgacccccgagtactgcagcggcaacatgggcctgctgcagcagctggaggccgacatcggcatcaccctgatcgccgtggacgaggcccactgcatcagcgagtggggccacgacttcagagacagcttcagaaagctgggcagcctgaagaccgccctgcccatggtgcccatcgtggccctgaccgccaccgccagcagcagcatcagagaggacatcgtgagatgcctgaacctgagaaacccccagatcacctgcaccggcttcgacagacccaacctgtacctggaggtgagaagaaagaccggcaacatcctgcaggacctgcagcccttcctggtgaagaccagcagccactgggagttcgagggccccaccatcatctactgccccagcagaaagatgacccagcaggtgaccggcgagctgagaaagctgaacctgagctgcggcacctaccacgccggcatgagcttcagcaccagaaaggacatccaccacagattcgtgagagacgagatccagtgcgtgatcgccaccatcgccttcggcatgggcatcaacaaggccgacatcagacaggtgatccactacggcgcccccaaggacatggagagctactaccaggagatcggcagagccggcagagacggcctgcagagcagctgccacgtgctgtgggcccccgccgacatcaacctgaacagacacctgctgaccgagatcagaaacgagaagttcagactgtacaagctgaagatgatggccaagatggagaagtacctgcacagcagcagatgcagaagacagatcatcctgagccacttcgaggacaagcaggtgcagaaggccagcctgggcatcatgggcaccgagaagtgctgcgacaactgcagaagcagactggaccactgctacagcatggacgacagcgaggacaccagctgggacttcggcccccaggccttcaagctgctgagcgccgtggacatcctgggcgagaagttcggcatcggcctgcccatcctgttcctgagaggcagcaacagccagagactggccgaccagtacagaagacacagcctgttcggcaccggcaaggaccagaccgagagctggtggaaggccttcagcagacagctgatcaccgagggcttcctggtggaggtgagcagatacaacaagttcatgaagatctgcgccctgaccaagaagggcagaaactggctgcacaaggccaacaccgagagccagagcctgatcctgcaggccaacgaggagctgtgccccaagaagctgctgctgcccagcagcaagaccgtgagcagcggcaccaaggagcactgctacaaccaggtgcccgtggagctgagcaccgagaagaagagcaacctggagaagctgtacagctacaagccctgcgacaagatcagcagcggcagcaacatcagcaagaagagcatcatggtgcagagccccgagaaggcctacagcagcagccagcccgtgatcagcgcccaggagcaggagacccagatcgtgctgtacggcaagctggtggaggccagacagaagcacgccaacaagatggacgtgccccccgccatcctggccaccaacaagatcctggtggacatggccaagatgagacccaccaccgtggagaacgtgaagagaatcgacggcgtgagcgagggcaaggccgccatgctggcccccctgctggaggtgatcaagcacttctgccagaccaacagcgtgcagaccgacctgttcagcagcaccaagccccaggaggagcagaagaccagcctggtggccaagaacaagatctgcaccctgagccagagcatggccatcacctacagcctgttccaggagaagaagatgcccctgaagagcatcgccgagagcagaatcctgcccctgatgaccatcggcatgcacctgagccaggccgtgaaggccggctgccccctggacctggagagagccggcctgacccccgaggtgcagaagatcatcgccgacgtgatcagaaacccccccgtgaacagcgacatgagcaagatcagcctgatcagaatgctggtgcccgagaacatcgacacctacctgatccacatggccatcgagatcctgaagcacggccccgacagcggcctgcagcccagctgcgacgtgaacaagagaagatgcttccccggcagcgaggagatctgcagcagcagcaagagaagcaaggaggaggtgggcatcaacaccgagaccagcagcgccgagagaaagagaagactgcccgtgtggttcgccaagggcagcgacaccagcaagaagctgatggacaagaccaagagaggcggcctgttcagctag

SEQ ID NO: 105267 - DNA, 738 bp, synthetic construct
  misc_feature 1..738: note = Description of Artificial Sequence: Synthetic coding sequence
  source 1..738: mol_type = other DNA
atggcccaggaggagggcggcagcctgcccgaggtgagagccagagtgagagccgcccacggcatccccgacctggcccagaagctgcacttctacgacagatgggcccccgactacgaccaggacgtggccaccctgctgtacagagcccccagactggccgtggactgcctgacccaggccctgcccggccccccccacagcgccctgatcctggacgtggcctgcggcaccggcctggtggccgccgagctgagagcccccggcttcctgcagctgcacggcgtggacggcagccccggcatgctggagcaggcccaggcccccggcctgtaccagagactgagcctgtgcaccctgggccaggagcccctgcccagccccgagggcaccttcgacgccgtgctgatcgtgggcgccctgagcgacggccaggtgccctgcaacgccatccccgagctgcacgtgaccaagcccggcggcctggtgtgcctgaccaccagaaccaacagcagcaacctgcagtacaaggaggccctggaggccaccctggacagactggagcaggccggcatgtgggagggcctggtggcctggcccgtggacagactgtggaccgccggcagctggctgccccccagctggagatggtaccccgccagcctgcccagaatggccagcagccccgccctgagcacctgcaccgagagcggcagaagacccagactgagaaagtag

SEQ ID NO: 105268 - DNA, 798 bp, synthetic construct
  misc_feature 1..798: note = Description of Artificial Sequence: Synthetic coding sequence
  source 1..798: mol_type = other DNA
atggaggccctgccccccgtgagaagcagcctgctgggcatcctgctgcaggtgaccagactgagcgtgctgctggtgcagaacagagaccacctgtacaacttcctgctgctgaagatcaacctgttcaaccactgggtgagcggcctggcccaggaggccagaggcagctgcaactggcaggcccacctgcccctgggcgccgccgcctgccccctgggccaggccctgtgggccggcctggccctgatccaggtgcccgtgtggctggtgctgcagggccccagactgatgtgggccggcatgtggggcagcaccaagggcctgggcctggccctgctgagcgcctgggagcagctgggcctgagcgtggccatctggaccgacctgttcctgagctgcctgcacggcctgatgctggtggccctgctgctggtggtggtgacctggagagtgtgccagaagagccactgcttcagactgggcagacagctgagcaaggccctgcaggtgaactgcgtggtgagaaagctgctggtgcagctgagaagactgtactggtgggtggagaccatgaccgccctgaccagctggcacctggcctacctgatcacctggaccacctgcctggccagccacctgctgcaggccgccttcgagcacaccacccagctggccgaggcccaggaggtggagccccaggaggtgagcggcagcagcctgctgcccagcctgagcgccagcagcgacagcgagagcggcaccgtgctgcccgagcaggagacccccagagagtag

SEQ ID NO: 105269 - DNA, 456 bp, synthetic construct
  misc_feature 1..456: note = Description of Artificial Sequence: Synthetic coding sequence
  source 1..456: mol_type = other DNA
atgaccaacgaggagcccctgcccaagaaggtgagactgagcgagaccgacttcaaggtgatggccagagacgagctgatcctgagatggaagcagtacgaggcctacgtgcaggccctggagggcaagtacaccgacctgaacagcaacgacgtgaccggcctgagagagagcgaggagaagctgaagcagcagcagcaggagagcgccagaagagagaacatcctggtgatgagactggccaccaaggagcaggagatgcaggagtgcaccacccagatccagtacctgaagcaggtgcagcagcccagcgtggcccagctgagaagcaccatggtggaccccgccatcaacctgttcttcctgaagatgaagggcgagctggagcagaccaaggacaagctggagcaggcccagaacgagctgagcgcctggaagttcacccccgacagatag

SEQ ID NO: 105270 - DNA, 1191 bp, synthetic construct
  misc_feature 1..1191: note = Description of Artificial Sequence: Synthetic coding sequence
  source 1..1191: mol_type = other DNA
atgaccaacgaggagcccctgcccaagaaggtgagactgagcgagaccgacttcaaggtgatggccagagacgagctgatcctgagatggaagcagtacgaggcctacgtgcaggccctggagggcaagtacaccgacctgaacagcaacgacgtgaccggcctgagagagagcgaggagaagctgaagcagcagcagcaggagagcgccagaagagagaacatcctggtgatgagactggccaccaaggagcaggagatgcaggagtgcaccacccagatccagtacctgaagcaggtgcagcagcccagcgtggcccagctgagaagcaccatggtggaccccgccatcaacctgttcttcctgaagatgaagggcgagctggagcagaccaaggacaagctggagcaggcccagaacgagctgagcgcctggaagttcacccccgacagccagaccggcaagaagctgatggccaagtgcagaatgctgatccaggagaaccaggagctgggcagacagctgagccagggcagaatcgcccagctggaggccgagctggccctgcagaagaagtacagcgaggagctgaagagcagccaggacgagctgaacgacttcatcatccagctggacgaggaggtggagggcatgcagagcaccatcctggtgctgcagcagcagctgaaggagaccagacagcagctggcccagtaccagcagcagcagagccaggccagcgcccccagcaccagcagaaccaccgccagcgagcccgtggagcagagcgaggccaccagcaaggactgcagcagactgaccaacggccccagcaacggcagcagcagcagacagagaaccagcggcagcggcttccacagagagggcaacaccaccgaggacgacttccccagcagccccggcaacggcaacaagagcagcaacagcagcgaggagagaaccggcagaggcggcagcggctacgtgaaccagctgagcgccggctacgagagcgtggacagccccaccggcagcgagaacagcctgacccaccagagcaacgacaccgacagcagccacgacccccaggaggagaaggccgtgagcggcaagggcaacagaaccgtgggcagcagacacgtgcagaacggcctggacagcagcgtgaacgtgcagggcagcgtgctgtag

SEQ ID NO: 105271 - DNA, 1083 bp, synthetic construct
  misc_feature 1..1083: note = Description of Artificial Sequence: Synthetic coding sequence
  source 1..1083: mol_type = other DNA
atgaacgcccccctgggcggcatctggctgtggctgcccctgctgctgacctggctgacccccgaggtgaacagcagctggtggtacatgagagccaccggcggcagcagcagagtgatgtgcgacaacgtgcccggcctggtgagcagccagagacagctgtgccacagacaccccgacgtgatgagagccatcagccagggcgtggccgagtggaccgccgagtgccagcaccagttcagacagcacagatggaactgcaacaccctggacagagaccacagcctgttcggcagagtgctgctgagaagcagcagagagagcgccttcgtgtacgccatcagcagcgccggcgtggtgttcgccatcaccagagcctgcagccagggcgaggtgaagagctgcagctgcgaccccaagaagatgggcagcgccaaggacagcaagggcatcttcgactggggcggctgcagcgacaacatcgactacggcatcaagttcgccagagccttcgtggacgccaaggagagaaagggcaaggacgccagagccctgatgaacctgcacaacaacagagccggcagaaaggccgtgaagagattcctgaagcaggagtgcaagtgccacggcgtgagcggcagctgcaccctgagaacctgctggctggccatggccgacttcagaaagaccggcgactacctgtggagaaagtacaacggcgccatccaggtggtgatgaaccaggacggcaccggcttcaccgtggccaacgagagattcaagaagcccaccaagaacgacctggtgtacttcgagaacagccccgactactgcatcagagacagagaggccggcagcctgggcaccgccggcagagtgtgcaacctgaccagcagaggcatggacagctgcgaggtgatgtgctgcggcagaggctacgacaccagccacgtgaccagaatgaccaagtgcggctgcaagttccactggtgctgcgccgtgagatgccaggactgcctggaggccctggacgtgcacacctgcaaggcccccaagaacgccgactggaccaccgccacctag

SEQ ID NO: 105272 - DNA, 1113 bp, synthetic construct
  misc_feature 1..1113: note = Description of Artificial Sequence: Synthetic coding sequence
  source 1..1113: mol_type = other DNA
atgggcctgtgggccctgctgcccggctgggtgagcgccaccctgctgctggccctggccgccctgcccgccgccctggccgccaacagcagcggcagatggtggggcatcgtgaacgtggccagcagcaccaacctgctgaccgacagcaagagcctgcagctggtgctggagcccagcctgcagctgctgagcagaaagcagagaagactgatcagacagaaccccggcatcctgcacagcgtgagcggcggcctgcagagcgccgtgagagagtgcaagtggcagttcagaaacagaagatggaactgccccaccgcccccggcccccacctgttcggcaagatcgtgaacagaggctgcagagagaccgccttcatcttcgccatcaccagcgccggcgtgacccacagcgtggccagaagctgcagcgagggcagcatcgagagctgcacctgcgactacagaagaagaggccccggcggccccgactggcactggggcggctgcagcgacaacatcgacttcggcagactgttcggcagagagttcgtggacagcggcgagaagggcagagacctgagattcctgatgaacctgcacaacaacgaggccggcagaaccaccgtgttcagcgagatgagacaggagtgcaagtgccacggcatgagcggcagctgcaccgtgagaacctgctggatgagactgcccaccctgagagccgtgggcgacgtgctgagagacagattcgacggcgccagcagagtgctgtacggcaacagaggcagcaacagagccagcagagccgagctgctgagactggagcccgaggaccccgcccacaagccccccagcccccacgacctggtgtacttcgagaagagccccaacttctgcacctacagcggcagactgggcaccgccggcaccgccggcagagcctgcaacagcagcagccccgccctggacggctgcgagctgctgtgctgcggcagaggccacagaaccagaacccagagagtgaccgagagatgcaactgcaccttccactggtgctgccacgtgagctgcagaaactgcacccacaccagagtgctgcacgagtgcctgtag

SEQ ID NO: 105273 - DNA, 588 bp, synthetic construct
  misc_feature 1..588: note = Description of Artificial Sequence: Synthetic coding sequence
  source 1..588: mol_type = other DNA
tggcactggggcggctgcagcgacaacatcgacttcggcagactgttcggcagagagttcgtggacagcggcgagaagggcagagacctgagattcctgatgaacctgcacaacaacgaggccggcagaaccaccgtgttcagcgagatgagacaggagtgcaagtgccacggcatgagcggcagctgcaccgtgagaacctgctggatgagactgcccaccctgagagccgtgggcgacgtgctgagagacagattcgacggcgccagcagagtgctgtacggcaacagaggcagcaacagagccagcagagccgagctgctgagactggagcccgacctggtgtacttcgagaagagccccaacttctgcacctacagcggcagactgggcaccgccggcaccgccggcagagcctgcaacagcagcagccccgccctggacggctgcgagctgctgtgctgcggcagaggccacagaaccagaacccagagagtgaccgagagatgcaactgcaccttccactggtgctgccacgtgagctgcagaaactgcacccacaccagagtgctgcacgagtgcctgtag

SEQ ID NO: 105274 - DNA, 1254 bp, synthetic construct
  misc_feature 1..1254: note = Description of Artificial Sequence: Synthetic coding sequence
  source 1..1254: mol_type = other DNA
atgggcagcgcccaccccagaccctggctgagactgagaccccagccccagcccagacccgccctgtgggtgctgctgttcttcctgctgctgctggccgccgccatgcccagaagcgcccccaacgacatcctggacctgagactgccccccgagcccgtgctgaacgccaacaccgtgtgcctgaccctgcccggcctgagcagaagacagatggaggtgtgcgtgagacaccccgacgtggccgccagcgccatccagggcatccagatcgccatccacgagtgccagcaccagttcagagaccagagatggaactgcagcagcctggagaccagaaacaagatcccctacgagagccccatcttcagcagaggcttcagagagagcgccttcgcctacgccatcgccgccgccggcgtggtgcacgccgtgagcaacgcctgcgccctgggcaagctgaaggcctgcggctgcgacgccagcagaagaggcgacgaggaggccttcagaagaaagctgcacagactgcagctggacgccctgcagagaggcaagggcctgagccacggcgtgcccgagcaccccgccctgcccaccgccagccccggcctgcaggacagctgggagtggggcggctgcagccccgacatgggcttcggcgagagattcagcaaggacttcctggacagcagagagccccacagagacatccacgccagaatgagactgcacaacaacagagtgggcagacaggccgtgatggagaacatgagaagaaagtgcaagtgccacggcaccagcggcagctgccagctgaagacctgctggcaggtgacccccgagttcagaaccgtgggcgccctgctgagaagcagattccacagagccaccctgatcagaccccacaacagaaacggcggccagctggagcccggccccgccggcgcccccagccccgcccccggcgcccccggccccagaagaagagccagccccgccgacctggtgtacttcgagaagagccccgacttctgcgagagagagcccagactggacagcgccggcaccgtgggcagactgtgcaacaagagcagcgccggcagcgacggctgcggcagcatgtgctgcggcagaggccacaacatcctgagacagaccagaagcgagagatgccactgcagattccactggtgctgcttcgtggtgtgcgaggagtgcagaatcaccgagtgggtgagcgtgtgcaagtag

SEQ ID NO: 105275 - DNA, 1170 bp, synthetic construct
  misc_feature 1..1170: note = Description of Artificial Sequence: Synthetic coding sequence
  source 1..1170: mol_type = other DNA
atgctggaggagcccagacccagacccccccccagcggcctggccggcctgctgttcctggccctgtgcagcagagccctgagcaacgagatcctgggcctgaagctgcccggcgagccccccctgaccgccaacaccgtgtgcctgaccctgagcggcctgagcaagagacagctgggcctgtgcctgagaaaccccgacgtgaccgccagcgccctgcagggcctgcacatcgccgtgcacgagtgccagcaccagctgagagaccagagatggaactgcagcgccctggagggcggcggcagactgccccaccacagcgccatcctgaagagaggcttcagagagagcgccttcagcttcagcatgctggccgccggcgtgatgcacgccgtggccaccgcctgcagcctgggcaagctggtgagctgcggctgcggctggaagggcagcggcgagcaggacagactgagagccaagctgctgcagctgcaggccctgagcagaggcaagagcttcccccacagcctgcccagccccggccccggcagcagccccagccccggcccccaggacacctgggagtggggcggctgcaaccacgacatggacttcggcgagaagttcagcagagacttcctggacagcagagaggcccccagagacatccaggccagaatgagaatccacaacaacagagtgggcagacaggtggtgaccgagaacctgaagagaaagtgcaagtgccacggcaccagcggcagctgccagttcaagacctgctggagagccgcccccgagttcagagccgtgggcgccgccctgagagagagactgggcagagccatcttcatcgacacccacaacagaaacagcggcgccttccagcccagactgagacccagaagactgagcggcgagctggtgtacttcgagaagagccccgacttctgcgagagagaccccaccatgggcagccccggcaccagaggcagagcctgcaacaagaccagcagactgctggacggctgcggcagcctgtgctgcggcagaggccacaacgtgctgagacagaccagagtggagagatgccactgcagattccactggtgctgctacgtgctgtgcgacgagtgcaaggtgaccgagtgggtgaacgtgtgcaagtag

SEQ ID NO: 105276 - DNA, 576 bp, synthetic construct
  misc_feature 1..576: note = Description of Artificial Sequence: Synthetic coding sequence
  source 1..576: mol_type = other DNA
atgctggaggagcccagacccagacccccccccagcggcctggccggcctgctgttcctggccctgtgcagcagagccctgagcaacgagatcctgggcctgaagctgcccggcgagccccccctgaccgccaacaccgtgtgcctgaccctgagcggcctgagcaagagacagctgggcctgtgcctgagaaaccccgacgtgaccgccagcgccctgcagggcctgcacatcgccgtgcacgagtgccagcaccagctgagagaccagagatggaactgcagcgccctggagggcggcggcagactgccccaccacagcgccatcctgaagagaggcttcagagagagcgccttcagcttcagcatgctggccgccggcgtgatgcacgccgtggccaccgcctgcagcctgggcaagctggtgagctgcggctgcggctggaagggcagcggcgagcaggacagactgagagccaagctgctgcagctgcaggccctgagcagaggcaagctgcccggcaccagcagacacgagtgcgagagcaccaccaccggctggggcgccagatggtag

SEQ ID NO: 105277 - DNA, 309 bp, synthetic construct
  misc_feature 1..309: note = Description of Artificial Sequence: Synthetic coding sequence
  source 1..309: mol_type = other DNA
atgctggaggagcccagacccagacccccccccagcggcctggccggcctgctgttcctggccctgtgcagcagagccctgagcaacgagatcctgggcctgaagctgcccggcgagccccccctgaccgccaacaccgtgtgcctgaccctgagcggcctgagcaagagacagctgggcctgtgcctgagaaaccccgacgtgaccgccagcgccctgcagggcctgcacatcgccgtgcacgagtgccagcaccagctgagagaccagagatggaactgcagcgccctggagggcggcggcagatag

SEQ ID NO: 105278 - DNA, 354 bp, synthetic construct
  misc_feature 1..354: note = Description of Artificial Sequence: Synthetic coding sequence
  source 1..354: mol_type = other DNA
atggccctggagaccgtgcccaaggacctgagacacctgagagcctgcctgctgtgcagcctggtgaagaccatcgaccagttcgagtacgacggctgcgacaactgcgacgcctacctgcagatgaagggcaacagagagatggtgtacgactgcaccagcagcagcttcgacggcatcatcgccatgatgagccccgaggacagctgggtgagcaagtggcagagagtgagcaacttcaagcccggcgtgtacgccgtgagcgtgaccggcagactgccccagggcatcgtgagagagctgaagagcagaggcgtggcctacaagagcagagacaccgccatcaagacctag

SEQ ID NO: 105279 - DNA, 1059 bp, synthetic construct
  misc_feature 1..1059: note = Description of Artificial Sequence: Synthetic coding sequence
  source 1..1059: mol_type = other DNA
atggcccccctgggctacttcctgctgctgtgcagcctgaagcaggccctgggcagctaccccatctggtggagcctggccgtgggcccccagtacagcagcctgggcagccagcccatcctgtgcgccagcatccccggcctggtgcccaagcagctgagattctgcagaaactacgtggagatcatgcccagcgtggccgagggcatcaagatcggcatccaggagtgccagcaccagttcagaggcagaagatggaactgcaccaccgtgcacgacagcctggccatcttcggccccgtgctggacaaggccaccagagagagcgccttcgtgcacgccatcgccagcgccggcgtggccttcgccgtgaccagaagctgcgccgagggcaccgccgccatctgcggctgcagcagcagacaccagggcagccccggcaagggctggaagtggggcggctgcagcgaggacatcgagttcggcggcatggtgagcagagagttcgccgacgccagagagaacagacccgacgccagaagcgccatgaacagacacaacaacgaggccggcagacaggccatcgccagccacatgcacctgaagtgcaagtgccacggcctgagcggcagctgcgaggtgaagacctgctggtggagccagcccgacttcagagccatcggcgacttcctgaaggacaagtacgacagcgccagcgagatggtggtggagaagcacagagagagcagaggctgggtggagaccctgagacccagatacacctacttcaaggtgcccaccgagagagacctggtgtactacgaggccagccccaacttctgcgagcccaaccccgagaccggcagcttcggcaccagagacagaacctgcaacgtgagcagccacggcatcgacggctgcgacctgctgtgctgcggcagaggccacaacgccagagccgagagaagaagagagaagtgcagatgcgtgttccactggtgctgctacgtgagctgccaggagtgcaccagagtgtacgacgtgcacacctgcaagtag

SEQ ID NO: 105280 - DNA, 1158 bp, synthetic construct
  misc_feature 1..1158: note = Description of Artificial Sequence: Synthetic coding sequence
  source 1..1158: mol_type = other DNA
atggcccccctgggctacttcctgctgctgtgcagcctgaagcaggccctgggcagctaccccatctggtggagcctggccgtgggcccccagtacagcagcctgggcagccagcccatcctgtgcgccagcatccccggcctggtgcccaagcagctgagattctgcagaaactacgtggagatcatgcccagcgtggccgagggcatcaagatcggcatccaggagtgccagcaccagttcagaggcagaagatggaactgcaccaccgtgcacgacagcctggccatcttcggccccgtgctggacaaggccaccagagagagcgccttcgtgcacgccatcgccagcgccggcgtggccttcgccgtgaccagaagctgcgccgagggcaccgccgccatctgcggctgcagcagcagacaccagggcagccccggcaagggctggaagtggggcggctgcagcgaggacatcgagttcggcggcatggtgagcagagagttcgccgacgccagagagaacagacccgacgccagaagcgccatgaacagacacaacaacgaggccggcagacaggccatcgccagccacatgcacctgaagtgcaagtgccacggcctgagcggcagctgcgaggtgaagacctgctggtggagccagcccgacttcagagccatcggcgacttcctgaaggacaagtacgacagcgccagcgagatggtggtggagaagcacagagagagcagaggctgggtggagaccctgagacccagatacacctacttcaaggtgcccaccgagagagacctggtgtactacgaggccagccccaacttctgcgagcccaaccccgagaccggcagcttcggcaccagagacagaacctgcaacgtgagcagccacggcatcgacggctgcgacctgctgtgctgcggcagaggccacaacgccagagccgagagaagaagagagaagtgcagatgcgtgttccactggtgctgctacgtgagctgccaggagtgcaccagagtgtacgacgtgcacacctgcaagaaccccggcagcagagccggcaacagcgcccaccagcccccccacccccagccccccgtgagattccacccccccctgagaagagccggcaaggtgccctag

SEQ ID NO: 105281 - DNA, 1056 bp, synthetic construct
  misc_feature 1..1056: note = Description of Artificial Sequence: Synthetic coding sequence
  source 1..1056: mol_type = other DNA
atgagccccagaagctgcctgagaagcctgagactgctggtgttcgccgtgttcagcgccgccgccagcaactggctgtacctggccaagctgagcagcgtgggcagcatcagcgaggaggagacctgcgagaagctgaagggcctgatccagagacaggtgcagatgtgcaagagaaacctggaggtgatggacagcgtgagaagaggcgcccagctggccatcgaggagtgccagtaccagttcagaaacagaagatggaactgcagcaccctggacagcctgcccgtgttcggcaaggtggtgacccagggcaccagagaggccgccttcgtgtacgccatcagcagcgccggcgtggccttcgccgtgaccagagcctgcagcagcggcgagctggagaagtgcggctgcgacagaaccgtgcacggcgtgagcccccagggcttccagtggagcggctgcagcgacaacatcgcctacggcgtggccttcagccagagcttcgtggacgtgagagagagaagcaagggcgccagcagcagcagagccctgatgaacctgcacaacaacgaggccggcagaaaggccatcctgacccacatgagagtggagtgcaagtgccacggcgtgagcggcagctgcgaggtgaagacctgctggagagccgtgccccccttcagacaggtgggccacgccctgaaggagaagttcgacggcgccaccgaggtggagcccagaagagtgggcagcagcagagccctggtgcccagaaacgcccagttcaagccccacaccgacgaggacctggtgtacctggagcccagccccgacttctgcgagcaggacatgagaagcggcgtgctgggcaccagaggcagaacctgcaacaagaccagcaaggccatcgacggctgcgagctgctgtgctgcggcagaggcttccacaccgcccaggtggagctggccgagagatgcagctgcaagttccactggtgctgcttcgtgaagtgcagacagtgccagagactggtggagctgcacacctgcagatag

SEQ ID NO: 105282 - DNA, 528 bp, synthetic construct
  misc_feature 1..528: note = Description of Artificial Sequence: Synthetic coding sequence
  source 1..528: mol_type = other DNA
atgagccccagaagctgcctgagaagcctgagactgctggtgttcgccgtgttcagcgccgccgccagcaactggctgtacctggccaagctgagcagcgtgggcagcatcagcgaggaggagacctgcgagaagctgaagggcctgatccagagacaggtgcagatgtgcaagagaaacctggaggtgatggacagcgtgagaagaggcgcccagctggccatcgaggagtgccagtaccagttcagaaacagaagatggaactgcagcaccctggacagcctgcccgtgttcggcaaggtggtgacccagggcggcaaggcctggcacggcggcgacagcggctgccacctgctgaccgagagcagaagcggcgagagaacccagagaagaaaggagggcggcagcctgggccagtgctggcccgaggccatcgtgggcacccaggaccccatgagaagccccccctacctgtggggcagaaaccagggcggcacccacaccggcagcgccagcgagggccactag

SEQ ID NO: 105283 - DNA, 453 bp, synthetic construct
  misc_feature 1..453: note = Description of Artificial Sequence: Synthetic coding sequence
  source 1..453: mol_type = other DNA
tgatacctggccaagctgagcagcgtgggcagcatcagcgaggaggagacctgcgagaagctgaagggcctgatccagagacaggtgcagatgtgcaagagaaacctggaggtgatggacagcgtgagaagaggcgcccagctggccatcgaggagtgccagtaccagttcagaaacagaagatggaactgcagcaccctggacagcctgcccgtgttcggcaaggtggtgacccagggcggcaaggcctggcacggcggcgacagcggctgccacctgctgaccgagagcagaagcggcgagagaacccagagaagaaaggagggcggcagcctgggccagtgctggcccgaggccatcgtgggcacccaggaccccatgagaagccccccctacctgtggggcagaaaccagggcggcacccacaccggcagcgccagcgagggccactag

SEQ ID NO: 105284 - DNA, 159 bp, synthetic construct
  misc_feature 1..159: note = Description of Artificial Sequence: Synthetic coding sequence
  source 1..159: mol_type = other DNA
atgtgcaagagaaacctggaggtgatggacagcgtgagaagaggcgcccagctggccatcgaggagtgccagtaccagttcagaaacagaagatggaactgcagcaccctggacagcctgcccgtgttcggcaaggtggtgacccagggcggcaagtag

SEQ ID NO: 105285 - DNA, 891 bp, synthetic construct
  misc_feature 1..891: note = Description of Artificial Sequence: Synthetic coding sequence
  source 1..891: mol_type = other DNA
atgtgcaagagaaacctggaggtgatggacagcgtgagaagaggcgcccagctggccatcgaggagtgccagtaccagttcagaaacagaagatggaactgcagcaccctggacagcctgcccgtgttcggcaaggtggtgacccagggcaccagagaggccgccttcgtgtacgccatcagcagcgccggcgtggccttcgccgtgaccagagcctgcagcagcggcgagctggagaagtgcggctgcgacagaaccgtgcacggcgtgagcccccagggcttccagtggagcggctgcagcgacaacatcgcctacggcgtggccttcagccagagcttcgtggacgtgagagagagaagcaagggcgccagcagcagcagagccctgatgaacctgcacaacaacgaggccggcagaaaggccatcctgacccacatgagagtggagtgcaagtgccacggcgtgagcggcagctgcgaggtgaagacctgctggagagccgtgccccccttcagacaggtgggccacgccctgaaggagaagttcgacggcgccaccgaggtggagcccagaagagtgggcagcagcagagccctggtgcccagaaacgcccagttcaagccccacaccgacgaggacctggtgtacctggagcccagccccgacttctgcgagcaggacatgagaagcggcgtgctgggcaccagaggcagaacctgcaacaagaccagcaaggccatcgacggctgcgagctgctgtgctgcggcagaggcttccacaccgcccaggtggagctggccgagagatgcagctgcaagttccactggtgctgcttcgtgaagtgcagacagtgccagagactggtggagctgcacacctgcagatag

SEQ ID NO: 105286 - DNA, 1710 bp, synthetic construct
  misc_feature 1..1710: note = Description of Artificial Sequence: Synthetic coding sequence
  source 1..1710: mol_type = other DNA
atgaaggtgctgctgagactgatctgcttcatcgccctgctgatcagcagcctggaggccgacaagtgcaaggagagagaggagaagatcatcctggtgagcagcgccaacgagatcgacgtgagaccctgccccctgaaccccaacgagcacaagggcaccatcacctggtacaaggacgacagcaagacccccgtgagcaccgagcaggccagcagaatccaccagcacaaggagaagctgtggttcgtgcccgccaaggtggaggacagcggccactactactgcgtggtgagaaacagcagctactgcctgagaatcaagatcagcgccaagttcgtggagaacgagcccaacctgtgctacaacgcccaggccatcttcaagcagaagctgcccgtggccggcgacggcggcctggtgtgcccctacatggagttcttcaagaacgagaacaacgagctgcccaagctgcagtggtacaaggactgcaagcccctgctgctggacaacatccacttcagcggcgtgaaggacagactgatcgtgatgaacgtggccgagaagcacagaggcaactacacctgccacgccagctacacctacctgggcaagcagtaccccatcaccagagtgatcgagttcatcaccctggaggagaacaagcccaccagacccgtgatcgtgagccccgccaacgagaccatggaggtggacctgggcagccagatccagctgatctgcaacgtgaccggccagctgagcgacatcgcctactggaagtggaacggcagcgtgatcgacgaggacgaccccgtgctgggcgaggactactacagcgtggagaaccccgccaacaagagaagaagcaccctgatcaccgtgctgaacatcagcgagatcgagagcagattctacaagcaccccttcacctgcttcgccaagaacacccacggcatcgacgccgcctacatccagctgatctaccccgtgaccaacttccagaagcacatgatcggcatctgcgtgaccctgaccgtgatcatcgtgtgcagcgtgttcatctacaagatcttcaagatcgacatcgtgctgtggtacagagacagctgctacgacttcctgcccatcaaggccagcgacggcaagacctacgacgcctacatcctgtaccccaagaccgtgggcgagggcagcaccagcgactgcgacatcttcgtgttcaaggtgctgcccgaggtgctggagaagcagtgcggctacaagctgttcatctacggcagagacgactacgtgggcgaggacatcgtggaggtgatcaacgagaacgtgaagaagagcagaagactgatcatcatcctggtgagagagaccagcggcttcagctggctgggcggcagcagcgaggagcagatcgccatgtacaacgccctggtgcaggacggcatcaaggtggtgctgctggagctggagaagatccaggactacgagaagatgcccgagagcatcaagttcatcaagcagaagcacggcgccatcagatggagcggcgacttcacccagggcccccagagcgccaagaccagattctggaagaacgtgagataccacatgcccgtgcagagaagaagccccagcagcaagcaccagctgctgagccccgccaccaaggagaagctgcagagagaggcccacgtgcccctgggctag

SEQ ID NO: 105287 - DNA, 1050 bp, synthetic construct
  misc_feature 1..1050: note = Description of Artificial Sequence: Synthetic coding sequence
  source 1..1050: mol_type = other DNA
atgaacagaaaggccagaagatgcctgggccacctgttcctgagcctgggcatggtgtacctgagaatcggcggcttcagcagcgtggtggccctgggcgccagcatcatctgcaacaagatccccggcctggcccccagacagagagccatctgccagagcagacccgacgccatcatcgtgatcggcgagggcagccagatgggcctggacgagtgccagttccagttcagaaacggcagatggaactgcagcgccctgggcgagagaaccgtgttcggcaaggagctgaaggtgggcagcagagaggccgccttcacctacgccatcatcgccgccggcgtggcccacgccatcaccgccgcctgcacccagggcaacctgagcgactgcggctgcgacaaggagaagcagggccagtaccacagagacgagggctggaagtggggcggctgcagcgccgacatcagatacggcatcggcttcgccaaggtgttcgtggacgccagagagatcaagcagaacgccagaaccctgatgaacctgcacaacaacgaggccggcagaaagatcctggaggagaacatgaagctggagtgcaagtgccacggcgtgagcggcagctgcaccaccaagacctgctggaccaccctgccccagttcagagagctgggctacgtgctgaaggacaagtacaacgaggccgtgcacgtggagcccgtgagagccagcagaaacaagagacccaccttcctgaagatcaagaagcccctgagctacagaaagcccatggacaccgacctggtgtacatcgagaagagccccaactactgcgaggaggaccccgtgaccggcagcgtgggcacccagggcagagcctgcaacaagaccgccccccaggccagcggctgcgacctgatgtgctgcggcagaggctacaacacccaccagtacgccagagtgtggcagtgcaactgcaagttccactggtgctgctacgtgaagtgcaacacctgcagcgagagaaccgagatgtacacctgcaagtag

SEQ ID NO: 105288 - DNA, 1050 bp, synthetic construct
  misc_feature 1..1050: note = Description of Artificial Sequence: Synthetic coding sequence
  source 1..1050: mol_type = other DNA
atgcacagaaacttcagaaagtggatcttctacgtgttcctgtgcttcggcgtgctgtacgtgaagctgggcgccctgagcagcgtggtggccctgggcgccaacatcatctgcaacaagatccccggcctggcccccagacagagagccatctgccagagcagacccgacgccatcatcgtgatcggcgagggcgcccagatgggcatcaacgagtgccagtaccagttcagattcggcagatggaactgcagcgccctgggcgagaagaccgtgttcggccaggagctgagagtgggcagcagagaggccgccttcacctacgccatcaccgccgccggcgtggcccacgccgtgaccgccgcctgcagccagggcaacctgagcaactgcggctgcgacagagagaagcagggctactacaaccaggccgagggctggaagtggggcggctgcagcgccgacgtgagatacggcatcgacttcagcagaagattcgtggacgccagagagatcaagaagaacgccagaagactgatgaacctgcacaacaacgaggccggcagaaaggtgctggaggacagaatgcagctggagtgcaagtgccacggcgtgagcggcagctgcaccaccaagacctgctggaccaccctgcccaagttcagagaggtgggccacctgctgaaggagaagtacaacgccgccgtgcaggtggaggtggtgagagccagcagactgagacagcccaccttcctgagaatcaagcagctgagaagctaccagaagcccatggagaccgacctggtgtacatcgagaagagccccaactactgcgaggaggacgccgccaccggcagcgtgggcacccagggcagactgtgcaacagaaccagccccggcgccgacggctgcgacaccatgtgctgcggcagaggctacaacacccaccagtacaccaaggtgtggcagtgcaactgcaagttccactggtgctgcttcgtgaagtgcaacacctgcagcgagagaaccgaggtgttcacctgcaagtag

SEQ ID NO: 105289 - DNA, 1062 bp, synthetic construct
  misc_feature 1..1062: note = Description of Artificial Sequence: Synthetic coding sequence
  source 1..1062: mol_type = other DNA
atgctgctgctgagccccagaagcgccctggtgagcgtgtactgcccccagatcttcctgctgctgagcagcggcagctacctggccctgagcagcgtggtggccctgggcgccaacatcatctgcaacaagatccccggcctggcccccagacagagagccatctgccagagcagacccgacgccatcatcgtgatcggcgagggcgcccagatgggcatcaacgagtgccagtaccagttcagattcggcagatggaactgcagcgccctgggcgagaagaccgtgttcggccaggagctgagagtgggcagcagagaggccgccttcacctacgccatcaccgccgccggcgtggcccacgccgtgaccgccgcctgcagccagggcaacctgagcaactgcggctgcgacagagagaagcagggctactacaaccaggccgagggctggaagtggggcggctgcagcgccgacgtgagatacggcatcgacttcagcagaagattcgtggacgccagagagatcaagaagaacgccagaagactgatgaacctgcacaacaacgaggccggcagaaaggtgctggaggacagaatgcagctggagtgcaagtgccacggcgtgagcggcagctgcaccaccaagacctgctggaccaccctgcccaagttcagagaggtgggccacctgctgaaggagaagtacaacgccgccgtgcaggtggaggtggtgagagccagcagactgagacagcccaccttcctgagaatcaagcagctgagaagctaccagaagcccatggagaccgacctggtgtacatcgagaagagccccaactactgcgaggaggacgccgccaccggcagcgtgggcacccagggcagactgtgcaacagaaccagccccggcgccgacggctgcgacaccatgtgctgcggcagaggctacaacacccaccagtacaccaaggtgtggcagtgcaactgcaagttccactggtgctgcttcgtgaagtgcaacacctgcagcgagagaaccgaggtgttcacctgcaagtag

SEQ ID NO: 105290 - DNA, 618 bp, synthetic construct
  misc_feature 1..618: note = Description of Artificial Sequence: Synthetic coding sequence
  source 1..618: mol_type = other DNA
atgcacagaaacttcagaaagtggatcttctacgtgttcctgtgcttcggcgtgctgtacgtgaagctgggcgccctgagcagcgtggtggccctgggcgccaacatcatctgcaacaagatccccggcctggcccccagacagagagccatctgccagagcagacccgacgccatcatcgtgatcggcgagggcgcccagatgggcatcaacgagtgccagtaccagttcagattcggcagatggaactgcagcgccctgggcgagaagaccgtgttcggccaggagctgagagtgggcagcagagaggccgccttcacctacgccatcaccgccgccggcgtggcccacgccgtgaccgccgcctgcagccagggcaacctgagcaactgcggctgcgacagagagaagcagggctactacaaccaggccgagggctggaagtggggcggctgcagcgccgacgtgagatacggcatcgacttcagcagaagattcgtggacgccagagagatcaagaagaacgccagaagactgatgaacctgcacaacaacgaggccggcagaaagggcctgctgggccagcccagagtgaccagcagccccctgttcccctag

SEQ ID NO: 105291 - DNA, 1002 bp, synthetic construct
  misc_feature 1..1002: note = Description of Artificial Sequence: Synthetic coding sequence
  source 1..1002: mol_type = other DNA
atgagcgccccccccttctacagagccctgagcagcgtggtggccctgggcgccaacatcatctgcaacaagatccccggcctggcccccagacagagagccatctgccagagcagacccgacgccatcatcgtgatcggcgagggcgcccagatgggcatcaacgagtgccagtaccagttcagattcggcagatggaactgcagcgccctgggcgagaagaccgtgttcggccaggagctgagagtgggcagcagagaggccgccttcacctacgccatcaccgccgccggcgtggcccacgccgtgaccgccgcctgcagccagggcaacctgagcaactgcggctgcgacagagagaagcagggctactacaaccaggccgagggctggaagtggggcggctgcagcgccgacgtgagatacggcatcgacttcagcagaagattcgtggacgccagagagatcaagaagaacgccagaagactgatgaacctgcacaacaacgaggccggcagaaaggtgctggaggacagaatgcagctggagtgcaagtgccacggcgtgagcggcagctgcaccaccaagacctgctggaccaccctgcccaagttcagagaggtgggccacctgctgaaggagaagtacaacgccgccgtgcaggtggaggtggtgagagccagcagactgagacagcccaccttcctgagaatcaagcagctgagaagctaccagaagcccatggagaccgacctggtgtacatcgagaagagccccaactactgcgaggaggacgccgccaccggcagcgtgggcacccagggcagactgtgcaacagaaccagccccggcgccgacggctgcgacaccatgtgctgcggcagaggctacaacacccaccagtacaccaaggtgtggcagtgcaactgcaagttccactggtgctgcttcgtgaagtgcaacacctgcagcgagagaaccgaggtgttcacctgcaagtag

SEQ ID NO: 105292 - DNA, 174 bp, synthetic construct
  misc_feature 1..174: note = Description of Artificial Sequence: Synthetic coding sequence
  source 1..174: mol_type = other DNA
atgggcatcaacgagtgccagtaccagttcagattcggcagatggaactgcagcgccctgggcgagaagaccgtgttcggccaggagctgagagtgggcagcagagaggccgccttcacctacgccatcaccgccgccggcgtggcccacgccgtgaccgccgcctgcagctag

SEQ ID NO: 105293 - DNA, 1056 bp, synthetic construct
  misc_feature 1..1056: note = Description of Artificial Sequence: Synthetic coding sequence
  source 1..1056: mol_type = other DNA
atgttcctgagcaagcccagcgtgtacatctgcctgttcacctgcgtgctgcagctgagccacagctggagcgtgaacaacttcctgatgaccggccccaaggcctacctgatctacagcagcagcgtggccgccggcgcccagagcggcatcgaggagtgcaagtaccagttcgcctgggacagatggaactgccccgagagagccctgcagctgagcagccacggcggcctgagaagcgccaacagagagaccgccttcgtgcacgccatcagcagcgccggcgtgatgtacaccctgaccagaaactgcagcctgggcgacttcgacaactgcggctgcgacgacagcagaaacggccagctgggcggccagggctggctgtggggcggctgcagcgacaacgtgggcttcggcgaggccatcagcaagcagttcgtggacgccctggagaccggccaggacgccagagccgccatgaacctgcacaacaacgaggccggcagaaaggccgtgaagggcaccatgaagagaacctgcaagtgccacggcgtgagcggcagctgcaccacccagacctgctggctgcagctgcccgagttcagagaggtgggcgcccacctgaaggagaagtaccacgccgccctgaaggtggacctgctgcagggcgccggcaacagcgccgccggcagaggcgccatcgccgacaccttcagaagcatcagcaccagagagctggtgcacctggaggacagccccgactactgcctggagaacaagaccctgggcctgctgggcaccgagggcagagagtgcctgagaagaggcagagccctgggcagatgggagagaagaagctgcagaagactgtgcggcgactgcggcctggccgtggaggagagaagagccgagaccgtgagcagctgcaactgcaagttccactggtgctgcgccgtgagatgcgagcagtgcagaagaagagtgaccaagtacttctgcagcagagccgagagacccagaggcggcgccgcccacaagcccggcagaaagccctag

SEQ ID NO: 105294 - DNA, 1209 bp, synthetic construct
  misc_feature 1..1209: note = Description of Artificial Sequence: Synthetic coding sequence
  source 1..1209: mol_type = other DNA
atggacctggacagagccagcctggacctgatgatcagactgctggagctggagcaggacgccagcagcgccaagctgctgaacgagaaggacatgaacaagatcaaggagaagatcagaagactgtgcgagaccgtgcacaacaagcacctggacctggagaacatcaccaccggccacctggccatggagaccctgctgagcctgaccagcaagagagccggcgactggttcaaggaggagctgagactgctgggcggcctggaccacatcgtggacaaggtgaaggagtgcgtggaccacctgagcagagacgaggacgaggagaagctggtggccagcctgtggggcgccgagagatgcctgagagtgctggagagcgtgaccgtgcacaaccccgagaaccagagctacctgatcgcctacaaggacagccagctgatcgtgagcagcgccaaggccctgcagcactgcgaggagctgatccagcagtacaacagagccgaggacagcatctgcctggccgacagcaagcccctgccccaccagaacgtgaccaaccacgtgggcaaggccgtggaggactgcatgagagccatcatcggcgtgctgctgaacctgaccaacgacaacgagtggggcagcaccaagaccggcgagcaggacggcctgatcggcaccgccctgaactgcgtgctgcaggtgcccaagtacctgccccaggagcagagattcgacatcagagtgctgctgttcctggagagagagagagccgcccagctggccgagagcaagaccgacgagctgatcaaggacgcccccaccacccagcacgacaagagcggcgagtggcaggagaccagcggcgagatccagtgggtgagcaccgagaagaccgacggcaccgaggagaagcacaagaaggaggaggaggacgaggagctggacctgaacaaggccctgcagcacgccggcaagcacatggaggactgcatcgtggccagctacaccgccctgctgctgggctgcctgtgccaggagagccccatcaacgtgaccaccgtgagagagtacctgcccgagggcgacttcagcatcatgaccgagatgctgaagaagttcctgagcttcatgaacctgacctgcgccgtgggcaccaccggccagaagagcatcagcagagtgatcgagtacctggagcactgctag

SEQ ID NO: 105295 - DNA, 3573 bp, synthetic construct
  misc_feature 1..3573: note = Description of Artificial Sequence: Synthetic coding sequence
  source 1..3573: mol_type = other DNA
atgaccagcagattcggcaagacctacagcagaaagggcggcaacggcagcagcaagttcgacgaggtgttcagcaacaagagaaccaccctgagcaccaagtggggcgagaccaccttcatggccaagctgggccagaagagacccaacttcaagcccgacatccaggagatccccaagaagcccaaggtggaggaggagagcaccggcgaccccttcggcttcgacagcgacgacgagagcctgcccgtgagcagcaagaacctggcccaggtgaagtgcagcagctacagcgagagcagcgaggccgcccagctggaggaggtgaccagcgtgctggaggccaacagcaagatcagccacgtggtggtggaggacaccgtggtgagcgacaagtgcttccccctggaggacaccctgctgggcaaggagaagagcaccaacagaatcgtggaggacgacgccagcatcagcagctgcaacaagctgatcaccagcgacaaggtggagaacttccacgaggagcacgagaagaacagccaccacatccacaagaacgccgacgacagcaccaagaagcccaacgccgagaccaccgtggccagcgagatcaaggagaccaacgacacctggaacagccagttcggcaagagacccgagagccccagcgagatcagccccatcaagggcagcgtgagaaccggcctgttcgagtgggacaacgacttcgaggacatcagaagcgaggactgcatcctgagcctggacagcgaccccctgctggagatgaaggacgacgacttcaagaacagactggagaacctgaacgaggccatcgaggaggacatcgtgcagagcgtgctgagacccaccaactgcagaacctactgcagagccaacaagaccaagagcagccagggcgccagcaacttcgacaagctgatggacggcaccagccaggccctggccaaggccaacagcgagagcagcaaggacggcctgaaccaggccaagaagggcggcgtgagctgcggcaccagcttcagaggcaccgtgggcagaaccagagactacaccgtgctgcaccccagctgcctgagcgtgtgcaacgtgaccatccaggacaccatggagagaagcatggacgagttcaccgccagcacccccgccgacctgggcgaggccggcagactgagaaagaaggccgacatcgccaccagcaagaccaccaccagattcagacccagcaacaccaagagcaagaaggacgtgaagctggagttcttcggcttcgaggaccacgagaccggcggcgacgagggcggcagcggcagcagcaactacaagatcaagtacttcggcttcgacgacctgagcgagagcgaggacgacgaggacgacgactgccaggtggagagaaagaccagcaagaagagaaccaagaccgcccccagccccagcctgcagcccccccccgagagcaacgacaacagccaggacagccagagcggcaccaacaacgccgagaacctggacttcaccgaggacctgcccggcgtgcccgagagcgtgaagaagcccatcaacaagcagggcgacaagagcaaggagaacaccagaaagatcttcagcggccccaagagaagccccaccaaggccgtgtacaacgccagacactggaaccaccccgacagcgaggagctgcccggcccccccgtggtgaagccccagagcgtgaccgtgagactgagcagcaaggagcccaaccagaaggacgacggcgtgttcaaggcccccgccccccccagcaaggtgatcaagaccgtgaccatccccacccagccctaccaggacatcgtgaccgccctgaagtgcagaagagaggacaaggagctgtacaccgtggtgcagcacgtgaagcacttcaacgacgtggtggagttcggcgagaaccaggagttcaccgacgacatcgagtacctgctgagcggcctgaagagcacccagcccctgaacaccagatgcctgagcgtgatcagcctggccaccaagtgcgccatgcccagcttcagaatgcacctgagagcccacggcatggtggccatggtgttcaagaccctggacgacagccagcaccaccagaacctgagcctgtgcaccgccgccctgatgtacatcctgagcagagacagactgaacatggacctggacagagccagcctggacctgatgatcagactgctggagctggagcaggacgccagcagcgccaagctgctgaacgagaaggacatgaacaagatcaaggagaagatcagaagactgtgcgagaccgtgcacaacaagcacctggacctggagaacatcaccaccggccacctggccatggagaccctgctgagcctgaccagcaagagagccggcgactggttcaaggaggagctgagactgctgggcggcctggaccacatcgtggacaaggtgaaggagtgcgtggaccacctgagcagagacgaggacgaggagaagctggtggccagcctgtggggcgccgagagatgcctgagagtgctggagagcgtgaccgtgcacaaccccgagaaccagagctacctgatcgcctacaaggacagccagctgatcgtgagcagcgccaaggccctgcagcactgcgaggagctgatccagcagtacaacagagccgaggacagcatctgcctggccgacagcaagcccctgccccaccagaacgtgaccaaccacgtgggcaaggccgtggaggactgcatgagagccatcatcggcgtgctgctgaacctgaccaacgacaacgagtggggcagcaccaagaccggcgagcaggacggcctgatcggcaccgccctgaactgcgtgctgcaggtgcccaagtacctgccccaggagcagagattcgacatcagagtgctgggcctgggcctgctgatcaacctggtggagtacagcgccagaaacagacactgcctggtgaacatggagaccagctgcagcttcgacagcagcatctgcagcggcgagggcgacgacagcctgagaatcggcggccaggtgcacgccgtgcaggccctggtgcagctgttcctggagagagagagagccgcccagctggccgagagcaagaccgacgagctgatcaaggacgcccccaccacccagcacgacaagagcggcgagtggcaggagaccagcggcgagatccagtgggtgagcaccgagaagaccgacggcaccgaggagaagcacaagaaggaggaggaggacgaggagctggacctgaacaaggccctgcagcacgccggcaagcacatggaggactgcatcgtggccagctacaccgccctgctgctgggctgcctgtgccaggagagccccatcaacgtgaccaccgtgagagagtacctgcccgagggcgacttcagcatcatgaccgagatgctgaagaagttcctgagcttcatgaacctgacctgcgccgtgggcaccaccggccagaagagcatcagcagagtgatcgagtacctggagcactgctag

SEQ ID NO: 105296 - DNA, 3828 bp, synthetic construct
  misc_feature 1..3828: note = Description of Artificial Sequence: Synthetic coding sequence
  source 1..3828: mol_type = other DNA
atggtgcagggccccgtgcagacccccgccctgaccatccacagaagaaagagaagaagaagctgcccccccaacagagccagctacctgcccaaggccgagagcctggccagcctgggcagccacctgcccgccctgctgagcagagccagagtgcccagaccccccgccggcagaagagagagagagagaagaagaagacccgtggccaaggcccccgccagactgagaggcgagtacgagaccggcgtgaagatgaccagcagattcggcaagacctacagcagaaagggcggcaacggcagcagcaagttcgacgaggtgttcagcaacaagagaaccaccctgagcaccaagtggggcgagaccaccttcatggccaagctgggccagaagagacccaacttcaagcccgacatccaggagatccccaagaagcccaaggtggaggaggagagcaccggcgaccccttcggcttcgacagcgacgacgagagcctgcccgtgagcagcaagaacctggcccaggtgaagtgcagcagctacagcgagagcagcgaggccgcccagctggaggaggtgaccagcgtgctggaggccaacagcaagatcagccacgtggtggtggaggacaccgtggtgagcgacaagtgcttccccctggaggacaccctgctgggcaaggagaagagcaccaacagaatcgtggaggacgacgccagcatcagcagctgcaacaagctgatcaccagcgacaaggtggagaacttccacgaggagcacgagaagaacagccaccacatccacaagaacgccgacgacagcaccaagaagcccaacgccgagaccaccgtggccagcgagatcaaggagaccaacgacacctggaacagccagttcggcaagagacccgagagccccagcgagatcagccccatcaagggcagcgtgagaaccggcctgttcgagtgggacaacgacttcgaggacatcagaagcgaggactgcatcctgagcctggacagcgaccccctgctggagatgaaggacgacgacttcaagaacagactggagaacctgaacgaggccatcgaggaggacatcgtgcagagcgtgctgagacccaccaactgcagaacctactgcagagccaacaagaccaagagcagccagggcgccagcaacttcgacaagctgatggacggcaccagccaggccctggccaaggccaacagcgagagcagcaaggacggcctgaaccaggccaagaagggcggcgtgagctgcggcaccagcttcagaggcaccgtgggcagaaccagagactacaccgtgctgcaccccagctgcctgagcgtgtgcaacgtgaccatccaggacaccatggagagaagcatggacgagttcaccgccagcacccccgccgacctgggcgaggccggcagactgagaaagaaggccgacatcgccaccagcaagaccaccaccagattcagacccagcaacaccaagagcaagaaggacgtgaagctggagttcttcggcttcgaggaccacgagaccggcggcgacgagggcggcagcggcagcagcaactacaagatcaagtacttcggcttcgacgacctgagcgagagcgaggacgacgaggacgacgactgccaggtggagagaaagaccagcaagaagagaaccaagaccgcccccagccccagcctgcagcccccccccgagagcaacgacaacagccaggacagccagagcggcaccaacaacgccgagaacctggacttcaccgaggacctgcccggcgtgcccgagagcgtgaagaagcccatcaacaagcagggcgacaagagcaaggagaacaccagaaagatcttcagcggccccaagagaagccccaccaaggccgtgtacaacgccagacactggaaccaccccgacagcgaggagctgcccggcccccccgtggtgaagccccagagcgtgaccgtgagactgagcagcaaggagcccaaccagaaggacgacggcgtgttcaaggcccccgccccccccagcaaggtgatcaagaccgtgaccatccccacccagccctaccaggacatcgtgaccgccctgaagtgcagaagagaggacaaggagctgtacaccgtggtgcagcacgtgaagcacttcaacgacgtggtggagttcggcgagaaccaggagttcaccgacgacatcgagtacctgctgagcggcctgaagagcacccagcccctgaacaccagatgcctgagcgtgatcagcctggccaccaagtgcgccatgcccagcttcagaatgcacctgagagcccacggcatggtggccatggtgttcaagaccctggacgacagccagcaccaccagaacctgagcctgtgcaccgccgccctgatgtacatcctgagcagagacagactgaacatggacctggacagagccagcctggacctgatgatcagactgctggagctggagcaggacgccagcagcgccaagctgctgaacgagaaggacatgaacaagatcaaggagaagatcagaagactgtgcgagaccgtgcacaacaagcacctggacctggagaacatcaccaccggccacctggccatggagaccctgctgagcctgaccagcaagagagccggcgactggttcaaggaggagctgagactgctgggcggcctggaccacatcgtggacaaggtgaaggagtgcgtggaccacctgagcagagacgaggacgaggagaagctggtggccagcctgtggggcgccgagagatgcctgagagtgctggagagcgtgaccgtgcacaaccccgagaaccagagctacctgatcgcctacaaggacagccagctgatcgtgagcagcgccaaggccctgcagcactgcgaggagctgatccagcagtacaacagagccgaggacagcatctgcctggccgacagcaagcccctgccccaccagaacgtgaccaaccacgtgggcaaggccgtggaggactgcatgagagccatcatcggcgtgctgctgaacctgaccaacgacaacgagtggggcagcaccaagaccggcgagcaggacggcctgatcggcaccgccctgaactgcgtgctgcaggtgcccaagtacctgccccaggagcagagattcgacatcagagtgctgggcctgggcctgctgatcaacctggtggagtacagcgccagaaacagacactgcctggtgaacatggagaccagctgcagcttcgacagcagcatctgcagcggcgagggcgacgacagcctgagaatcggcggccaggtgcacgccgtgcaggccctggtgcagctgttcctggagagagagagagccgcccagctggccgagagcaagaccgacgagctgatcaaggacgcccccaccacccagcacgacaagagcggcgagtggcaggagaccagcggcgagatccagtgggtgagcaccgagaagaccgacggcaccgaggagaagcacaagaaggaggaggaggacgaggagctggacctgaacaaggccctgcagcacgccggcaagcacatggaggactgcatcgtggccagctacaccgccctgctgctgggctgcctgtgccaggagagccccatcaacgtgaccaccgtgagagagtacctgcccgagggcgacttcagcatcatgaccgagatgctgaagaagttcctgagcttcatgaacctgacctgcgccgtgggcaccaccggccagaagagcatcagcagagtgatcgagtacctggagcactgctag

SEQ ID NO: 105297 - DNA, 1209 bp, synthetic construct; identical to SEQ ID NO: 105294
  misc_feature 1..1209: note = Description of Artificial Sequence: Synthetic coding sequence
  source 1..1209: mol_type = other DNA

SEQ ID NO: 105298 - DNA, 3828 bp, synthetic construct; identical to SEQ ID NO: 105296
  misc_feature 1..3828: note = Description of Artificial Sequence: Synthetic coding sequence
  source 1..3828: mol_type = other DNA

SEQ ID NO: 105299 - DNA, 1509 bp, synthetic construct
  misc_feature 1..1509: note = Description of Artificial Sequence: Synthetic coding sequence
  source 1..1509: mol_type = other DNA
atgagcggcggccccatgggcggcagacccggcggcagaggcgcccccgccgtgcagcagaacatccccagcaccctgctgcaggaccacgagaaccagagactgttcgagatgctgggcagaaagtgcctgaccctggccaccgccgtggtgcagctgtacctggccctgccccccggcgccgagcactggaccaaggagcactgcggcgccgtgtgcttcgtgaaggacaacccccagaagagctacttcatcagactgtacggcctgcaggccggcagactgctgtgggagcaggagctgtacagccagctggtgtacagcacccccacccccttcttccacaccttcgccggcgacgactgccaggccggcctgaacttcgccgacgaggacgaggcccaggccttcagagccctggtgcaggagaagatccagaagagaaaccagagacagagcggcgacagaagacagctgccccccccccccacccccgccaacgaggagagaagaggcggcctgccccccctgcccctgcaccccggcggcgaccagggcggcccccccgtgggccccctgagcctgggcctggccaccgtggacatccagaaccccgacatcaccagcagcagatacagaggcctgcccgcccccggccccagccccgccgacaagaagagaagcggcaagaagaagatcagcaaggccgacatcggcgcccccagcggcttcaagcacgtgagccacgtgggctgggacccccagaacggcttcgacgtgaacaacctggaccccgacctgagaagcctgttcagcagagccggcatcagcgaggcccagctgaccgacgccgagaccagcaagctgatctacgacttcatcgaggaccagggcggcctggaggccgtgagacaggagatgagaagacaggagcccctgccccccccccccccccccagcagaggcggcaaccagctgcccagaccccccatcgtgggcggcaacaagggcagaagcggccccctgccccccgtgcccctgggcatcgccccccccccccccacccccagaggcccccccccccccggcagaggcggccccccccccccccccccccccgccaccggcagaagcggccccctgcccccccccccccccggcgccggcggcccccccatgcccccccccccccccccccccccccccccccccagcagcggcaacggccccgcccccccccccctgccccccgccctggtgcccgccggcggcctggcccccggcggcggcagaggcgccctgctggaccagatcagacagggcatccagctgaacaagacccccggcgcccccgagagcagcgccctgcagccccccccccagagcagcgagggcctggtgggcgccctgatgcacgtgatgcagaagagaagcagagccatccacagcagcgacgagggcgaggaccaggccggcgacgaggacgaggacgacgagtgggacgactag

SEQ ID NO: 105300 - DNA, 654 bp, synthetic construct
  misc_feature 1..654: note = Description of Artificial Sequence: Synthetic coding sequence
  source 1..654: mol_type = other DNA
atgagcggcggccccatgggcggcagacccggcggcagaggcgcccccgccgtgcagcagaacatccccagcaccctgctgcaggaccacgagaaccagagactgttcgagatgctgggcagaaagtgcctgaccctggccaccgccgtggtgcagctgtacctggccctgccccccggcgccgagcactggaccaaggagcactgcggcgccgtgtgcttcgtgaaggacaacccccagaagagctacttcatcagactgtacggcctgcaggccggcagactgctgtgggagcaggagctgtacagccagctggtgtacagcacccccacccccttcttccacaccttcgccggcgacgactgccaggccggcctgaacttcgccgacgaggacgaggcccaggccttcagagccctggtgcaggagaagatccagaagagaaaccagagacagagcggcgacagaagacagctgccccccccccccacccccgccaacgaggagagaagaggcggcctgccccccctgcccctgcaccccggcggcgaccagggcggcccccccgtgggccccctgagcctgggcctggccaccgtggacatccagaaccccgacatcaccagcagcagatacagaggcctgcccgcctag

SEQ ID NO: 105301 - DNA, 4668 bp, synthetic construct
  misc_feature 1..4668: note = Description of Artificial Sequence: Synthetic coding sequence
  source 1..4668: mol_type = other DNA
atggccaaggccatcaaggacagagtgagcctgatcaagagaaagagagagcagagacagctggtgagagaggagcaggagaagaagaagcaggaggagagcagcctgaagcagcaggtggagcagagcagcgccagccagaccggcatcaagcagctgcccagcgccagcaccggcatccccaccgccagcaccaccagcgccagcgtgagcacccaggtggagcccgaggagcccgaggccgaccagcaccagcagctgcagtaccagcagcccagcatcagcgtgctgagcgacggcaccgtggacagcggccagggcagcagcgtgttcaccgagagcagagtgagcagccagcagaccgtgagctacggcagccagcacgagcaggcccacagcaccggcaccgtgcccggccacatccccagcaccgtgcaggcccagagccagccccacggcgtgtacccccccagcagcgtgcagcagggcatccagcagaccgcccccccccagcagaccgtgcagtacagcctgagccagaccagcaccagcagcgaggccaccaccgcccagcccgtgagccagccccaggccccccaggtgctgccccaggtgagcgccggcaagcagagcacccagggcgtgagccaggtggcccccgccgagcccgtggccgtggcccagacccaggccacccagcccaccaccctggccagcagcgtggacagcgcccacagcgacgtggccagcggcatgagcgacggcaacgagaacgtgcccagcagcagcggcagacacgagggcagaaccaccaagagacactacagaaagagcgtgagaagcagaagcagacacgagaagaccagcagacccaagctgagaatcctgaacgtgagcaacaagggcgacagagtggtggagtgccagctggagacccacaacagaaagatggtgaccttcaagttcgacctggacggcgacaaccccgaggagatcgccaccatcatggtgaacaacgacttcatcctggccatcgagagagagagcttcgtggaccaggtgagagagatcatcgagaaggccgacgagatgctgagcgaggacgtgagcgtggagcccgagggcgaccagggcctggagagcctgcagggcaaggacgactacggcttcagcggcagccagaagctggagggcgagttcaagcagcccatccccgccagcagcatgccccagcagatcggcatccccaccagcagcctgacccaggtggtgcacagcgccggcagaagattcatcgtgagccccgtgcccgagagcagactgagagagagcaaggtgttccccagcgagatcaccgacaccgtggccgccagcaccgcccagagccccggcatgaacctgagccacagcgccagcagcctgagcctgcagcaggccttcagcgagctgagaagagcccagatgaccgagggccccaacaccgccccccccaacttcagccacaccggccccaccttccccgtggtgccccccttcctgagcagcatcgccggcgtgcccaccaccgccgccgccaccgcccccgtgcccgccaccagcagcccccccaacgacatcagcaccagcgtgatccagagcgaggtgaccgtgcccaccgaggagggcatcgccggcgtggccaccagcaccggcgtggtgaccagcggcggcctgcccatcccccccgtgagcgagagccccgtgctgagcagcgtggtgagcagcatcaccatccccgccgtggtgagcatcagcaccaccagccccagcctgcaggtgcccaccagcaccagcgagatcgtggtgagcagcaccgccctgtaccccagcgtgaccgtgagcgccaccagcgccagcgccggcggcagcaccgccacccccggccccaagccccccgccgtggtgagccagcaggccgccggcagcaccaccgtgggcgccaccctgaccagcgtgagcaccaccaccagcttccccagcaccgccagccagctgtgcatccagctgagcagcagcaccagcacccccaccctggccgagaccgtggtggtgagcgcccacagcctggacaagaccagccacagcagcaccaccggcctggccttcagcctgagcgcccccagcagcagcagcagccccggcgccggcgtgagcagctacatcagccagcccggcggcctgcaccccctggtgatccccagcgtgatcgccagcacccccatcctgccccaggccgccggccccaccagcacccccctgctgccccaggtgcccagcatcccccccctggtgcagcccgtggccaacgtgcccgccgtgcagcagaccctgatccacagccagccccagcccgccctgctgcccaaccagccccacacccactgccccgaggtggacagcgacacccagcccaaggcccccggcatcgacgacatcaagaccctggaggagaagctgagaagcctgttcagcgagcacagcagcagcggcgcccagcacgccagcgtgagcctggagaccagcctggtgatcgagagcaccgtgacccccggcatccccaccaccgccgtggcccccagcaagctgctgaccagcaccaccagcacctgcctgccccccaccaacctgcccctgggcaccgtggccctgcccgtgacccccgtggtgacccccggccaggtgagcacccccgtgagcaccaccaccagcggcgtgaagcccggcaccgcccccagcaagccccccctgaccaaggcccccgtgctgcccgtgggcaccgagctgcccgccggcaccctgcccagcgagcagctgccccccttccccggccccagcctgacccagagccagcagcccctggaggacctggacgcccagctgagaagaaccctgagccccgagatgatcaccgtgaccagcgccgtgggccccgtgagcatggccgcccccaccgccatcaccgaggccggcacccagccccagaagggcgtgagccaggtgaaggagggccccgtgctggccaccagcagcggcgccggcgtgttcaagatgggcagattccaggtgagcgtggccgccgacggcgcccagaaggagggcaagaacaagagcgaggacgccaagagcgtgcacttcgagagcagcaccagcgagagcagcgtgctgagcagcagcagccccgagagcaccctggtgaagcccgagcccaacggcatcaccatccccggcatcagcagcgacgtgcccgagagcgcccacaagaccaccgccagcgaggccaagagcgacaccggccagcccaccaaggtgggcagattccaggtgaccaccaccgccaacaaggtgggcagattcagcgtgagcaagaccgaggacaagatcaccgacaccaagaaggagggccccgtggccagcccccccttcatggacctggagcaggccgtgctgcccgccgtgatccccaagaaggagaagcccgagctgagcgagcccagccacctgaacggccccagcagcgaccccgaggccgccttcctgagcagagacgtggacgacggcagcggcagcccccacagcccccaccagctgagcagcaagagcctgcccagccagaacctgagccagagcctgagcaacagcttcaacagcagctacatgagcagcgacaacgagagcgacatcgaggacgaggacctgaagctggagctgagaagactgagagacaagcacctgaaggagatccaggacctgcagagcagacagaagcacgagatcgagagcctgtacaccaagctgggcaaggtgccccccgccgtgatcatcccccccgccgcccccctgagcggcagaagaagaagacccaccaagagcaagggcagcaagagcagcagaagcagcagcctgggcaacaagagcccccagctgagcggcaacctgagcggccagagcgccgccagcgtgctgcacccccagcagaccctgcacccccccggcaacatccccgagagcggccagaaccagctgctgcagcccctgaagcccagccccagcagcgacaacctgtacagcgccttcaccagcgacggcgccatcagcgtgcccagcctgagcgcccccggccagggcaccagcagcaccaacaccgtgggcgccaccgtgaacagccaggccgcccaggcccagccccccgccatgaccagcagcagaaagggcaccttcaccgacgacctgcacaagctggtggacaactgggccagagacgccatgaacctgagcggcagaagaggcagcaagggccacatgaactacgagggccccggcatggccagaaagttcagcgcccccggccagctgtgcatcagcatgaccagcaacctgggcggcagcgcccccatcagcgccgccagcgccaccagcctgggccacttcaccaagagcatgtgccccccccagcagtacggcttccccgccacccccttcggcgcccagtggagcggcaccggcggccccgccccccagcccctgggccagttccagcccgtgggcaccgccagcctgcagaacttcaacatcagcaacctgcagaagagcatcagcaacccccccggcagcaacctgagaaccacctag

SEQ ID NO: 105302 - DNA, 7149 bp, synthetic construct
  misc_feature 1..7149: note = Description of Artificial Sequence: Synthetic coding sequence
  source 1..7149: mol_type = other DNA
atgagcggcggcgccgccgagaagcagagcagcacccccggcagcctgttcctgagcccccccgcccccgcccccaagaacggcagcagcagcgacagcagcgtgggcgagaagctgggcgccgccgccgccgacgccgtgaccggcagaaccgaggagtacagaagaagaagacacaccatggacaaggacagcagaggcgccgccgccaccaccaccaccaccgagcacagattcttcagaagaagcgtgatctgcgacagcaacgccaccgccctggagctgcccggcctgcccctgagcctgccccagcccagcatccccgccgccgtgccccagagcgccccccccgagccccacagagaggagaccgtgaccgccaccgccaccagccaggtggcccagcagccccccgccgccgccgcccccggcgagcaggccgtggccggccccgcccccagcaccgtgcccagcagcaccagcaaggacagacccgtgagccagcccagcctggtgggcagcaaggaggagcccccccccgccagaagcggcagcggcggcggcagcgccaaggagccccaggaggagagaagccagcagcaggacgacatcgaggagctggagaccaaggccgtgggcatgagcaacgacggcagattcctgaagttcgacatcgagatcggcagaggcagcttcaagaccgtgtacaagggcctggacaccgagaccaccgtggaggtggcctggtgcgagctgcaggacagaaagctgaccaagagcgagagacagagattcaaggaggaggccgagatgctgaagggcctgcagcaccccaacatcgtgagattctacgacagctgggagagcaccgtgaagggcaagaagtgcatcgtgctggtgaccgagctgatgaccagcggcaccctgaagacctacctgaagagattcaaggtgatgaagatcaaggtgctgagaagctggtgcagacagatcctgaagggcctgcagttcctgcacaccagaaccccccccatcatccacagagacctgaagtgcgacaacatcttcatcaccggccccaccggcagcgtgaagatcggcgacctgggcctggccaccctgaagagagccagcttcgccaagagcgtgatcggcacccccgagttcatggcccccgagatgtacgaggagaagtacgacgagagcgtggacgtgtacgccttcggcatgtgcatgctggagatggccaccagcgagtacccctacagcgagtgccagaacgccgcccagatctacagaagagtgaccagcggcgtgaagcccgccagcttcgacaaggtggccatccccgaggtgaaggagatcatcgagggctgcatcagacagaacaaggacgagagatacagcatcaaggacctgctgaaccacgccttcttccaggaggagaccggcgtgagagtggagctggccgaggaggacgacggcgagaagatcgccatcaagctgtggctgagaatcgaggacatcaagaagctgaagggcaagtacaaggacaacgaggccatcgagttcagcttcgacctggagagagacgtgcccgaggacgtggcccaggagatggtggagagcggctacgtgtgcgagggcgaccacaagaccatggccaaggccatcaaggacagagtgagcctgatcaagagaaagagagagcagagacagctggtgagagaggagcaggagaagaagaagcaggaggagagcagcctgaagcagcaggtggagcagagcagcgccagccagaccggcatcaagcagctgcccagcgccagcaccggcatccccaccgccagcaccaccagcgccagcgtgagcacccaggtggagcccgaggagcccgaggccgaccagcaccagcagctgcagtaccagcagcccagcatcagcgtgctgagcgacggcaccgtggacagcggccagggcagcagcgtgttcaccgagagcagagtgagcagccagcagaccgtgagctacggcagccagcacgagcaggcccacagcaccggcaccgtgcccggccacatccccagcaccgtgcaggcccagagccagccccacggcgtgtacccccccagcagcgtggcccagggccagagccagggccagcccagcagcagcagcctgaccggcgtgagcagcagccagcccatccagcacccccagcagcagcagggcatccagcagaccgcccccccccagcagaccgtgcagtacagcctgagccagaccagcaccagcagcgaggccaccaccgcccagcccgtgagccagccccaggccccccaggtgctgccccaggtgagcgccggcaagcagctgcccgtgagccagcccgtgcccaccatccagggcgagccccagatccccgtggccacccagcccagcgtggtgcccgtgcacagcggcgcccacttcctgcccgtgggccagcccctgcccacccccctgctgccccagtaccccgtgagccagatccccatcagcaccccccacgtgagcaccgcccagaccggcttcagcagcctgcccatcaccatggccgccggcatcacccagcccctgctgaccctggccagcagcgccaccaccgccgccatccccggcgtgagcaccgtggtgcccagccagctgcccaccctgctgcagcccgtgacccagctgcccagccaggtgcacccccagctgctgcagcccgccgtgcagagcatgggcatccccgccaacctgggccaggccgccgaggtgcccctgagcagcggcgacgtgctgtaccagggcttcccccccagactgcccccccagtaccccggcgacagcaacatcgcccccagcagcaacgtggccagcgtgtgcatccacagcaccgtgctgagcccccccatgcccaccgaggtgctggccacccccggctacttccccaccgtggtgcagccctacgtggagagcaacctgctggtgcccatgggcggcgtgggcggccaggtgcaggtgagccagcccggcggcagcctggcccaggcccccaccaccagcagccagcaggccgtgctggagagcacccagggcgtgagccaggtggcccccgccgagcccgtggccgtggcccagacccaggccacccagcccaccaccctggccagcagcgtggacagcgcccacagcgacgtggccagcggcatgagcgacggcaacgagaacgtgcccagcagcagcggcagacacgagggcagaaccaccaagagacactacagaaagagcgtgagaagcagaagcagacacgagaagaccagcagacccaagctgagaatcctgaacgtgagcaacaagggcgacagagtggtggagtgccagctggagacccacaacagaaagatggtgaccttcaagttcgacctggacggcgacaaccccgaggagatcgccaccatcatggtgaacaacgacttcatcctggccatcgagagagagagcttcgtggaccaggtgagagagatcatcgagaaggccgacgagatgctgagcgaggacgtgagcgtggagcccgagggcgaccagggcctggagagcctgcagggcaaggacgactacggcttcagcggcagccagaagctggagggcgagttcaagcagcccatccccgccagcagcatgccccagcagatcggcatccccaccagcagcctgacccaggtggtgcacagcgccggcagaagattcatcgtgagccccgtgcccgagagcagactgagagagagcaaggtgttccccagcgagatcaccgacaccgtggccgccagcaccgcccagagccccggcatgaacctgagccacagcgccagcagcctgagcctgcagcaggccttcagcgagctgagaagagcccagatgaccgagggccccaacaccgccccccccaacttcagccacaccggccccaccttccccgtggtgccccccttcctgagcagcatcgccggcgtgcccaccaccgccgccgccaccgcccccgtgcccgccaccagcagcccccccaacgacatcagcaccagcgtgatccagagcgaggtgaccgtgcccaccgaggagggcatcgccggcgtggccaccagcaccggcgtggtgaccagcggcggcctgcccatcccccccgtgagcgagagccccgtgctgagcagcgtggtgagcagcatcaccatccccgccgtggtgagcatcagcaccaccagccccagcctgcaggtgcccaccagcaccagcgagatcgtggtgagcagcaccgccctgtaccccagcgtgaccgtgagcgccaccagcgccagcgccggcggcagcaccgccacccccggccccaagccccccgccgtggtgagccagcaggccgccggcagcaccaccgtgggcgccaccctgaccagcgtgagcaccaccaccagcttccccagcaccgccagccagctgtgcatccagctgagcagcagcaccagcacccccaccctggccgagaccgtggtggtgagcgcccacagcctggacaagaccagccacagcagcaccaccggcctggccttcagcctgagcgcccccagcagcagcagcagccccggcgccggcgtgagcagctacatcagccagcccggcggcctgcaccccctggtgatccccagcgtgatcgccagcacccccatcctgccccaggccgccggccccaccagcacccccctgctgccccaggtgcccagcatcccccccctggtgcagcccgtggccaacgtgcccgccgtgcagcagaccctgatccacagccagccccagcccgccctgctgcccaaccagccccacacccactgccccgaggtggacagcgacacccagcccaaggcccccggcatcgacgacatcaagaccctggaggagaagctgagaagcctgttcagcgagcacagcagcagcggcgcccagcacgccagcgtgagcctggagaccagcctggtgatcgagagcaccgtgacccccggcatccccaccaccgccgtggcccccagcaagctgctgaccagcaccaccagcacctgcctgccccccaccaacctgcccctgggcaccgtggccctgcccgtgacccccgtggtgacccccggccaggtgagcacccccgtgagcaccaccaccagcggcgtgaagcccggcaccgcccccagcaagccccccctgaccaaggcccccgtgctgcccgtgggcaccgagctgcccgccggcaccctgcccagcgagcagctgccccccttccccggccccagcctgacccagagccagcagcccctggaggacctggacgcccagctgagaagaaccctgagccccgagatgatcaccgtgaccagcgccgtgggccccgtgagcatggccgcccccaccgccatcaccgaggccggcacccagccccagaagggcgtgagccaggtgaaggagggccccgtgctggccaccagcagcggcgccggcgtgttcaagatgggcagattccaggtgagcgtggccgccgacggcgcccagaaggagggcaagaacaagagcgaggacgccaagagcgtgcacttcgagagcagcaccagcgagagcagcgtgctgagcagcagcagccccgagagcaccctggtgaagcccgagcccaacggcatcaccatccccggcatcagcagcgacgtgcccgagagcgcccacaagaccaccgccagcgaggccaagagcgacaccggccagcccaccaaggtgggcagattccaggtgaccaccaccgccaacaaggtgggcagattcagcgtgagcaagaccgaggacaagatcaccgacaccaagaaggagggccccgtggccagcccccccttcatggacctggagcaggccgtgctgcccgccgtgatccccaagaaggagaagcccgagctgagcgagcccagccacctgaacggccccagcagcgaccccgaggccgccttcctgagcagagacgtggacgacggcagcggcagcccccacagcccccaccagctgagcagcaagagcctgcccagccagaacctgagccagagcctgagcaacagcttcaacagcagctacatgagcagcgacaacgagagcgacatcgaggacgaggacctgaagctggagctgagaagactgagagacaagcacctgaaggagatccaggacctgcagagcagacagaagcacgagatcgagagcctgtacaccaagctgggcaaggtgccccccgccgtgatcatcccccccgccgcccccctgagcggcagaagaagaagacccaccaagagcaagggcagcaagagcagcagaagcagcagcctgggcaacaagagcccccagctgagcggcaacctgagcggccagagcgccgccagcgtgctgcacccccagcagaccctgcacccccccggcaacatccccgagagcggccagaaccagctgctgcagcccctgaagcccagccccagcagcgacaacctgtacagcgccttcaccagcgacggcgccatcagcgtgcccagcctgagcgcccccggccagggcaccagcagcaccaacaccgtgggcgccaccgtgaacagccaggccgcccaggcccagccccccgccatgaccagcagcagaaagggcaccttcaccgacgacctgcacaagctggtggacaactgggccagagacgccatgaacctgagcggcagaagaggcagcaagggccacatgaactacgagggccccggcatggccagaaagttcagcgcccccggccagctgtgcatcagcatgaccagcaacctgggcggcagcgcccccatcagcgccgccagcgccaccagcctgggccacttcaccaagagcatgtgccccccccagcagtacggcttccccgccacccccttcggcgcccagtggagcggcaccggcggccccgccccccagcccctgggccagttccagcccgtgggcaccgccagcctgcagaacttcaacatcagcaacctgcagaagagcatcagcaacccccccggcagcaacctgagaaccacctag

SEQ ID NO: 105303 - DNA, 5928 bp, synthetic construct
  misc_feature 1..5928: note = Description of Artificial Sequence: Synthetic coding sequence
  source 1..5928: mol_type = other DNA
atggacatcaagaagaaggacttctgcagcgtgttcgtgatcatcaacagccactgctgctgctgcccccagaaggactgcatcaacgagggcgtgaagcccgccagcttcgacaaggtggccatccccgaggtgaaggagatcatcgagggctgcatcagacagaacaaggacgagagatacagcatcaaggacctgctgaaccacgccttcttccaggaggagaccggcgtgagagtggagctggccgaggaggacgacggcgagaagatcgccatcaagctgtggctgagaatcgaggacatcaagaagctgaagggcaagtacaaggacaacgaggccatcgagttcagcttcgacctggagagagacgtgcccgaggacgtggcccaggagatggtggagagcggctacgtgtgcgagggcgaccacaagaccatggccaaggccatcaaggacagagtgagcctgatcaagagaaagagagagcagagacagctggtgagagaggagcaggagaagaagaagcaggaggagagcagcctgaagcagcaggtggagcagagcagcgccagccagaccggcatcaagcagctgcccagcgccagcaccggcatccccaccgccagcaccaccagcgccagcgtgagcacccaggtggagcccgaggagcccgaggccgaccagcaccagcagctgcagtaccagcagcccagcatcagcgtgctgagcgacggcaccgtggacagcggccagggcagcagcgtgttcaccgagagcagagtgagcagccagcagaccgtgagctacggcagccagcacgagcaggcccacagcaccggcaccgtgcccggccacatccccagcaccgtgcaggcccagagccagccccacggcgtgtacccccccagcagcgtggcccagggccagagccagggccagcccagcagcagcagcctgaccggcgtgagcagcagccagcccatccagcacccccagcagcagcagggcatccagcagaccgcccccccccagcagaccgtgcagtacagcctgagccagaccagcaccagcagcgaggccaccaccgcccagcccgtgagccagccccaggccccccaggtgctgccccaggtgagcgccggcaagcagctgcccgtgagccagcccgtgcccaccatccagggcgagccccagatccccgtggccacccagcccagcgtggtgcccgtgcacagcggcgcccacttcctgcccgtgggccagcccctgcccacccccctgctgccccagtaccccgtgagccagatccccatcagcaccccccacgtgagcaccgcccagaccggcttcagcagcctgcccatcaccatggccgccggcatcacccagcccctgctgaccctggccagcagcgccaccaccgccgccatccccggcgtgagcaccgtggtgcccagccagctgcccaccctgctgcagcccgtgacccagctgcccagccaggtgcacccccagctgctgcagcccgccgtgcagagcatgggcatccccgccaacctgggccaggccgccgaggtgcccctgagcagcggcgacgtgctgtaccagggcttcccccccagactgcccccccagtaccccggcgacagcaacatcgcccccagcagcaacgtggccagcgtgtgcatccacagcaccgtgctgagcccccccatgcccaccgaggtgctggccacccccggctacttccccaccgtggtgcagccctacgtggagagcaacctgctggtgcccatgggcggcgtgggcggccaggtgcaggtgagccagcccggcggcagcctggcccaggcccccaccaccagcagccagcaggccgtgctggagagcacccagggcgtgagccaggtggcccccgccgagcccgtggccgtggcccagacccaggccacccagcccaccaccctggccagcagcgtggacagcgcccacagcgacgtggccagcggcatgagcgacggcaacgagaacgtgcccagcagcagcggcagacacgagggcagaaccaccaagagacactacagaaagagcgtgagaagcagaagcagacacgagaagaccagcagacccaagctgagaatcctgaacgtgagcaacaagggcgacagagtggtggagtgccagctggagacccacaacagaaagatggtgaccttcaagttcgacctggacggcgacaaccccgaggagatcgccaccatcatggtgaacaacgacttcatcctggccatcgagagagagagcttcgtggaccaggtgagagagatcatcgagaaggccgacgagatgctgagcgaggacgtgagcgtggagcccgagggcgaccagggcctggagagcctgcagggcaaggacgactacggcttcagcggcagccagaagctggagggcgagttcaagcagcccatccccgccagcagcatgccccagcagatcggcatccccaccagcagcctgacccaggtggtgcacagcgccggcagaagattcatcgtgagccccgtgcccgagagcagactgagagagagcaaggtgttccccagcgagatcaccgacaccgtggccgccagcaccgcccagagccccggcatgaacctgagccacagcgccagcagcctgagcctgcagcaggccttcagcgagctgagaagagcccagatgaccgagggccccaacaccgccccccccaacttcagccacaccggccccaccttccccgtggtgccccccttcctgagcagcatcgccggcgtgcccaccaccgccgccgccaccgcccccgtgcccgccaccagcagcccccccaacgacatcagcaccagcgtgatccagagcgaggtgaccgtgcccaccgaggagggcatcgccggcgtggccaccagcaccggcgtggtgaccagcggcggcctgcccatcccccccgtgagcgagagccccgtgctgagcagcgtggtgagcagcatcaccatccccgccgtggtgagcatcagcaccaccagccccagcctgcaggtgcccaccagcaccagcgagatcgtggtgagcagcaccgccctgtaccccagcgtgaccgtgagcgccaccagcgccagcgccggcggcagcaccgccacccccggccccaagccccccgccgtggtgagccagcaggccgccggcagcaccaccgtgggcgccaccctgaccagcgtgagcaccaccaccagcttccccagcaccgccagccagctgtgcatccagctgagcagcagcaccagcacccccaccctggccgagaccgtggtggtgagcgcccacagcctggacaagaccagccacagcagcaccaccggcctggccttcagcctgagcgcccccagcagcagcagcagccccggcgccggcgtgagcagctacatcagccagcccggcggcctgcaccccctggtgatccccagcgtgatcgccagcacccccatcctgccccaggccgccggccccaccagcacccccctgctgccccaggtgcccagcatcccccccctggtgcagcccgtggccaacgtgcccgccgtgcagcagaccctgatccacagccagccccagcccgccctgctgcccaaccagccccacacccactgccccgaggtggacagcgacacccagcccaaggcccccggcatcgacgacatcaagaccctggaggagaagctgagaagcctgttcagcgagcacagcagcagcggcgcccagcacgccagcgtgagcctggagaccagcctggtgatcgagagcaccgtgacccccggcatccccaccaccgccgtggcccccagcaagctgctgaccagcaccaccagcacctgcctgccccccaccaacctgcccctgggcaccgtggccctgcccgtgacccccgtggtgacccccggccaggtgagcacccccgtgagcaccaccaccagcggcgtgaagcccggcaccgcccccagcaagccccccctgaccaaggcccccgtgctgcccgtgggcaccgagctgcccgccggcaccctgcccagcgagcagctgccccccttccccggccccagcctgacccagagccagcagcccctggaggacctggacgcccagctgagaagaaccctgagccccgagatgatcaccgtgaccagcgccgtgggccccgtgagcatggccgcccccaccgccatcaccgaggccggcacccagccccagaagggcgtgagccaggtgaaggagggccccgtgctggccaccagcagcggcgccggcgtgttcaagatgggcagattccaggtgagcgtggccgccgacggcgcccagaaggagggcaagaacaagagcgaggacgccaagagcgtgcacttcgagagcagcaccagcgagagcagcgtgctgagcagcagcagccccgagagcaccctggtgaagcccgagcccaacggcatcaccatccccggcatcagcagcgacgtgcccgagagcgcccacaagaccaccgccagcgaggccaagagcgacaccggccagcccaccaaggtgggcagattccaggtgaccaccaccgccaacaaggtgggcagattcagcgtgagcaagaccgaggacaagatcaccgacaccaagaaggagggccccgtggccagcccccccttcatggacctggagcaggccgtgctgcccgccgtgatccccaagaaggagaagcccgagctgagcgagcccagccacctgaacggccccagcagcgaccccgaggccgccttcctgagcagagacgtggacgacggcagcggcagcccccacagcccccaccagctgagcagcaagagcctgcccagccagaacctgagccagagcctgagcaacagcttcaacagcagctacatgagcagcgacaacgagagcgacatcgaggacgaggacctgaagctggagctgagaagactgagagacaagcacctgaaggagatccaggacctgcagagcagacagaagcacgagatcgagagcctgtacaccaagctgggcaaggtgccccccgccgtgatcatcccccccgccgcccccctgagcggcagaagaagaagacccaccaagagcaagggcagcaagagcagcagaagcagcagcctgggcaacaagagcccccagctgagcggcaacctgagcggccagagcgccgccagcgtgctgcacccccagcagaccctgcacccccccggcaacatccccgagagcggccagaaccagctgctgcagcccctgaagcccagccccagcagcgacaacctgtacagcgccttcaccagcgacggcgccatcagcgtgcccagcctgagcgcccccggccagggcaccagcagcaccaacaccgtgggcgccaccgtgaacagccaggccgcccaggcccagccccccgccatgaccagcagcagaaagggcaccttcaccgacgacctgcacaagctggtggacaactgggccagagacgccatgaacctgagcggcagaagaggcagcaagggccacatgaactacgagggccccggcatggccagaaagttcagcgcccccggccagctgtgcatcagcatgaccagcaacctgggcggcagcgcccccatcagcgccgccagcgccaccagcctgggccacttcaccaagagcatgtgccccccccagcagtacggcttccccgccacccccttcggcgcccagtggagcggcaccggcggccccgccccccagcccctgggccagttccagcccgtgggcaccgccagcctgcagaacttcaacatcagcaacctgcagaagagcatcagcaacccccccggcagcaacctgagaaccacctag

SEQ ID NO: 105304 - DNA, 1182 bp, synthetic construct
  misc_feature 1..1182: note = Description of Artificial Sequence: Synthetic coding sequence
  source 1..1182: mol_type = other DNA
atgagcggcggcgccgccgagaagcagagcagcacccccggcagcctgttcctgagcccccccgcccccgcccccaagaacggcagcagcagcgacagcagcgtgggcgagaagctgggcgccgccgccgccgacgccgtgaccggcagaaccgaggagtacagaagaagaagacacaccatggacaaggacagcagaggcgccgccgccaccaccaccaccaccgagcacagattcttcagaagaagcgtgatctgcgacagcaacgccaccgccctggagctgcccggcctgcccctgagcctgccccagcccagcatccccgccgccgtgccccagagcgccccccccgagccccacagagaggagaccgtgaccgccaccgccaccagccaggtggcccagcagccccccgccgccgccgcccccggcgagcaggccgtggccggccccgcccccagcaccgtgcccagcagcaccagcaaggacagacccgtgagccagcccagcctggtgggcagcaaggaggagcccccccccgccagaagcggcagcggcggcggcagcgccaaggagccccaggaggagagaagccagcagcaggacgacatcgaggagctggagaccaaggccgtgggcatgagcaacgacggcagattcctgaagttcgacatcgagatcggcagaggcagcttcaagaccgtgtacaagggcctggacaccgagaccaccgtggaggtggcctggtgcgagctgcaggacagaaagctgaccaagagcgagagacagagattcaaggaggaggccgagatgctgaagggcctgcagcaccccaacatcgtgagattctacgacagctgggagagcaccgtgaagggcaagaagtgcatcgtgctggtgaccgagctgatgaccagcggcaccctgaagacctacctgaagagattcaaggtgatgaagatcaaggtgctgagaagctggtgcagacagatcctgaagggcctgcagttcctgcacaccagaaccccccccatcatccacagagacctgaagtgcgacaacatcttcatcaccggccccaccggcagcgtgaagatcggcgacctgggcctggccaccctgaagagagccagcttcgccaagagcgtgatcggcatgttccaggtgtacctgggcgcctag

SEQ ID NO: 105305 - DNA, 8643 bp, synthetic construct
  misc_feature 1..8643: note = Description of Artificial Sequence: Synthetic coding sequence
  source 1..8643: mol_type = other DNA
atgagcggcggcgccgccgagaagcagagcagcacccccggcagcctgttcctgagcccccccgcccccgcccccaagaacggcagcagcagcgacagcagcgtgggcgagaagctgggcgccgccgccgccgacgccgtgaccggcagaaccgaggagtacagaagaagaagacacaccatggacaaggacagcagaggcgccgccgccaccaccaccaccaccgagcacagattcttcagaagaagcgtgatctgcgacagcaacgccaccgccctggagctgcccggcctgcccctgagcctgccccagcccagcatccccgccgccgtgccccagagcgccccccccgagccccacagagaggagaccgtgaccgccaccgccaccagccaggtggcccagcagccccccgccgccgccgcccccggcgagcaggccgtggccggccccgcccccagcaccgtgcccagcagcaccagcaaggacagacccgtgagccagcccagcctggtgggcagcaaggaggagcccccccccgccagaagcggcagcggcggcggcagcgccaaggagccccaggaggagagaagccagcagcaggacgacatcgaggagctggagaccaaggccgtgggcatgagcaacgacggcagattcctgaagttcgacatcgagatcggcagaggcagcttcaagaccgtgtacaagggcctggacaccgagaccaccgtggaggtggcctggtgcgagctgcaggacagaaagctgaccaagagcgagagacagagattcaaggaggaggccgagatgctgaagggcctgcagcaccccaacatcgtgagattctacgacagctgggagagcaccgtgaagggcaagaagtgcatcgtgctggtgaccgagctgatgaccagcggcaccctgaagacctacctgaagagattcaaggtgatgaagatcaaggtgctgagaagctggtgcagacagatcctgaagggcctgcagttcctgcacaccagaaccccccccatcatccacagagacctgaagtgcgacaacatcttcatcaccggccccaccggcagcgtgaagatcggcgacctgggcctggccaccctgaagagagccagcttcgccaagagcgtgatcggcacccccgagttcatggcccccgagatgtacgaggagaagtacgacgagagcgtggacgtgtacgccttcggcatgtgcatgctggagatggccaccagcgagtacccctacagcgagtgccagaacgccgcccagatctacagaagagtgaccagcggcgtgaagcccgccagcttcgacaaggtggccatccccgaggtgaaggagatcatcgagggctgcatcagacagaacaaggacgagagatacagcatcaaggacctgctgaaccacgccttcttccaggaggagaccggcgtgagagtggagctggccgaggaggacgacggcgagaagatcgccatcaagctgtggctgagaatcgaggacatcaagaagctgaagggcaagtacaaggacaacgaggccatcgagttcagcttcgacctggagagagacgtgcccgaggacgtggcccaggagatggtggagagcggctacgtgtgcgagggcgaccacaagaccatggccaaggccatcaaggacagagtgagcctgatcaagagaaagagagagcagagacagctggtgagagaggagcaggagaagaagaagcaggaggagagcagcctgaagcagcaggtggagcagagcagcgccagccagaccggcatcaagcagctgcccagcgccagcaccggcatccccaccgccagcaccaccagcgccagcgtgagcacccaggtggagcccgaggagcccgaggccgaccagcaccagcagctgcagtaccagcagcccagcatcagcgtgctgagcgacggcaccgtggacagcggccagggcagcagcgtgttcaccgagagcagagtgagcagccagcagaccgtgagctacggcagccagcacgagcaggcccacagcaccggcaccgtgcccggccacatccccagcaccgtgcaggcccagagccagccccacggcgtgtacccccccagcagcgtgcccagaagaggcagaagcatgagcgtgtgcgtgcccatcttcctgctgctgcccctgtgccccgccagcctgcccgtgctgttccaccccaccgccagcaccgtgtgcaccagcttcagcttccccccccccgactgccccgaggagaccttcgccgagaagctgagcaaggccctggagagcgtgctgcccatgcacagcgccagccagagaaagcacagaagaagcagcctgcccagcctgttcgtgagcaccccccagagcatggcccacccctgcggcggcacccccacctaccccgagagccagatcttcttccccaccatccacgagagacccgtgagcttcagccccccccccacctgcccccccaaggtggccatcagccagagaagaaagagcaccagcttcctggaggcccagacccaccacttccagcccctgctgagaaccgtgggccagagcctgctgccccccggcggcagccccaccaactggacccccgaggccgtggtgatgctgggcaccaccgccagcagagtgaccggcgagagctgcgagatccaggtgcaccccatgttcgagcccagccaggtgtacagcgactacagacccggcctggtgctgcccgaggaggcccactacttcatcccccaggaggccgtgtacgtggccggcgtgcactaccaggccagagtggccgagcagtacgagggcatcccctacaacagcagcgtgctgagcagccccatgaagcagatccccgagcagaagcccgtgcagggcggccccaccagcagcagcgtgttcgagttccccagcggccaggccttcctggtgggccacctgcagaacctgagactggacagcggcctgggccccggcagccccctgagcagcatcagcgcccccatcagcaccgacgccaccagactgaagttccaccccgtgttcgtgccccacagcgcccccgccgtgctgacccacaacaacgagagcagaagcaactgcgtgttcgagttccacgtgcacacccccagcagcagcagcggcgagggcggcggcatcctgccccagagagtgtacagaaacagacaggtggccgtggacctgaaccaggaggagctgcccccccagagcgtgggcctgcacggctacctgcagcccgtgaccgaggagaagcacaactaccacgcccccgagctgaccgtgagcgtggtggagcccatcggccagaactggcccatcggcagccccgagtacagcagcgacagcagccagatcaccagcagcgaccccagcgacttccagagccccccccccaccggcggcgccgccgcccccttcggcagcgacgtgagcatgcccttcatccacctgccccagaccgtgctgcaggagagccccctgttcttctgcttcccccagggcaccaccagccagcaggtgctgaccgccagcttcagcagcggcggcagcgccctgcacccccaggcccagggccagagccagggccagcccagcagcagcagcctgaccggcgtgagcagcagccagcccatccagcacccccagcagcagcagggcatccagcagaccgcccccccccagcagaccgtgcagtacagcctgagccagaccagcaccagcagcgaggccaccaccgcccagcccgtgagccagccccaggccccccaggtgctgccccaggtgagcgccggcaagcagctgcccgtgagccagcccgtgcccaccatccagggcgagccccagatccccgtggccacccagcccagcgtggtgcccgtgcacagcggcgcccacttcctgcccgtgggccagcccctgcccacccccctgctgccccagtaccccgtgagccagatccccatcagcaccccccacgtgagcaccgcccagaccggcttcagcagcctgcccatcaccatggccgccggcatcacccagcccctgctgaccctggccagcagcgccaccaccgccgccatccccggcgtgagcaccgtggtgcccagccagctgcccaccctgctgcagcccgtgacccagctgcccagccaggtgcacccccagctgctgcagcccgccgtgcagagcatgggcatccccgccaacctgggccaggccgccgaggtgcccctgagcagcggcgacgtgctgtaccagggcttcccccccagactgcccccccagtaccccggcgacagcaacatcgcccccagcagcaacgtggccagcgtgtgcatccacagcaccgtgctgagcccccccatgcccaccgaggtgctggccacccccggctacttccccaccgtggtgcagccctacgtggagagcaacctgctggtgcccatgggcggcgtgggcggccaggtgcaggtgagccagcccggcggcagcctggcccaggcccccaccaccagcagccagcaggccgtgctggagagcacccagggcgtgagccaggtggcccccgccgagcccgtggccgtggcccagacccaggccacccagcccaccaccctggccagcagcgtggacagcgcccacagcgacgtggccagcggcatgagcgacggcaacgagaacgtgcccagcagcagcggcagacacgagggcagaaccaccaagagacactacagaaagagcgtgagaagcagaagcagacacgagaagaccagcagacccaagctgagaatcctgaacgtgagcaacaagggcgacagagtggtggagtgccagctggagacccacaacagaaagatggtgaccttcaagttcgacctggacggcgacaaccccgaggagatcgccaccatcatggtgaacaacgacttcatcctggccatcgagagagagagcttcgtggaccaggtgagagagatcatcgagaaggccgacgagatgctgagcgaggacgtgagcgtggagcccgagggcgaccagggcctggagagcctgcagggcaaggacgactacggcttcagcggcagccagaagctggagggcgagttcaagcagcccatccccgccagcagcatgccccagcagatcggcatccccaccagcagcctgacccaggtggtgcacagcgccggcagaagattcatcgtgagccccgtgcccgagagcagactgagagagagcaaggtgttccccagcgagatcaccgacaccgtggccgccagcaccgcccagagccccggcatgaacctgagccacagcgccagcagcctgagcctgcagcaggccttcagcgagctgagaagagcccagatgaccgagggccccaacaccgccccccccaacttcagccacaccggccccaccttccccgtggtgccccccttcctgagcagcatcgccggcgtgcccaccaccgccgccgccaccgcccccgtgcccgccaccagcagcccccccaacgacatcagcaccagcgtgatccagagcgaggtgaccgtgcccaccgaggagggcatcgccggcgtggccaccagcaccggcgtggtgaccagcggcggcctgcccatcccccccgtgagcgagagccccgtgctgagcagcgtggtgagcagcatcaccatccccgccgtggtgagcatcagcaccaccagccccagcctgcaggtgcccaccagcaccagcgagatcgtggtgagcagcaccgccctgtaccccagcgtgaccgtgagcgccaccagcgccagcgccggcggcagcaccgccacccccggccccaagccccccgccgtggtgagccagcaggccgccggcagcaccaccgtgggcgccaccctgaccagcgtgagcaccaccaccagcttccccagcaccgccagccagctgtgcatccagctgagcagcagcaccagcacccccaccctggccgagaccgtggtggtgagcgcccacagcctggacaagaccagccacagcagcaccaccggcctggccttcagcctgagcgcccccagcagcagcagcagccccggcgccggcgtgagcagctacatcagccagcccggcggcctgcaccccctggtgatccccagcgtgatcgccagcacccccatcctgccccaggccgccggccccaccagcacccccctgctgccccaggtgcccagcatcccccccctggtgcagcccgtggccaacgtgcccgccgtgcagcagaccctgatccacagccagccccagcccgccctgctgcccaaccagccccacacccactgccccgaggtggacagcgacacccagcccaaggcccccggcatcgacgacatcaagaccctggaggagaagctgagaagcctgttcagcgagcacagcagcagcggcgcccagcacgccagcgtgagcctggagaccagcctggtgatcgagagcaccgtgacccccggcatccccaccaccgccgtggcccccagcaagctgctgaccagcaccaccagcacctgcctgccccccaccaacctgcccctgggcaccgtggccctgcccgtgacccccgtggtgacccccggccaggtgagcacccccgtgagcaccaccaccagcggcgtgaagcccggcaccgcccccagcaagccccccctgaccaaggcccccgtgctgcccgtgggcaccgagctgcccgccggcaccctgcccagcgagcagctgccccccttccccggccccagcctgacccagagccagcagcccctggaggacctggacgcccagctgagaagaaccctgagccccgagatgatcaccgtgaccagcgccgtgggccccgtgagcatggccgcccccaccgccatcaccgaggccggcacccagccccagaagggcgtgagccaggtgaaggagggccccgtgctggccaccagcagcggcgccggcgtgttcaagatgggcagattccaggtgagcgtggccgccgacggcgcccagaaggagggcaagaacaagagcgaggacgccaagagcgtgcacttcgagagcagcaccagcgagagcagcgtgctgagcagcagcagccccgagagcaccctggtgaagcccgagcccaacggcatcaccatccccggcatcagcagcgacgtgcccgagagcgcccacaagaccaccgccagcgaggccaagagcgacaccggccagcccaccaaggtgggcagattccaggtgaccaccaccgccaacaaggtgggcagattcagcgtgagcaagaccgaggacaagatcaccgacaccaagaaggagggccccgtggccagcccccccttcatggacctggagcaggccgtgctgcccgccgtgatccccaagaaggagaagcccgagctgagcgagcccagccacctgaacggccccagcagcgaccccgaggccgccttcctgagcagagacgtggacgacggcagcggcagcccccacagcccccaccagctgagcagcaagagcctgcccagccagaacctgagccagagcctgagcaacagcttcaacagcagctacatgagcagcgacaacgagagcgacatcgaggacgaggacctgaagctggagctgagaagactgagagacaagcacctgaaggagatccaggacctgcagagcagacagaagcacgagatcgagagcctgtacaccaagctgggcaaggtgccccccgccgtgatcatcccccccgccgcccccctgagcggcagaagaagaagacccaccaagagcaagggcagcaagagcagcagaagcagcagcctgggcaacaagagcccccagctgagcggcaacctgagcggccagagcgccgccagcgtgctgcacccccagcagaccctgcacccccccggcaacatccccgagagcggccagaaccagctgctgcagcccctgaagcccagccccagcagcgacaacctgtacagcgccttcaccagcgacggcgccatcagcgtgcccagcctgagcgcccccggccagggcaccagcagcaccaacaccgtgggcgccaccgtgaacagccaggccgcccaggcccagccccccgccatgaccagcagcagaaagggcaccttcaccgacgacctgcacaagctggtggacaactgggccagagacgccatgaacctgagcggcagaagaggcagcaagggccacatgaactacgagggccccggcatggccagaaagttcagcgcccccggccagctgtgcatcagcatgaccagcaacctgggcggcagcgcccccatcagcgccgccagcgccaccagcctgggccacttcaccaagagcatgtgccccccccagcagtacggcttccccgccacccccttcggcgcccagtggagcggcaccggcggccccgccccccagcccctgggccagttccagcccgtgggcaccgccagcctgcagaacttcaacatcagcaacctgcagaagagcatcagcaacccccccggcagcaacctgagaaccacctag

SEQ ID NO: 105306 - DNA, 6405 bp, synthetic construct
  misc_feature 1..6405: note = Description of Artificial Sequence: Synthetic coding sequence
  source 1..6405: mol_type = other DNA
atgagcggcggcgccgccgagaagcagagcagcacccccggcagcctgttcctgagcccccccgcccccgcccccaagaacggcagcagcagcgacagcagcgtgggcgagaagctgggcgccgccgccgccgacgccgtgaccggcagaaccgaggagtacagaagaagaagacacaccatggacaaggacagcagaggcgccgccgccaccaccaccaccaccgagcacagattcttcagaagaagcgtgatctgcgacagcaacgccaccgccctggagctgcccggcctgcccctgagcctgccccagcccagcatccccgccgccgtgccccagagcgccccccccgagccccacagagaggagaccgtgaccgccaccgccaccagccaggtggcccagcagccccccgccgccgccgcccccggcgagcaggccgtggccggccccgcccccagcaccgtgcccagcagcaccagcaaggacagacccgtgagccagcccagcctggtgggcagcaaggaggagcccccccccgccagaagcggcagcggcggcggcagcgccaaggagccccaggaggagagaagccagcagcaggacgacatcgaggagctggagaccaaggccgtgggcatgagcaacgacggcagattcctgaagttcgacatcgagatcggcagaggcagcttcaagaccgtgtacaagggcctggacaccgagaccaccgtggaggtggcctggtgcgagctgcaggacagaaagctgaccaagagcgagagacagagattcaaggaggaggccgagatgctgaagggcctgcagcaccccaacatcgtgagattctacgacagctgggagagcaccgtgaagggcaagaagtgcatcgtgctggtgaccgagctgatgaccagcggcaccctgaagacctacctgaagagattcaaggtgatgaagatcaaggtgctgagaagctggtgcagacagatcctgaagggcctgcagttcctgcacaccagaaccccccccatcatccacagagacctgaagtgcgacaacatcttcatcaccggccccaccggcagcgtgaagatcggcgacctgggcctggccaccctgaagagagccagcttcgccaagagcgtgatcggcacccccgagttcatggcccccgagatgtacgaggagaagtacgacgagagcgtggacgtgtacgccttcggcatgtgcatgctggagatggccaccagcgagtacccctacagcgagtgccagaacgccgcccagatctacagaagagtgaccagcggcgtgaagcccgccagcttcgacaaggtggccatccccgaggtgaaggagatcatcgagggctgcatcagacagaacaaggacgagagatacagcatcaaggacctgctgaaccacgccttcttccaggaggagaccggcgtgagagtggagctggccgaggaggacgacggcgagaagatcgccatcaagctgtggctgagaatcgaggacatcaagaagctgaagggcaagtacaaggacaacgaggccatcgagttcagcttcgacctggagagagacgtgcccgaggacgtggcccaggagatggtggagagcggctacgtgtgcgagggcgaccacaagaccatggccaaggccatcaaggacagagtgagcctgatcaagagaaagagagagcagagacagctggtgagagaggagcaggagaagaagaagcaggaggagagcagcctgaagcagcaggtggagcagagcagcgccagccagaccggcatcaagcagctgcccagcgccagcaccggcatccccaccgccagcaccaccagcgccagcgtgagcacccaggtggagcccgaggagcccgaggccgaccagcaccagcagctgcagtaccagcagcccagcatcagcgtgctgagcgacggcaccgtggacagcggccagggcagcagcgtgttcaccgagagcagagtgagcagccagcagaccgtgagctacggcagccagcacgagcaggcccacagcaccggcaccgtgcccggccacatccccagcaccgtgcaggcccagagccagccccacggcgtgtacccccccagcagcgtggcccagggccagagccagggccagcccagcagcagcagcctgaccggcgtgagcagcagccagcccatccagcacccccagcagcagggcatccagcagaccgcccccccccagcagaccgtgcagtacagcctgagccagaccagcaccagcagcgaggccaccaccgcccagcccgtgagccagccccaggccccccaggtgctgccccaggtgagcgccggcaagcagagcacccagggcgtgagccaggtggcccccgccgagcccgtggccgtggcccagacccaggccacccagcccaccaccctggccagcagcgtggacagcgcccacagcgacgtggccagcggcatgagcgacggcaacgagaacgtgcccagcagcagcggcagacacgagggcagaaccaccaagagacactacagaaagagcgtgagaagcagaagcagacacgagaagaccagcagacccaagctgagaatcctgaacgtgagcaacaagggcgacagagtggtggagtgccagctggagacccacaacagaaagatggtgaccttcaagttcgacctggacggcgacaaccccgaggagatcgccaccatcatggtgaacaacgacttcatcctggccatcgagagagagagcttcgtggaccaggtgagagagatcatcgagaaggccgacgagatgctgagcgaggacgtgagcgtggagcccgagggcgaccagggcctggagagcctgcagggcaaggacgactacggcttcagcggcagccagaagctggagggcgagttcaagcagcccatccccgccagcagcatgccccagcagatcggcatccccaccagcagcctgacccaggtggtgcacagcgccggcagaagattcatcgtgagccccgtgcccgagagcagactgagagagagcaaggtgttccccagcgagatcaccgacaccgtggccgccagcaccgcccagagccccggcatgaacctgagccacagcgccagcagcctgagcctgcagcaggccttcagcgagctgagaagagcccagatgaccgagggccccaacaccgccccccccaacttcagccacaccggccccaccttccccgtggtgccccccttcctgagcagcatcgccggcgtgcccaccaccgccgccgccaccgcccccgtgcccgccaccagcagcccccccaacgacatcagcaccagcgtgatccagagcgaggtgaccgtgcccaccgaggagggcatcgccggcgtggccaccagcaccggcgtggtgaccagcggcggcctgcccatcccccccgtgagcgagagccccgtgctgagcagcgtggtgagcagcatcaccatccccgccgtggtgagcatcagcaccaccagccccagcctgcaggtgcccaccagcaccagcgagatcgtggtgagcagcaccgccctgtaccccagcgtgaccgtgagcgccaccagcgccagcgccggcggcagcaccgccacccccggccccaagccccccgccgtggtgagccagcaggccgccggcagcaccaccgtgggcgccaccctgaccagcgtgagcaccaccaccagcttccccagcaccgccagccagctgtgcatccagctgagcagcagcaccagcacccccaccctggccgagaccgtggtggtgagcgcccacagcctggacaagaccagccacagcagcaccaccggcctggccttcagcctgagcgcccccagcagcagcagcagccccggcgccggcgtgagcagctacatcagccagcccggcggcctgcaccccctggtgatccccagcgtgatcgccagcacccccatcctgccccaggccgccggccccaccagcacccccctgctgccccaggtgcccagcatcccccccctggtgcagcccgtggccaacgtgcccgccgtgcagcagaccctgatccacagccagccccagcccgccctgctgcccaaccagccccacacccactgccccgaggtggacagcgacacccagcccaaggcccccggcatcgacgacatcaagaccctggaggagaagctgagaagcctgttcagcgagcacagcagcagcggcgcccagcacgccagcgtgagcctggagaccagcctggtgatcgagagcaccgtgacccccggcatccccaccaccgccgtggcccccagcaagctgctgaccagcaccaccagcacctgcctgccccccaccaacctgcccctgggcaccgtggccctgcccgtgacccccgtggtgacccccggccaggtgagcacccccgtgagcaccaccaccagcggcgtgaagcccggcaccgcccccagcaagccccccctgaccaaggcccccgtgctgcccgtgggcaccgagctgcccgccggcaccctgcccagcgagcagctgccccccttccccggccccagcctgacccagagccagcagcccctggaggacctggacgcccagctgagaagaaccctgagccccgagatgatcaccgtgaccagcgccgtgggccccgtgagcatggccgcccccaccgccatcaccgaggccggcacccagccccagaaggtgagccaggtgaaggagggccccgtgctggccaccagcagcggcgccggcgtgttcaagatgggcagattccaggtgagcgtggccgccgacggcgcccagaaggagggcaagaacaagagcgaggacgccaagagcgtgcacttcgagagcagcaccagcgagagcagcgtgctgagcagcagcagccccgagagcaccctggtgaagcccgagcccaacggcatcaccatccccggcatcagcagcgacgtgcccgagagcgcccacaagaccaccgccagcgaggccaagagcgacaccggccagcccaccaaggtgggcagattccaggtgaccaccaccgccaacaaggtgggcagattcagcgtgagcaagaccgaggacaagatcaccgacaccaagaaggagggccccgtggccagcccccccttcatggacctggagcaggccgtgctgcccgccgtgatccccaagaaggagaagcccgagctgagcgagcccagccacctgaacggccccagcagcgaccccgaggccgccttcctgagcagagacgtggacgacggcagcggcagcccccacagcccccaccagctgagcagcaagagcctgcccagccagaacctgagccagagcctgagcaacagcttcaacagcagctacatgagcagcgacaacgagagcgacatcgaggacgaggacctgaagctggagctgagaagactgagagacaagcacctgaaggagatccaggacctgcagagcagacagaagcacgagatcgagagcctgtacaccaagctgggcaaggtgccccccgccgtgatcatcccccccgccgcccccctgagcggcagaagaagaagacccaccaagagcaagggcagcaagagcagcagaagcagcagcctgggcaacaagagcccccagctgagcggcaacctgagcggccagagcgccgccagcgtgctgcacccccagcagaccctgcacccccccggcaacatccccgagagcggccagaaccagctgctgcagcccctgaagcccagccccagcagcgacaacctgtacagcgccttcaccagcgacggcgccatcagcgtgcccagcctgagcgcccccggccagggcaccagcagcaccaacaccgtgggcgccaccgtgaacagccaggccgcccaggcccagccccccgccatgaccagcagcagaaagggcaccttcaccgacgacctgcacaagctggtggacaactgggccagagacgccatgaacctgagcggcagaagaggcagcaagggccacatgaactacgagggccccggcatggccagaaagttcagcgcccccggccagctgtgcatcagcatgaccagcaacctgggcggcagcgcccccatcagcgccgccagcgccaccagcctgggccacttcaccaagagcatgtgccccccccagcagtacggcttccccgccacccccttcggcgcccagtggagcggcaccggcggccccgccccccagcccctgggccagttccagcccgtgggcaccgccagcctgcagaacttcaacatcagcaacctgcagaagagcatcagcaacccccccggcagcaacctgagaaccacctag

SEQ ID NO: 105307 - DNA, 975 bp, synthetic construct
  misc_feature 1..975: note = Description of Artificial Sequence: Synthetic coding sequence
  source 1..975: mol_type = other DNA
atgagcagcgacaacgagagcgacatcgaggacgaggacctgaagctggagctgagaagactgagagacaagcacctgaaggagatccaggacctgcagagcagacagaagcacgagatcgagagcctgtacaccaagctgggcaaggtgccccccgccgtgatcatcccccccgccgcccccctgagcggcagaagaagaagacccaccaagagcaagggcagcaagagcagcagaagcagcagcctgggcaacaagagcccccagctgagcggcaacctgagcggccagagcgccgccagcgtgctgcacccccagcagaccctgcacccccccggcaacatccccgagagcggccagaaccagctgctgcagcccctgaagcccagccccagcagcgacaacctgtacagcgccttcaccagcgacggcgccatcagcgtgcccagcctgagcgcccccggccagggcaccagcagcaccaacaccgtgggcgccaccgtgaacagccaggccgcccaggcccagccccccgccatgaccagcagcagaaagggcaccttcaccgacgacctgcacaagctggtggacaactgggccagagacgccatgaacctgagcggcagaagaggcagcaagggccacatgaactacgagggccccggcatggccagaaagttcagcgcccccggccagctgtgcatcagcatgaccagcaacctgggcggcagcgcccccatcagcgccgccagcgccaccagcctgggccacttcaccaagagcatgtgccccccccagcagtacggcttccccgccacccccttcggcgcccagtggagcggcaccggcggccccgccccccagcccctgggccagttccagcccgtgggcaccgccagcctgcagaacttcaacatcagcaacctgcagaagagcatcagcaacccccccggcagcaacctgagaaccacctag

SEQ ID NO: 105308 - DNA, 7929 bp, synthetic construct
  misc_feature 1..7929: note = Description of Artificial Sequence: Synthetic coding sequence
  source 1..7929: mol_type = other DNA
atgagcggcggcgccgccgagaagcagagcagcacccccggcagcctgttcctgagcccccccgcccccgcccccaagaacggcagcagcagcgacagcagcgtgggcgagaagctgggcgccgccgccgccgacgccgtgaccggcagaaccgaggagtacagaagaagaagacacaccatggacaaggacagcagaggcgccgccgccaccaccaccaccaccgagcacagattcttcagaagaagcgtgatctgcgacagcaacgccaccgccctggagctgcccggcctgcccctgagcctgccccagcccagcatccccgccgccgtgccccagagcgccccccccgagccccacagagaggagaccgtgaccgccaccgccaccagccaggtggcccagcagccccccgccgccgccgcccccggcgagcaggccgtggccggccccgcccccagcaccgtgcccagcagcaccagcaaggacagacccgtgagccagcccagcctggtgggcagcaaggaggagcccccccccgccagaagcggcagcggcggcggcagcgccaaggagccccaggaggagagaagccagcagcaggacgacatcgaggagctggagaccaaggccgtgggcatgagcaacgacggcagattcctgaagttcgacatcgagatcggcagaggcagcttcaagaccgtgtacaagggcctggacaccgagaccaccgtggaggtggcctggtgcgagctgcaggacagaaagctgaccaagagcgagagacagagattcaaggaggaggccgagatgctgaagggcctgcagcaccccaacatcgtgagattctacgacagctgggagagcaccgtgaagggcaagaagtgcatcgtgctggtgaccgagctgatgaccagcggcaccctgaagacctacctgaagagattcaaggtgatgaagatcaaggtgctgagaagctggtgcagacagatcctgaagggcctgcagttcctgcacaccagaaccccccccatcatccacagagacctgaagtgcgacaacatcttcatcaccggccccaccggcagcgtgaagatcggcgacctgggcctggccaccctgaagagagccagcttcgccaagagcgtgatcggcacccccgagttcatggcccccgagatgtacgaggagaagtacgacgagagcgtggacgtgtacgccttcggcatgtgcatgctggagatggccaccagcgagtacccctacagcgagtgccagaacgccgcccagatctacagaagagtgaccagcggcgtgaagcccgccagcttcgacaaggtggccatccccgaggtgaaggagatcatcgagggctgcatcagacagaacaaggacgagagatacagcatcaaggacctgctgaaccacgccttcttccaggaggagaccggcgtgagagtggagctggccgaggaggacgacggcgagaagatcgccatcaagctgtggctgagaatcgaggacatcaagaagctgaagggcaagtacaaggacaacgaggccatcgagttcagcttcgacctggagagagacgtgcccgaggacgtggcccaggagatggtggagagcggctacgtgtgcgagggcgaccacaagaccatggccaaggccatcaaggacagagtgagcctgatcaagagaaagagagagcagagacagctggtgagagaggagcaggagaagaagaagcaggaggagagcagcctgaagcagcaggtggagcagagcagcgccagccagaccggcatcaagcagctgcccagcgccagcaccggcatccccaccgccagcaccaccagcgccagcgtgagcacccaggtggagcccgaggagcccgaggccgaccagcaccagcagctgcagtaccagcagcccagcatcagcgtgctgagcgacggcaccgtggacagcggccagggcagcagcgtgttcaccgagagcagagtgagcagccagcagaccgtgagctacggcagccagcacgagcaggcccacagcaccggcaccgtgcccggccacatccccagcaccgtgcaggcccagagccagccccacggcgtgtacccccccagcagcgtgccccagagcatggcccacccctgcggcggcacccccacctaccccgagagccagatcttcttccccaccatccacgagagacccgtgagcttcagccccccccccacctgcccccccaaggtggccatcagccagagaagaaagagcaccagcttcctggaggcccagacccaccacttccagcccctgctgagaaccgtgggccagagcctgctgccccccggcggcagccccaccaactggacccccgaggccgtggtgatgctgggcaccaccgccagcagagtgaccggcgagagctgcgagatccaggtgcaccccatgttcgagcccagccaggtgtacagcgactacagacccggcctggtgctgcccgaggaggcccactacttcatcccccaggaggccgtgtacgtggccggcgtgcactaccaggccagagtggccgagcagtacgagggcatcccctacaacagcagcgtgctgagcagccccatgaagcagatccccgagcagaagcccgtgcagggcggccccaccagcagcagcgtgttcgagttccccagcggccaggccttcctggtgggccacctgcagaacctgagactggacagcggcctgggccccggcagccccctgagcagcatcagcgcccccatcagcaccgacgccaccagactgaagttccaccccgtgttcgtgccccacagcgcccccgccgtgctgacccacaacaacgagagcagaagcaactgcgtgttcgagttccacgtgcacacccccagcagcagcagcggcgagggcggcggcatcctgccccagagagtgtacagaaacagacaggtggccgtggacctgaaccaggaggagctgcccccccagagcgtgggcctgcacggctacctgcagcccgtgaccgaggagaagcacaactaccacgcccccgagctgaccgtgagcgtggtggagcccatcggccagaactggcccatcggcagccccgagtacagcagcgacagcagccagatcaccagcagcgaccccagcgacttccagagccccccccccaccggcggcgccgccgcccccttcggcagcgacgtgagcatgcccttcatccacctgccccagaccgtgctgcaggagagccccctgttcttctgcttcccccagggcaccaccagccagcaggtgctgaccgccagcttcagcagcggcggcagcgccctgcacccccaggcccagggccagagccagggccagcccagcagcagcagcctgaccggcgtgagcagcagccagcccatccagcacccccagcagcagcagggcatccagcagaccgcccccccccagcagaccgtgcagtacagcctgagccagaccagcaccagcagcgaggccaccaccgcccagcccgtgagccagccccaggccccccaggtgctgccccaggtgagcgccggcaagcagggcttcccccccagactgcccccccagtaccccggcgacagcaacatcgcccccagcagcaacgtggccagcgtgtgcatccacagcaccgtgctgagcccccccatgcccaccgaggtgctggccacccccggctacttccccaccgtggtgcagccctacgtggagagcaacctgctggtgcccatgggcggcgtgggcggccaggtgcaggtgagccagcccggcggcagcctggcccaggcccccaccaccagcagccagcaggccgtgctggagagcacccagggcgtgagccaggtggcccccgccgagcccgtggccgtggcccagacccaggccacccagcccaccaccctggccagcagcgtggacagcgcccacagcgacgtggccagcggcatgagcgacggcaacgagaacgtgcccagcagcagcggcagacacgagggcagaaccaccaagagacactacagaaagagcgtgagaagcagaagcagacacgagaagaccagcagacccaagctgagaatcctgaacgtgagcaacaagggcgacagagtggtggagtgccagctggagacccacaacagaaagatggtgaccttcaagttcgacctggacggcgacaaccccgaggagatcgccaccatcatggtgaacaacgacttcatcctggccatcgagagagagagcttcgtggaccaggtgagagagatcatcgagaaggccgacgagatgctgagcgaggacgtgagcgtggagcccgagggcgaccagggcctggagagcctgcagggcaaggacgactacggcttcagcggcagccagaagctggagggcgagttcaagcagcccatccccgccagcagcatgccccagcagatcggcatccccaccagcagcctgacccaggtggtgcacagcgccggcagaagattcatcgtgagccccgtgcccgagagcagactgagagagagcaaggtgttccccagcgagatcaccgacaccgtggccgccagcaccgcccagagccccggcatgaacctgagccacagcgccagcagcctgagcctgcagcaggccttcagcgagctgagaagagcccagatgaccgagggccccaacaccgccccccccaacttcagccacaccggccccaccttccccgtggtgccccccttcctgagcagcatcgccggcgtgcccaccaccgccgccgccaccgcccccgtgcccgccaccagcagcccccccaacgacatcagcaccagcgtgatccagagcgaggtgaccgtgcccaccgaggagggcatcgccggcgtggccaccagcaccggcgtggtgaccagcggcggcctgcccatcccccccgtgagcgagagccccgtgctgagcagcgtggtgagcagcatcaccatccccgccgtggtgagcatcagcaccaccagccccagcctgcaggtgcccaccagcaccagcgagatcgtggtgagcagcaccgccctgtaccccagcgtgaccgtgagcgccaccagcgccagcgccggcggcagcaccgccacccccggccccaagccccccgccgtggtgagccagcaggccgccggcagcaccaccgtgggcgccaccctgaccagcgtgagcaccaccaccagcttccccagcaccgccagccagctgtgcatccagctgagcagcagcaccagcacccccaccctggccgagaccgtggtggtgagcgcccacagcctggacaagaccagccacagcagcaccaccggcctggccttcagcctgagcgcccccagcagcagcagcagccccggcgccggcgtgagcagctacatcagccagcccggcggcctgcaccccctggtgatccccagcgtgatcgccagcacccccatcctgccccaggccgccggccccaccagcacccccctgctgccccaggtgcccagcatcccccccctggtgcagcccgtggccaacgtgcccgccgtgcagcagaccctgatccacagccagccccagcccgccctgctgcccaaccagccccacacccactgccccgaggtggacagcgacacccagcccaaggcccccggcatcgacgacatcaagaccctggaggagaagctgagaagcctgttcagcgagcacagcagcagcggcgcccagcacgccagcgtgagcctggagaccagcctggtgatcgagagcaccgtgacccccggcatccccaccaccgccgtggcccccagcaagctgctgaccagcaccaccagcacctgcctgccccccaccaacctgcccctgggcaccgtggccctgcccgtgacccccgtggtgacccccggccaggtgagcacccccgtgagcaccaccaccagcggcgtgaagcccggcaccgcccccagcaagccccccctgaccaaggcccccgtgctgcccgtgggcaccgagctgcccgccggcaccctgcccagcgagcagctgccccccttccccggccccagcctgacccagagccagcagcccctggaggacctggacgcccagctgagaagaaccctgagccccgagatgatcaccgtgaccagcgccgtgggccccgtgagcatggccgcccccaccgccatcaccgaggccggcacccagccccagaagggcgtgagccaggtgaaggagggccccgtgctggccaccagcagcggcgccggcgtgttcaagatgggcagattccaggtgagcgtggccgccgacggcgcccagaaggagggcaagaacaagagcgaggacgccaagagcgtgcacttcgagagcagcaccagcgagagcagcgtgctgagcagcagcagccccgagagcaccctggtgaagcccgagcccaacggcatcaccatccccggcatcagcagcgacgtgcccgagagcgcccacaagaccaccgccagcgaggccaagagcgacaccggccagcccaccaaggtgggcagattccaggtgaccaccaccgccaacaaggtgggcagattcagcgtgagcaagaccgaggacaagatcaccgacaccaagaaggagggccccgtggccagcccccccttcatggacctggagcaggccgtgctgcccgccgtgatccccaagaaggagaagcccgagctgagcgagcccagccacctgaacggccccagcagcgaccccgaggccgccttcctgagcagagacgtggacgacggcagcggcagcccccacagcccccaccagctgagcagcaagagcctgcccagccagaacctgagccagagcctgagcaacagcttcaacagcagctacatgagcagcgacaacgagagcgacatcgaggacgaggacctgaagctggagctgagaagactgagagacaagcacctgaaggagatccaggacctgcagagcagacagaagcacgagatcgagagcctgtacaccaagctgggcaaggtgccccccgccgtgatcatcccccccgccgcccccctgagcggcagaagaagaagacccaccaagagcaagggcagcaagagcagcagaagcagcagcctgggcaacaagagcccccagctgagcggcaacctgagcggccagagcgccgccagcgtgctgcacccccagcagaccctgcacccccccggcaacatccccgagagcggccagaaccagctgctgcagcccctgaagcccagccccagcagcgacaacctgtacagcgccttcaccagcgacggcgccatcagcgtgcccagcctgagcgcccccggccagggcaccagcagcaccaacaccgtgggcgccaccgtgaacagccaggccgcccaggcccagccccccgccatgaccagcagcagaaagggcaccttcaccgacgacctgcacaagctggtggacaactgggccagagacgccatgaacctgagcggcagaagaggcagcaagggccacatgaactacgagggccccggcatggccagaaagttcagcgcccccggccagctgtgcatcagcatgaccagcaacctgggcggcagcgcccccatcagcgccgccagcgccaccagcctgggccacttcaccaagagcatgtgccccccccagcagtacggcttccccgccacccccttcggcgcccagtggagcggcaccggcggccccgccccccagcccctgggccagttccagcccgtgggcaccgccagcctgcagaacttcaacatcagcaacctgcagaagagcatcagcaacccccccggcagcaacctgagaaccacctag

SEQ ID NO: 105309 - DNA, 6894 bp, synthetic construct
  misc_feature 1..6894: note = Description of Artificial Sequence: Synthetic coding sequence
  source 1..6894: mol_type = other DNA
atggacggcgacggcggcagaagagacgtgcccggcaccctgatggagcccggcagaggcgccggccccgccggcatggccgagcccagagccaaggccgccagacccggcccccagagattcctgagaagaagcgtggtggagagcgaccaggaggagccccccggcctggaggccgccgaggcccccggcccccagcccccccagcccctgcagagaagagtgctgctgctgtgcaagaccagaagactgatcgccgagagagccagaggcagacccgccgcccccgcccccgccgccctggtggcccagcccggcgcccccggcgcccccgccgacgccggccccgagcccgtgggcacccaggagcccggccccgaccccatcgccgccgccgtggagaccgcccccgcccccgacggcggccccagagaggaggccgccgccaccgtgagaaaggaggacgagggcgccgccgaggccaagcccgagcccggcagaaccagaagagacgagcccgaggaggaggaggacgacgaggacgacctgaaggccgtggccaccagcctggacggcagattcctgaagttcgacatcgagctgggcagaggcagcttcaagaccgtgtacaagggcctggacaccgagacctgggtggaggtggcctggtgcgagctgcaggacagaaagctgaccaagctggagagacagagattcaaggaggaggccgagatgctgaagggcctgcagcaccccaacatcgtgagattctacgacttctgggagagcagcgccaagggcaagagatgcatcgtgctggtgaccgagctgatgaccagcggcaccctgaagacctacctgaagagattcaaggtgatgaagcccaaggtgctgagaagctggtgcagacagatcctgaagggcctgctgttcctgcacaccagaaccccccccatcatccacagagacctgaagtgcgacaacatcttcatcaccggccccaccggcagcgtgaagatcggcgacctgggcctggccaccctgaagagagccagcttcgccaagagcgtgatcggcacccccgagttcatggcccccgagatgtacgaggagcactacgacgagagcgtggacgtgtacgccttcggcatgtgcatgctggagatggccaccagcgagtacccctacagcgagtgccagaacgccgcccagatctacagaaaggtgacctgcggcatcaagcccgccagcttcgagaaggtgcacgaccccgagatcaaggagatcatcggcgagtgcatctgcaagaacaaggaggagagatacgagatcaaggacctgctgagccacgccttcttcgccgaggacaccggcgtgagagtggagctggccgaggaggaccacggcagaaagagcaccatcgccctgagactgtgggtggaggaccccaagaagctgaagggcaagcccaaggacaacggcgccatcgagttcaccttcgacctggagaaggagacccccgacgaggtggcccaggagatgatcgagagcggcttcttccacgagagcgacgtgaagatcgtggccaagagcatcagagacagagtggccctgatccagtggagaagagagagaatctggcccgccctgcagcccaaggagcagcaggacgtgggcagccccgacaaggccagaggcccccccgtgcccctgcaggtgcaggtgacctaccacgcccaggccggccagcccggcccccccgagcccgaggagcccgaggccgaccagcacctgctgccccccaccctgcccaccagcgccaccagcctggccagcgacagcaccttcgacagcggccagggcagcaccgtgtacagcgacagccagagcagccagcagagcgtgatgctgggcagcctggccgacgccgcccccagccccgcccagtgcgtgtgcagcccccccgtgagcgagggccccgtgctgccccagagcctgcccagcctgggcgcctaccagcagcccaccgccgcccccggcctgcccgtgggcagcgtgcccgcccccgcctgcccccccagcctgcagcagcacttccccgaccccgccatgagcttcgcccccgtgctgcccccccccagcacccccatgcccaccggccccggccagcccgccccccccggccagcagcccccccccctggcccagcccacccccctgccccaggtgctggccccccagcccgtggtgcccctgcagcccgtgcccccccacctgcccccctacctggcccccgccagccaggtgggcgcccccgcccagctgaagcccctgcagatgccccaggcccccctgcagcccctggcccaggtgcccccccagatgccccccatccccgtggtgccccccatcacccccctggccggcatcgacggcctgccccccgccctgcccgacctgcccaccgccaccgtgccccccgtgccccccccccagtacttcagccccgccgtgatcctgcccagcctggccgcccccctgccccccgccagccccgccctgcccctgcaggccgtgaagctgccccacccccccggcgcccccctggccatgccctgcagaaccatcgtgcccaacgcccccgccaccatccccctgctggccgtggccccccccggcgtggccgccctgagcatccacagcgccgtggcccagctgcccggccagcccgtgtaccccgccgccttcccccagatggcccccaccgacgtgccccccagcccccaccacaccgtgcagaacatgagagccacccccccccagcccgccctgcccccccagcccaccctgcccccccagcccgtgctgcccccccagcccaccctgcccccccagcccgtgctgcccccccagcccaccagacccccccagcccgtgctgcccccccagcccatgctgcccccccagcccgtgctgcccccccagcccgccctgcccgtgagacccgagcccctgcagccccacctgcccgagcaggccgcccccgccgccacccccggcagccagatcctgctgggccaccccgccccctacgccgtggacgtggccgcccaggtgcccaccgtgcccgtgccccccgccgccgtgctgagcccccccctgcccgaggtgctgctgcccgccgcccccgagctgctgccccagttccccagcagcctggccaccgtgagcgccagcgtgcagagcgtgcccacccagaccgccaccctgctgccccccgccaacccccccctgcccggcggccccggcatcgccagcccctgccccaccgtgcagctgaccgtggagcccgtgcaggaggagcaggccagccaggacaagccccccggcctgccccagagctgcgagagctacggcggcagcgacgtgaccagcggcaaggagctgagcgacagctgcgagggcgccttcggcggcggcagactggagggcagagccgccagaaagcaccacagaagaagcaccagagccagaagcagacaggagagagccagcagacccagactgaccatcctgaacgtgtgcaacaccggcgacaagatggtggagtgccagctggagacccacaaccacaagatggtgaccttcaagttcgacctggacggcgacgcccccgacgagatcgccacctacatggtggagcacgacttcatcctgcaggccgagagagagaccttcatcgagcagatgaaggacgtgatggacaaggccgaggacatgctgagcgaggacaccgacgccgacagaggcagcgaccccggcaccagccccccccacctgagcacctgcggcctgggcaccggcgaggagagcagacagagccaggccaacgcccccgtgtaccagcagaacgtgctgcacaccggcaagagatggttcatcatctgccccgtggccgagcaccccgcccccgaggcccccgagagcagcccccccctgcccctgagcagcctgccccccgaggccagccagggcccctgcagaggcctgaccctgccctgcctgccctggagaagagccgcctgcggcgccgtgttcctgagcctgttcagcgccgagagcgcccagagcaagcagccccccgacagcgccccctacaaggaccagctgagcagcaaggagcagcccagcttcctggccagccagcagctgctgagccaggccggccccagcaacccccccggcgccccccccgcccccctggcccccagcagcccccccgtgaccgccctgccccaggacggcgccgcccccgccaccagcaccatgcccgagcccgccagcggcaccgccagccaggccggcggccccggcaccccccagggcctgaccagcgagctggagaccagccagcccctggccgagacccacgaggcccccctggccgtgcagcccctggtggtgggcctggccccctgcacccccgcccccgaggccgccagcaccagagacgccagcgcccccagagagcccctgcccccccccgcccccgagcccagcccccacagcggcaccccccagcccgccctgggccagcccgcccccctgctgcccgccgccgtgggcgccgtgagcctggccaccagccagctgcccagcccccccctgggccccaccgtgcccccccagccccccagcgccctggagagcgacggcgagggccccccccccagagtgggcttcgtggacagcaccatcaagagcctggacgagaagctgagaaccctgctgtaccaggagcacgtgcccaccagcagcgccagcgccggcacccccgtggaggtgggcgacagagacttcaccctggagcccctgagaggcgaccagcccagaagcgaggtgtgcggcggcgacctggccctgccccccgtgcccaaggaggccgtgagcggcagagtgcagctgccccagcccctggtggagaagagcgagctggcccccaccagaggcgccgtgatggagcagggcaccagcagcagcatgaccgccgagagcagccccagaagcatgctgggctacgacagagacggcagacaggtggccagcgacagccacgtggtgcccagcgtgccccaggacgtgcccgccttcgtgagacccgccagagtggagcccaccgacagagacggcggcgaggccggcgagagcagcgccgagcccccccccagcgacatgggcaccgtgggcggccaggccagccacccccagaccctgggcgccagagccctgggcagccccagaaagagacccgagcagcaggacgtgagcagccccgccaagaccgtgggcagattcagcgtggtgagcacccaggacgagtggaccctggccagcccccacagcctgagatacagcgccccccccgacgtgtacctggacgaggcccccagcagccccgacgtgaagctggccgtgagaagagcccagaccgccagcagcatcgaggtgggcgtgggcgagcccgtgagcagcgacagcggcgacgagggccccagagccagaccccccgtgcagaagcaggccagcctgcccgtgagcggcagcgtggccggcgacttcgtgaagaaggccaccgccttcctgcagagacccagcagagccggcagcctgggccccgagacccccagcagagtgggcatgaaggtgcccaccatcagcgtgaccagcttccacagccagagcagctacatcagcagcgacaacgacagcgagctggaggacgccgacatcaagaaggagctgcagagcctgagagagaagcacctgaaggagatcagcgagctgcagagccagcagaagcaggagatcgaggccctgtacagaagactgggcaagcccctgccccccaacgtgggcttcttccacaccgccccccccaccggcagaagaagaaagaccagcaagagcaagctgaaggccggcaagctgctgaaccccctggtgagacagctgaaggtggtggccagcagcaccggccacctggccgacagcagcagaggcccccccgccaaggaccccgcccaggccagcgtgggcctgaccgccgacagcaccggcctgagcggcaaggccgtgcagacccagcagccctgcagcgtgagagccagcctgagcagcgacatctgcagcggcctggccagcgacggcggcggcgccagaggccagggctggaccgtgtaccaccccaccagcgagagagtgacctacaagagcagcagcaagcccagagccagattcctgagcggccccgtgagcgtgagcatctggagcgccctgaagagactgtgcctgggcaaggagcacagcagcagaagcagcaccagcagcctggcccccggccccgagcccggcccccagcccgccctgcacgtgcaggcccaggtgaacaacagcaacaacaagaagggcaccttcaccgacgacctgcacaagctggtggacgagtggaccagcaagaccgtgggcgccgcccagctgaagcccaccctgaaccagctgaagcagacccagaagctgcaggacatggaggcccaggccggctgggccgcccccggcgaggccagagccatgaccgcccccagagccggcgtgggcatgcccagactgccccccgcccccggccccctgagcaccaccgtgatccccggcgccgcccccaccctgagcgtgcccacccccgacggcgccctgggcaccgccagaagaaaccaggtgtggttcggcctgagagtgccccccaccgcctgctgcggccacagcacccagcccagaggcggccagagagtgggcagcaagaccgccagcttcgccgccagcgaccccgtgagaagctag

SEQ ID NO: 105310 - DNA, 5601 bp, synthetic construct
  misc_feature 1..5601: note = Description of Artificial Sequence: Synthetic coding sequence
  source 1..5601: mol_type = other DNA
atggccaccagcgagtacccctacagcgagtgccagaacgccgcccagatctacagaaaggtgacctgcggcatcaagcccgccagcttcgagaaggtgcacgaccccgagatcaaggagatcatcggcgagtgcatctgcaagaacaaggaggagagatacgagatcaaggacctgctgagccacgccttcttcgccgaggacaccggcgtgagagtggagctggccgaggaggaccacggcagaaagagcaccatcgccctgagactgtgggtggaggaccccaagaagctgaagggcaagcccaaggacaacggcgccatcgagttcaccttcgacctggagaaggagacccccgacgaggtggcccaggagatgatcgagagcggcttcttccacgagagcgacgtgaagatcgtggccaagagcatcagagacagagtggccctgatccagtggagaagagagagaatctggcccgccctgcagcccaaggagcagcaggacgtgggcagccccgacaaggccagaggcccccccgtgcccctgcaggtgcaggtgacctaccacgcccaggccggccagcccggcccccccgagcccgaggagcccgaggccgaccagcacctgctgccccccaccctgcccaccagcgccaccagcctggccagcgacagcaccttcgacagcggccagggcagcaccgtgtacagcgacagccagagcagccagcagagcgtgatgctgggcagcctggccgacgccgcccccagccccgcccagtgcgtgtgcagcccccccgtgagcgagggccccgtgctgccccagagcctgcccagcctgggcgcctaccagcagcccaccgccgcccccggcctgcccgtgggcagcgtgcccgcccccgcctgcccccccagcctgcagcagcacttccccgaccccgccatgagcttcgcccccgtgctgcccccccccagcacccccatgcccaccggccccggccagcccgccccccccggccagcagcccccccccctggcccagcccacccccctgccccaggtgctggccccccagcccgtggtgcccctgcagcccgtgcccccccacctgcccccctacctggcccccgccagccaggtgggcgcccccgcccagctgaagcccctgcagatgccccaggcccccctgcagcccctggcccaggtgcccccccagatgccccccatccccgtggtgccccccatcacccccctggccggcatcgacggcctgccccccgccctgcccgacctgcccaccgccaccgtgccccccgtgccccccccccagtacttcagccccgccgtgatcctgcccagcctggccgcccccctgccccccgccagccccgccctgcccctgcaggccgtgaagctgccccacccccccggcgcccccctggccatgccctgcagaaccatcgtgcccaacgcccccgccaccatccccctgctggccgtggccccccccggcgtggccgccctgagcatccacagcgccgtggcccagctgcccggccagcccgtgtaccccgccgccttcccccagatggcccccaccgacgtgccccccagcccccaccacaccgtgcagaacatgagagccacccccccccagcccgccctgcccccccagcccaccctgcccccccagcccgtgctgcccccccagcccaccctgcccccccagcccgtgctgcccccccagcccaccagacccccccagcccgtgctgcccccccagcccatgctgcccccccagcccgtgctgcccccccagcccgccctgcccgtgagacccgagcccctgcagccccacctgcccgagcaggccgcccccgccgccacccccggcagccagatcctgctgggccaccccgccccctacgccgtggacgtggccgcccaggtgcccaccgtgcccgtgccccccgccgccgtgctgagcccccccctgcccgaggtgctgctgcccgccgcccccgagctgctgccccagttccccagcagcctggccaccgtgagcgccagcgtgcagagcgtgcccacccagaccgccaccctgctgccccccgccaacccccccctgcccggcggccccggcatcgccagcccctgccccaccgtgcagctgaccgtggagcccgtgcaggaggagcaggccagccaggacaagccccccggcctgccccagagctgcgagagctacggcggcagcgacgtgaccagcggcaaggagctgagcgacagctgcgagggcgccttcggcggcggcagactggagggcagagccgccagaaagcaccacagaagaagcaccagagccagaagcagacaggagagagccagcagacccagactgaccatcctgaacgtgtgcaacaccggcgacaagatggtggagtgccagctggagacccacaaccacaagatggtgaccttcaagttcgacctggacggcgacgcccccgacgagatcgccacctacatggtggagcacgacttcatcctgcaggccgagagagagaccttcatcgagcagatgaaggacgtgatggacaaggccgaggacatgctgagcgaggacaccgacgccgacagaggcagcgaccccggcaccagccccccccacctgagcacctgcggcctgggcaccggcgaggagagcagacagagccaggccaacgcccccgtgtaccagcagaacgtgctgcacaccggcaagagatggttcatcatctgccccgtggccgagcaccccgcccccgaggcccccgagagcagcccccccctgcccctgagcagcctgccccccgaggccagccagggcccctgcagaggcctgaccctgccctgcctgccctggagaagagccgcctgcggcgccgtgttcctgagcctgttcagcgccgagagcgcccagagcaagcagccccccgacagcgccccctacaaggaccagctgagcagcaaggagcagcccagcttcctggccagccagcagctgctgagccaggccggccccagcaacccccccggcgccccccccgcccccctggcccccagcagcccccccgtgaccgccctgccccaggacggcgccgcccccgccaccagcaccatgcccgagcccgccagcggcaccgccagccaggccggcggccccggcaccccccagggcctgaccagcgagctggagaccagccagcccctggccgagacccacgaggcccccctggccgtgcagcccctggtggtgggcctggccccctgcacccccgcccccgaggccgccagcaccagagacgccagcgcccccagagagcccctgcccccccccgcccccgagcccagcccccacagcggcaccccccagcccgccctgggccagcccgcccccctgctgcccgccgccgtgggcgccgtgagcctggccaccagccagctgcccagcccccccctgggccccaccgtgcccccccagccccccagcgccctggagagcgacggcgagggccccccccccagagtgggcttcgtggacagcaccatcaagagcctggacgagaagctgagaaccctgctgtaccaggagcacgtgcccaccagcagcgccagcgccggcacccccgtggaggtgggcgacagagacttcaccctggagcccctgagaggcgaccagcccagaagcgaggtgtgcggcggcgacctggccctgccccccgtgcccaaggaggccgtgagcggcagagtgcagctgccccagcccctggtggagaagagcgagctggcccccaccagaggcgccgtgatggagcagggcaccagcagcagcatgaccgccgagagcagccccagaagcatgctgggctacgacagagacggcagacaggtggccagcgacagccacgtggtgcccagcgtgccccaggacgtgcccgccttcgtgagacccgccagagtggagcccaccgacagagacggcggcgaggccggcgagagcagcgccgagcccccccccagcgacatgggcaccgtgggcggccaggccagccacccccagaccctgggcgccagagccctgggcagccccagaaagagacccgagcagcaggacgtgagcagccccgccaagaccgtgggcagattcagcgtggtgagcacccaggacgagtggaccctggccagcccccacagcctgagatacagcgccccccccgacgtgtacctggacgaggcccccagcagccccgacgtgaagctggccgtgagaagagcccagaccgccagcagcatcgaggtgggcgtgggcgagcccgtgagcagcgacagcggcgacgagggccccagagccagaccccccgtgcagaagcaggccagcctgcccgtgagcggcagcgtggccggcgacttcgtgaagaaggccaccgccttcctgcagagacccagcagagccggcagcctgggccccgagacccccagcagagtgggcatgaaggtgcccaccatcagcgtgaccagcttccacagccagagcagctacatcagcagcgacaacgacagcgagctggaggacgccgacatcaagaaggagctgcagagcctgagagagaagcacctgaaggagatcagcgagctgcagagccagcagaagcaggagatcgaggccctgtacagaagactgggcaagcccctgccccccaacgtgggcttcttccacaccgccccccccaccggcagaagaagaaagaccagcaagagcaagctgaaggccggcaagctgctgaaccccctggtgagacagctgaaggtggtggccagcagcaccggccacctggccgacagcagcagaggcccccccgccaaggaccccgcccaggccagcgtgggcctgaccgccgacagcaccggcctgagcggcaaggccgtgcagacccagcagccctgcagcgtgagagccagcctgagcagcgacatctgcagcggcctggccagcgacggcggcggcgccagaggccagggctggaccgtgtaccaccccaccagcgagagagtgacctacaagagcagcagcaagcccagagccagattcctgagcggccccgtgagcgtgagcatctggagcgccctgaagagactgtgcctgggcaaggagcacagcagcagaagcagcaccagcagcctggcccccggccccgagcccggcccccagcccgccctgcacgtgcaggcccaggtgaacaacagcaacaacaagaagggcaccttcaccgacgacctgcacaagctggtggacgagtggaccagcaagaccgtgggcgccgcccagctgaagcccaccctgaaccagctgaagcagacccagaagctgcaggacatggaggcccaggccggctgggccgcccccggcgaggccagagccatgaccgcccccagagccggcgtgggcatgcccagactgccccccgcccccggccccctgagcaccaccgtgatccccggcgccgcccccaccctgagcgtgcccacccccgaccccgagagcgagaagcccgactag

SEQ ID NO: 105311 - DNA, 1092 bp, synthetic construct
  misc_feature 1..1092: note = Description of Artificial Sequence: Synthetic coding sequence
  source 1..1092: mol_type = other DNA
atggagcagggcaccagcagcagcatgaccgagagcagccccagaagcatgctgggctacgacagagacggcagacaggtggccagcgacagccacgtggtgcccagcgtgccccaggacgtgcccgccttcgtgagacccgccagagtggagcccaccgacagagacggcggcgaggccggcgagagcagcgccgagcccccccccagcgacatgggcaccgtgggcggccaggccagccacccccagaccctgggcgccagagccctgggcagccccagaaagagacccgagcagcaggacgtgagcagccccgccaagaccgtgggcagattcagcgtggtgagcacccaggacgagtggaccctggccagcccccacagcctgagatacagcgccccccccgacgtgtacctggacgaggcccccagcagccccgacgtgaagctggccgtgagaagagcccagaccgccagcagcatcgaggtgggcgtgggcgagcccgtgagcagcgacagcggcgacgagggccccagagccagaccccccgtgcagaagcaggccagcctgcccgtgagcggcagcgtggccggcgacttcgtgaagaaggccaccagctgcagaggcctgctgggccccagcctgggccccgagacccccagcagagtgggcatgaaggtgcccaccatcagcgtgaccagcttccacagccagagcagctacatcagcagcgacaacgacagcgagctggaggacgccgacatcaagaaggagctgcagagcctgagagagaagcacctgaaggagatcagcgagctgcagagccagcagaagcaggagatcgaggccctgtacagaagactgggcaagcccctgccccccaacgtgggcttcttccacaccgccccccccaccggcagaagaagaaagaccagcaagagcaagctgaaggccggcaagctgctgaaccccctggtgagacagctgaaggtggtggccagcagcaccggccacctggccgacagcagcagaggcccccccgccaaggaccccaagcccgtgtggggcagcctgcagaccgccagagcctag

SEQ ID NO: 105312 - DNA, 2340 bp, synthetic construct
  misc_feature 1..2340: note = Description of Artificial Sequence: Synthetic coding sequence
  source 1..2340: mol_type = other DNA
atggagcccggcagaggcgccggccccgccggcatggccgagcccagagccaaggccgccagacccggcccccagagattcctgagaagaagcgtggtggagagcgaccaggaggagccccccggcctggaggccgccgaggcccccggcccccagcccccccagcccctgcagagaagagtgctgctgctgtgcaagaccagaagactgatcgccgagagagccagaggcagacccgccgcccccgcccccgccgccctggtggcccagcccggcgcccccggcgcccccgccgacgccggccccgagcccgtgggcacccaggagcccggccccgaccccatcgccgccgccgtggagaccgcccccgcccccgacggcggccccagagaggaggccgccgccaccgtgagaaaggaggacgagggcgccgccgaggccaagcccgagcccggcagaaccagaagagacgagcccgaggaggaggaggacgacgaggacgacctgaaggccgtggccaccagcctggacggcagattcctgaagttcgacatcgagctgggcagaggcagcttcaagaccgtgtacaagggcctggacaccgagacctgggtggaggtggcctggtgcgagctgcaggacagaaagctgaccaagctggagagacagagattcaaggaggaggccgagatgctgaagggcctgcagcaccccaacatcgtgagattctacgacttctgggagagcagcgccaagggcaagagatgcatcgtgctggtgaccgagctgatgaccagcggcaccctgaagacctacctgaagagattcaaggtgatgaagcccaaggtgctgagaagctggtgcagacagatcctgaagggcctgctgttcctgcacaccagaaccccccccatcatccacagagacctgaagtgcgacaacatcttcatcaccggccccaccggcagcgtgaagatcggcgacctgggcctggccaccctgaagagagccagcttcgccaagagcgtgatcggcacccccgagttcatggcccccgagatgtacgaggagcactacgacgagagcgtggacgtgtacgccttcggcatgtgcatgctggagatggccaccagcgagtacccctacagcgagtgccagaacgccgcccagatctacagaaaggtgacctgcggcatcaagcccgccagcttcgagaaggtgcacgaccccgagatcaaggagatcatcggcgagtgcatctgcaagaacaaggaggagagatacgagatcaaggacctgctgagccacgccttcttcgccgaggacaccggcgtgagagtggagctggccgaggaggaccacggcagaaagagcaccatcgccctgagactgtgggtggaggaccccaagaagctgaagggcaagcccaaggacaacggcgccatcgagttcaccttcgacctggagaaggagacccccgacgaggtggcccaggagatgatcgagagcggcttcttccacgagagcgacgtgaagatcgtggccaagagcatcagagacagagtggccctgatccagtggagaagagagagaatctggcccgccctgcagcccaaggagcagcaggacgtgggcagccccgacaaggccagaggcccccccgtgcccctgcaggtgcaggtgacctaccacgcccaggccggccagcccggcccccccgagcccgaggagcccgaggccgaccagcacctgctgccccccaccctgcccaccagcgccaccagcctggccagcgacagcaccttcgacagcggccagggcagcaccgtgtacagcgacagccagagcagccagcagagcgtgatgctgggcagcctggccgacgccgcccccagccccgcccagtgcgtgtgcagcccccccgtgagcgagggccccgtgctgccccagagcctgcccagcctgggcgcctaccagcagcccaccgccgcccccccccccctggcccagcccacccccctgccccaggtgctggccccccagcccgtggtgcccctgcagcccgtgcccccccacctgcccccctacctggcccccgccagccaggtgggcgcccccgcccagctgaagcccctgcagatgccccaggcccccctgcagcccctggcccaggtgcccccccagatgccccccatccccgtggtgccccccatcacccccctggccggcatcgacggcctgccccccgccctgcccgacctgcccaccgccaccgtgccccccgtgccccccccccagtacttcagccccgccgtgatcctgcccagcctggccgcctag

SEQ ID NO: 105313 - DNA, 6654 bp, synthetic construct
  misc_feature 1..6654: note = Description of Artificial Sequence: Synthetic coding sequence
  source 1..6654: mol_type = other DNA
atggacggcgacggcggcagaagagacgtgcccggcaccctgatggagcccggcagaggcgccggccccgccggcatggccgagcccagagccaaggccgccagacccggcccccagagattcctgagaagaagcgtggtggagagcgaccaggaggagccccccggcctggaggccgccgaggcccccggcccccagcccccccagcccctgcagagaagagtgctgctgctgtgcaagaccagaagactgatcgccgagagagccagaggcagacccgccgcccccgcccccgccgccctggtggcccagcccggcgcccccggcgcccccgccgacgccggccccgagcccgtgggcacccaggagcccggccccgaccccatcgccgccgccgtggagaccgcccccgcccccgacggcggccccagagaggaggccgccgccaccgtgagaaaggaggacgagggcgccgccgaggccaagcccgagcccggcagaaccagaagagacgagcccgaggaggaggaggacgacgaggacgacctgaaggccgtggccaccagcctggacggcagattcctgaagttcgacatcgagctgggcagaggcagcttcaagaccgtgtacaagggcctggacaccgagacctgggtggaggtggcctggtgcgagctgcaggacagaaagctgaccaagctggagagacagagattcaaggaggaggccgagatgctgaagggcctgcagcaccccaacatcgtgagattctacgacttctgggagagcagcgccaagggcaagagatgcatcgtgctggtgaccgagctgatgaccagcggcaccctgaagacctacctgaagagattcaaggtgatgaagcccaaggtgctgagaagctggtgcagacagatcctgaagggcctgctgttcctgcacaccagaaccccccccatcatccacagagacctgaagtgcgacaacatcttcatcaccggccccaccggcagcgtgaagatcggcgacctgggcctggccaccctgaagagagccagcttcgccaagagcgtgatcggcacccccgagttcatggcccccgagatgtacgaggagcactacgacgagagcgtggacgtgtacgccttcggcatgtgcatgctggagatggccaccagcgagtacccctacagcgagtgccagaacgccgcccagatctacagaaaggtgacctgcggcatcaagcccgccagcttcgagaaggtgcacgaccccgagatcaaggagatcatcggcgagtgcatctgcaagaacaaggaggagagatacgagatcaaggacctgctgagccacgccttcttcgccgaggacaccggcgtgagagtggagctggccgaggaggaccacggcagaaagagcaccatcgccctgagactgtgggtggaggaccccaagaagctgaagggcaagcccaaggacaacggcgccatcgagttcaccttcgacctggagaaggagacccccgacgaggtggcccaggagatgatcgagagcggcttcttccacgagagcgacgtgaagatcgtggccaagagcatcagagacagagtggccctgatccagtggagaagagagagaatctggcccgccctgcagcccaaggagcagcaggacgtgggcagccccgacaaggccagaggcccccccgtgcccctgcaggtgcaggtgacctaccacgcccaggccggccagcccggcccccccgagcccgaggagcccgaggccgaccagcacctgctgccccccaccctgcccaccagcgccaccagcctggccagcgacagcaccttcgacagcggccagggcagcaccgtgtacagcgacagccagagcagccagcagagcgtgatgctgggcagcctggccgacgccgcccccagccccgcccagtgcgtgtgcagcccccccgtgagcgagggccccgtgctgccccagagcctgcccagcctgggcgcctaccagcagcccaccgccgcccccggcctgcccgtgggcagcgtgcccgcccccgcctgcccccccagcctgcagcagcacttccccgaccccgccatgagcttcgcccccgtgctgcccccccccagcacccccatgcccaccggccccggccagcccgccccccccggccagcagcccccccccctggcccagcccacccccctgccccaggtgctggccccccagcccgtggtgcccctgcagcccgtgcccccccacctgcccccctacctggcccccgccagccaggtgggcgcccccgcccagctgaagcccctgcagatgccccaggcccccctgcagcccctggcccaggtgcccccccagatgccccccatccccgtggtgccccccatcacccccctggccggcatcgacggcctgccccccgccctgcccgacctgcccaccgccaccgtgccccccgtgccccccccccagtacttcagccccgccgtgatcctgcccagcctggccgcccccctgccccccgccagccccgccctgcccctgcaggccgtgaagctgccccacccccccggcgcccccctggccatgccctgcagaaccatcgtgcccaacgcccccgccaccatccccctgctggccgtggccccccccggcgtggccgccctgagcatccacagcgccgtggcccagctgcccggccagcccgtgtaccccgccgccttcccccagatggcccccaccgacgtgccccccagcccccaccacaccgtgcagaacatgagagccacccccccccagcccgccctgcccccccagcccaccctgcccccccagcccgtgctgcccccccagcccaccctgcccccccagcccgtgctgcccccccagcccaccagacccccccagcccgtgctgcccccccagcccatgctgcccccccagcccgtgctgcccccccagcccgccctgcccgtgagacccgagcccctgcagccccacctgcccgagcaggccgcccccgccgccacccccggcagccagatcctgctgggccaccccgccccctacgccgtggacgtggccgcccaggtgcccaccgtgcccgtgccccccgccgccgtgctgagcccccccctgcccgaggtgctgctgcccgccgcccccgagctgctgccccagttccccagcagcctggccaccgtgagcgccagcgtgcagagcgtgcccacccagaccgccaccctgctgccccccgccaacccccccctgcccggcggccccggcatcgccagcccctgccccaccgtgcagctgaccgtggagcccgtgcaggaggagcaggccagccaggacaagccccccggcctgccccagagctgcgagagctacggcggcagcgacgtgaccagcggcaaggagctgagcgacagctgcgagggcgccttcggcggcggcagactggagggcagagccgccagaaagcaccacagaagaagcaccagagccagaagcagacaggagagagccagcagacccagactgaccatcctgaacgtgtgcaacaccggcgacaagatggtggagtgccagctggagacccacaaccacaagatggtgaccttcaagttcgacctggacggcgacgcccccgacgagatcgccacctacatggtggagcacgacttcatcctgcaggccgagagagagaccttcatcgagcagatgaaggacgtgatggacaaggccgaggacatgctgagcgaggacaccgacgccgacagaggcagcgaccccggcaccagccccccccacctgagcacctgcggcctgggcaccggcgaggagagcagacagagccaggccaacgcccccgtgtaccagcagaacgtgctgcacaccggcaagagatggttcatcatctgccccgtggccgagcaccccgcccccgaggcccccgagagcagcccccccctgcccctgagcagcctgccccccgaggccagccaggacagcgccccctacaaggaccagctgagcagcaaggagcagcccagcttcctggccagccagcagctgctgagccaggccggccccagcaacccccccggcgccccccccgcccccctggcccccagcagcccccccgtgaccgccctgccccaggacggcgccgcccccgccaccagcaccatgcccgagcccgccagcggcaccgccagccaggccggcggccccggcaccccccagggcctgaccagcgagctggagaccagccagcccctggccgagacccacgaggcccccctggccgtgcagcccctggtggtgggcctggccccctgcacccccgcccccgaggccgccagcaccagagacgccagcgcccccagagagcccctgcccccccccgcccccgagcccagcccccacagcggcaccccccagcccgccctgggccagcccgcccccctgctgcccgccgccgtgggcgccgtgagcctggccaccagccagctgcccagcccccccctgggccccaccgtgcccccccagccccccagcgccctggagagcgacggcgagggccccccccccagagtgggcttcgtggacagcaccatcaagagcctggacgagaagctgagaaccctgctgtaccaggagcacgtgcccaccagcagcgccagcgccggcacccccgtggaggtgggcgacagagacttcaccctggagcccctgagaggcgaccagcccagaagcgaggtgtgcggcggcgacctggccctgccccccgtgcccaaggaggccgtgagcggcagagtgcagctgccccagcccctggtggagaagagcgagctggcccccaccagaggcgccgtgatggagcagggcaccagcagcagcatgaccgccgagagcagccccagaagcatgctgggctacgacagagacggcagacaggtggccagcgacagccacgtggtgcccagcgtgccccaggacgtgcccgccttcgtgagacccgccagagtggagcccaccgacagagacggcggcgaggccggcgagagcagcgccgagcccccccccagcgacatgggcaccgtgggcggccaggccagccacccccagaccctgggcgccagagccctgggcagccccagaaagagacccgagcagcaggacgtgagcagccccgccaagaccgtgggcagattcagcgtggtgagcacccaggacgagtggaccctggccagcccccacagcctgagatacagcgccccccccgacgtgtacctggacgaggcccccagcagccccgacgtgaagctggccgtgagaagagcccagaccgccagcagcatcgaggtgggcgtgggcgagcccgtgagcagcgacagcggcgacgagggccccagagccagaccccccgtgcagaagcaggccagcctgcccgtgagcggcagcgtggccggcgacttcgtgaagaaggccaccgccttcctgcagagacccagcagagccggcagcctgggccccgagacccccagcagagtgggcatgaaggtgcccaccatcagcgtgaccagcttccacagccagagcagctacatcagcagcgacaacgacagcgagctggaggacgccgacatcaagaaggagctgcagagcctgagagagaagcacctgaaggagatcagcgagctgcagagccagcagaagcaggagatcgaggccctgtacagaagactgggcaagcccctgccccccaacgtgggcttcttccacaccgccccccccaccggcagaagaagaaagaccagcaagagcaagctgaaggccggcaagctgctgaaccccctggtgagacagctgaaggtggtggccagcagcaccggccacctggccgacagcagcagaggcccccccgccaaggaccccgcccaggccagcgtgggcctgaccgccgacagcaccggcctgagcggcaaggccgtgcagacccagcagccctgcagcgtgagagccagcctgagcagcgacatctgcagcggcctggccagcgacggcggcggcgccagaggccagggctggaccgtgtaccaccccaccagcgagagagtgacctacaagagcagcagcaagcccagagccagattcctgagcggccccgtgagcgtgagcatctggagcgccctgaagagactgtgcctgggcaaggagcacagcagcagaagcagcaccagcagcctggcccccggccccgagcccggcccccagcccgccctgcacgtgcaggcccaggtgaacaacagcaacaacaagaagggcaccttcaccgacgacctgcacaagctggtggacgagtggaccagcaagaccgtgggcgccgcccagctgaagcccaccctgaaccagctgaagcagacccagaagctgcaggacatggaggcccaggccggctgggccgcccccggcgaggccagagccatgaccgcccccagagccggcgtgggcatgcccagactgccccccgcccccggccccctgagcaccaccgtgatccccggcgccgcccccaccctgagcgtgcccacccccgaccccgagagcgagaagcccgactag

SEQ ID NO: 105314 - DNA, 5511 bp, synthetic construct
  misc_feature 1..5511: note = Description of Artificial Sequence: Synthetic coding sequence
  source 1..5511: mol_type = other DNA
atggccaccagcgagtacccctacagcgagtgccagaacgccgcccagatctacagaaaggtgacctgcggcatcaagcccgccagcttcgagaaggtgcacgaccccgagatcaaggagatcatcggcgagtgcatctgcaagaacaaggaggagagatacgagatcaaggacctgctgagccacgccttcttcgccgaggacaccggcgtgagagtggagctggccgaggaggaccacggcagaaagagcaccatcgccctgagactgtgggtggaggaccccaagaagctgaagggcaagcccaaggacaacggcgccatcgagttcaccttcgacctggagaaggagacccccgacgaggtggcccaggagatgatcgagagcggcttcttccacgagagcgacgtgaagatcgtggccaagagcatcagagacagagtggccctgatccagtggagaagagagagaatctggcccgccctgcagcccaaggagcagcaggacgtgggcagccccgacaaggccagaggcccccccgtgcccctgcaggtgcaggtgacctaccacgcccaggccggccagcccggcccccccgagcccgaggagcccgaggccgaccagcacctgctgccccccaccctgcccaccagcgccaccagcctggccagcgacagcaccttcgacagcggccagggcagcaccgtgtacagcgacagccagagcagccagcagagcgtgatgctgggcagcctggccgacgccgcccccagccccgcccagtgcgtgtgcagcccccccgtgagcgagggccccgtgctgccccagagcctgcccagcctgggcgcctaccagcagcccaccgccgcccccggcctgcccgtgggcagcgtgcccgcccccgcctgcccccccagcctgcagcagcacttccccgaccccgccatgagcttcgcccccgtgctgcccccccccagcacccccatgcccaccggccccggccagcccgccccccccggccagcagcccccccccctggcccagcccacccccctgccccaggtgctggccccccagcccgtggtgcccctgcagcccgtgcccccccacctgcccccctacctggcccccgccagccaggtgggcgcccccgcccagctgaagcccctgcagatgccccaggcccccctgcagcccctggcccaggtgcccccccagatgccccccatccccgtggtgccccccatcacccccctggccggcatcgacggcctgccccccgccctgcccgacctgcccaccgccaccgtgccccccgtgccccccccccagtacttcagccccgccgtgatcctgcccagcctggccgcccccctgccccccgccagccccgccctgcccctgcaggccgtgaagctgccccacccccccggcgcccccctggccatgccctgcagaaccatcgtgcccaacgcccccgccaccatccccctgctggccgtggccccccccggcgtggccgccctgagcatccacagcgccgtggcccagctgcccggccagcccgtgtaccccgccgccttcccccagatggcccccaccgacgtgccccccagcccccaccacaccgtgcagaacatgagagccacccccccccagcccgccctgcccccccagcccaccctgcccccccagcccgtgctgcccccccagcccaccctgcccccccagcccgtgctgcccccccagcccaccagacccccccagcccgtgctgcccccccagcccatgctgcccccccagcccgtgctgcccccccagcccgccctgcccgtgagacccgagcccctgcagccccacctgcccgagcaggccgcccccgccgccacccccggcagccagatcctgctgggccaccccgccccctacgccgtggacgtggccgcccaggtgcccaccgtgcccgtgccccccgccgccgtgctgagcccccccctgcccgaggtgctgctgcccgccgcccccgagctgctgccccagttccccagcagcctggccaccgtgagcgccagcgtgcagagcgtgcccacccagaccgccaccctgctgccccccgccaacccccccctgcccggcggccccggcatcgccagcccctgccccaccgtgcagctgaccgtggagcccgtgcaggaggagcaggccagccaggacaagccccccggcctgccccagagctgcgagagctacggcggcagcgacgtgaccagcggcaaggagctgagcgacagctgcgagggcgccttcggcggcggcagactggagggcagagccgccagaaagcaccacagaagaagcaccagagccagaagcagacaggagagagccagcagacccagactgaccatcctgaacgtgtgcaacaccggcgacaagatggtggagtgccagctggagacccacaaccacaagatggtgaccttcaagttcgacctggacggcgacgcccccgacgagatcgccacctacatggtggagcacgacttcatcctgcaggccgagagagagaccttcatcgagcagatgaaggacgtgatggacaaggccgaggacatgctgagcgaggacaccgacgccgacagaggcagcgaccccggcaccagccccccccacctgagcacctgcggcctgggcaccggcgaggagagcagacagagccaggccaacgcccccgtgtaccagcagaacgtgctgcacaccggcaagagatggttcatcatctgccccgtggccgagcaccccgcccccgaggcccccgagagcagcccccccctgcccctgagcagcctgccccccgaggccagccaggacagcgccccctacaaggaccagctgagcagcaaggagcagcccagcttcctggccagccagcagctgctgagccaggccggccccagcaacccccccggcgccccccccgcccccctggcccccagcagcccccccgtgaccgccctgccccaggacggcgccgcccccgccaccagcaccatgcccgagcccgccagcggcaccgccagccaggccggcggccccggcaccccccagggcctgaccagcgagctggagaccagccagcccctggccgagacccacgaggcccccctggccgtgcagcccctggtggtgggcctggccccctgcacccccgcccccgaggccgccagcaccagagacgccagcgcccccagagagcccctgcccccccccgcccccgagcccagcccccacagcggcaccccccagcccgccctgggccagcccgcccccctgctgcccgccgccgtgggcgccgtgagcctggccaccagccagctgcccagcccccccctgggccccaccgtgcccccccagccccccagcgccctggagagcgacggcgagggccccccccccagagtgggcttcgtggacagcaccatcaagagcctggacgagaagctgagaaccctgctgtaccaggagcacgtgcccaccagcagcgccagcgccggcacccccgtggaggtgggcgacagagacttcaccctggagcccctgagaggcgaccagcccagaagcgaggtgtgcggcggcgacctggccctgccccccgtgcccaaggaggccgtgagcggcagagtgcagctgccccagcccctggtggagaagagcgagctggcccccaccagaggcgccgtgatggagcagggcaccagcagcagcatgaccgccgagagcagccccagaagcatgctgggctacgacagagacggcagacaggtggccagcgacagccacgtggtgcccagcgtgccccaggacgtgcccgccttcgtgagacccgccagagtggagcccaccgacagagacggcggcgaggccggcgagagcagcgccgagcccccccccagcgacatgggcaccgtgggcggccaggccagccacccccagaccctgggcgccagagccctgggcagccccagaaagagacccgagcagcaggacgtgagcagccccgccaagaccgtgggcagattcagcgtggtgagcacccaggacgagtggaccctggccagcccccacagcctgagatacagcgccccccccgacgtgtacctggacgaggcccccagcagccccgacgtgaagctggccgtgagaagagcccagaccgccagcagcatcgaggtgggcgtgggcgagcccgtgagcagcgacagcggcgacgagggccccagagccagaccccccgtgcagaagcaggccagcctgcccgtgagcggcagcgtggccggcgacttcgtgaagaaggccaccgccttcctgcagagacccagcagagccggcagcctgggccccgagacccccagcagagtgggcatgaaggtgcccaccatcagcgtgaccagcttccacagccagagcagctacatcagcagcgacaacgacagcgagctggaggacgccgacatcaagaaggagctgcagagcctgagagagaagcacctgaaggagatcagcgagctgcagagccagcagaagcaggagatcgaggccctgtacagaagactgggcaagcccctgccccccaacgtgggcttcttccacaccgccccccccaccggcagaagaagaaagaccagcaagagcaagctgaaggccggcaagctgctgaaccccctggtgagacagctgaaggtggtggccagcagcaccggccacctggccgacagcagcagaggcccccccgccaaggaccccgcccaggccagcgtgggcctgaccgccgacagcaccggcctgagcggcaaggccgtgcagacccagcagccctgcagcgtgagagccagcctgagcagcgacatctgcagcggcctggccagcgacggcggcggcgccagaggccagggctggaccgtgtaccaccccaccagcgagagagtgacctacaagagcagcagcaagcccagagccagattcctgagcggccccgtgagcgtgagcatctggagcgccctgaagagactgtgcctgggcaaggagcacagcagcagaagcagcaccagcagcctggcccccggccccgagcccggcccccagcccgccctgcacgtgcaggcccaggtgaacaacagcaacaacaagaagggcaccttcaccgacgacctgcacaagctggtggacgagtggaccagcaagaccgtgggcgccgcccagctgaagcccaccctgaaccagctgaagcagacccagaagctgcaggacatggaggcccaggccggctgggccgcccccggcgaggccagagccatgaccgcccccagagccggcgtgggcatgcccagactgccccccgcccccggccccctgagcaccaccgtgatccccggcgccgcccccaccctgagcgtgcccacccccggcagctgcggccccagagccgtgagcacccccaccagctacacctag

SEQ ID NO: 105315 - DNA, 5403 bp, synthetic construct
  misc_feature 1..5403: note = Description of Artificial Sequence: Synthetic coding sequence
  source 1..5403: mol_type = other DNA
atggccaccgacagcggcgaccccgccagcaccgaggacagcgagaagcccgacggcatcagcttcgagaacagagtgccccaggtggccgccaccctgaccgtggaggccagactgaaggagaagaacagcaccttcagcgccagcggcgagaccgtggagagaaagagattcttcagaaagagcgtggagatgaccgaggacgacaaggtggccgagagcagccccaaggacgagagaatcaaggccgccatgaacatccccagagtggacaagctgcccagcaacgtgctgagaggcggccaggaggtgaagtacgagcagtgcagcaagagcaccagcgagatcagcaaggactgcttcaaggagaagaacgagaaggagatggaggaggaggccgagatgaaggccgtggccaccagccccagcggcagattcctgaagttcgacatcgagctgggcagaggcgccttcaagaccgtgtacaagggcctggacaccgagacctgggtggaggtggcctggtgcgagctgcaggacagaaagctgaccaaggccgagcagcagagattcaaggaggaggccgagatgctgaagggcctgcagcaccccaacatcgtgagattctacgacagctgggagagcatcctgaagggcaagaagtgcatcgtgctggtgaccgagctgatgaccagcggcaccctgaagacctacctgaagagattcaaggtgatgaagcccaaggtgctgagaagctggtgcagacagatcctgaagggcctgcagttcctgcacaccagaaccccccccatcatccacagagacctgaagtgcgacaacatcttcatcaccggccccaccggcagcgtgaagatcggcgacctgggcctggccaccctgatgagaaccagcttcgccaagagcgtgatcggcacccccgagttcatggcccccgagatgtacgaggagcactacgacgagagcgtggacgtgtacgccttcggcatgtgcatgctggagatggccaccagcgagtacccctacagcgagtgccagaacgccgcccagatctacagaaaggtgaccagcggcatcaagcccgccagcttcaacaaggtgaccgaccccgaggtgaaggagatcatcgagggctgcatcagacagaacaagagcgagagactgagcatcagagacctgctgaaccacgccttcttcgccgaggacaccggcctgagagtggagctggccgaggaggacgactgcagcaacagcagcctggccctgagactgtgggtggaggaccccaagaagctgaagggcaagcacaaggacaacgaggccatcgagttcagcttcaacctggagaccgacacccccgaggaggtggcctacgagatggtgaagagcggcttcttccacgagagcgacagcaaggccgtggccaagagcatcagagacagagtgacccccatcaagaagaccagagagaagaagcccgccggctgcctggaggagagaagagacagccagtgcaagagcatgggcaacgtgttcccccagccccagaacaccaccctgcccctggcccccgcccagcagaccggcgccgagtgcgaggagaccgaggtggaccagcacgtgagacagcagctgctgcagagaaagccccagcagcactgcagcagcgtgaccggcgacaacctgagcgaggccggcgccgccagcgtgatccacagcgacaccagcagccagcccagcgtggcctacagcagcaaccagaccatgggcagccagatggtgagcaacatcccccaggccgaggtgaacgtgcccggccagatctacagcagccagcagctggtgggccactaccagcaggtgagcggcctgcagaagcacagcaagctgacccagccccagatcctgcccctggtgcagggccagagcaccgtgctgcccgtgcacgtgctgggccccaccgtggtgagccagccccaggtgagccccctgaccgtgcagaaggtgccccagatcaagcccgtgagccagcccgtgggcgccgagcagcaggccgccctgctgaagcccgacctggtgagaagcctgaaccaggacgtggccaccaccaaggagaacgtgagcagccccgacaaccccagcggcaacggcaagcaggacagaatcaagcagagaagagccagctgccccagacccgagaagggcaccaagttccagctgaccgtgctgcaggtgagcaccagcggcgacaacatggtggagtgccagctggagacccacaacaacaagatggtgaccttcaagttcgacgtggacggcgacgcccccgaggacatcgccgactacatggtggaggacaacttcgtgctggagagcgagaaggagaagttcgtggaggagctgagagccatcgtgggccaggcccaggagatcctgcacgtgcacttcgccaccgagagagccaccggcgtggacagcatcaccgtggacagcaacagcagccagaccggcagcagcgagcaggtgcagatcaacagcaccagcacccagaccagcaacgagagcgccccccagagcagccccgtgggcagatggagattctgcatcaaccagaccatcagaaacagagagacccagagcccccccagcctgcagcacagcatgagcgccgtgcccggcagacaccccctgcccagccccaagaacaccagcaacaaggagatcagcagagacaccctgctgaccatcgagaacaacccctgccacagagccctgttcaccagcaagagcgagcacaaggacgtggtggacggcaagatcagcgagtgcgccagcgtggagaccaagcagcccgccatcctgtaccaggtggaggacaacagacagatcatggcccccgtgaccaacagcagcagctacagcaccaccagcgtgagagccgtgcccgccgagtgcgagggcctgaccaagcaggccagcatcttcatccccgtgtacccctgccaccagaccgccagccaggccgacgccctgatgagccaccccggcgagagcacccagaccagcggcaacagcctgaccaccctggccttcgaccagaagccccagaccctgagcgtgcagcagcccgccatggacgccgagttcatcagccaggagggcgagaccaccgtgaacaccgaggccagcagccccaagaccgtgatccccacccagacccccggcctggagcccaccaccctgcagcccaccaccgtgctggagagcgacggcgagagaccccccaagctggagttcgccgacaacagaatcaagaccctggacgagaagctgagaaacctgctgtaccaggagcacagcatcagcagcatctaccccgagagccagaaggacacccagagcatcgacagccccttcagcagcagcgccgaggacaccctgagctgccccgtgaccgaggtgatcgccatcagccactgcggcatcaaggacagccccgtgcagagccccaacttccagcagaccggcagcaagctgctgagcaacgtggccgccagccagcccgccaacatcagcgtgttcaagagagacctgaacgtgatcaccagcgtgcccagcgagctgtgcctgcacgagatgagcagcgacgccagcctgcccggcgaccccgaggcctaccccgccgccgtgagcagcggcggcgccatccacctgcagaccggcggcggctacttcggcctgagcttcacctgccccagcctgaagaaccccatcagcaagaagagctggaccagaaagctgaagagctgggcctacagactgagacagagcaccagcttcttcaagagaagcaaggtgagacaggtggagaccgaggagatgagaagcgccatcgcccccgaccccatccccctgaccagagagagcaccgccgacaccagagccctgaacagatgcaaggccatgagcggcagcttccagagaggcagattccaggtgatcaccatcccccagcagcagagcgccaagatgaccagcttcggcatcgagcacatcagcgtgttcagcgagaccaaccacagcagcgaggaggccttcatcaagaccgccaagagccagctggtggagatcgagcccgccacccagaaccccaagaccagcttcagctacgagaagctgcaggccctgcaggagacctgcaaggagaacaagggcgtgcccaagcagggcgacaacttcctgagcttcagcgccgcctgcgagaccgacgtgagcagcgtgacccccgagaaggagttcgaggagaccagcgccaccggcagcagcatgcagagcggcagcgagctgctgctgaaggagagagagatcctgaccgccggcaagcagcccagcagcgacagcgagttcagcgccagcctggccggcagcggcaagagcgtggccaagaccggccccgagagcaaccagtgcctgccccaccacgaggagcaggcctacgcccagacccagagcagcctgttctacagccccagcagccccatgagcagcgacgacgagagcgagatcgaggacgaggacctgaaggtggagctgcagagactgagagagaagcacatccaggaggtggtgaacctgcagacccagcagaacaaggagctgcaggagctgtacgagagactgagaagcatcaaggacagcaagacccagagcaccgagatccccctgccccccgccagccccagaagacccagaagcttcaagagcaagctgagaagcagaccccagagcctgacccacgtggacaacggcatcgtggccaccggcaagagctgcctgatcaacgagctggagaaccccctgtgcgtggagagcaacgccgccagctgccagcagagccccgccagcaagaagggcatgttcaccgacgacctgcacaagctggtggacgactggaccaaggaggccgtgggcaacagcctgatcaagcccagcctgaaccagctgaagcagagccagcacaagctggagaccgagaactggaacaaggtgagcgagaacacccccagcaccatgggctacaccagcacctggatcagcagcctgagccagatcagaggcgccgtgcccaccagcctgccccagggcctgagcctgcccagcttccccggccccctgagcagctacggcatgccccacgtgtgccagtacaacgccgtggccggcgccggctaccccgtgcagtgggtgggcatcagcggcaccacccagcagagcgtggtgatccccgcccagagcggcggccccttccagcccggcatgaacatgcaggccttccccaccagcagcgtgcagaaccccgccaccatcccccccggccccaagtag

SEQ ID NO: 105316 - DNA, 5403 bp, synthetic construct; identical to SEQ ID NO: 105315
  misc_feature 1..5403: note = Description of Artificial Sequence: Synthetic coding sequence
  source 1..5403: mol_type = other DNA

SEQ ID NO: 105317 - DNA, 5232 bp, synthetic construct
  misc_feature 1..5232: note = Description of Artificial Sequence: Synthetic coding sequence
  source 1..5232: mol_type = other DNA
atggccaccgacagcggcgaccccgccagcaccgaggacagcgagaagcccgacggcatcagcttcgagaacagagtgccccaggtggccgccaccctgaccgtggaggccagactgaaggagaagaacagcaccttcagcgccagcggcgagaccgtggagagaaagagattcttcagaaagagcgtggagatgaccgaggacgacaaggtggccgagagcagccccaaggacgagagaatcaaggccgccatgaacatccccagagtggacaagctgcccagcaacgtgctgagaggcggccaggaggtgaagtacgagcagtgcagcaagagcaccagcgagatcagcaaggactgcttcaaggagaagaacgagaaggagatggaggaggaggccgagatgaaggccgtggccaccagccccagcggcagattcctgaagttcgacatcgagctgggcagaggcgccttcaagaccgtgtacaagggcctggacaccgagacctgggtggaggtggcctggtgcgagctgcaggacagaaagctgaccaaggccgagcagcagagattcaaggaggaggccgagatgctgaagggcctgcagcaccccaacatcgtgagattctacgacagctgggagagcatcctgaagggcaagaagtgcatcgtgctggtgaccgagctgatgaccagcggcaccctgaagacctacctgaagagattcaaggtgatgaagcccaaggtgctgagaagctggtgcagacagatcctgaagggcctgcagttcctgcacaccagaaccccccccatcatccacagagacctgaagtgcgacaacatcttcatcaccggccccaccggcagcgtgaagatcggcgacctgggcctggccaccctgatgagaaccagcttcgccaagagcgtgatcggcacccccgagttcatggcccccgagatgtacgaggagcactacgacgagagcgtggacgtgtacgccttcggcatgtgcatgctggagatggccaccagcgagtacccctacagcgagtgccagaacgccgcccagatctacagaaaggtgaccagcggcatcaagcccgccagcttcaacaaggtgaccgaccccgaggtgaaggagatcatcgagggctgcatcagacagaacaagagcgagagactgagcatcagagacctgctgaaccacgccttcttcgccgaggacaccggcctgagagtggagctggccgaggaggacgactgcagcaacagcagcctggccctgagactgtgggtggaggaccccaagaagctgaagggcaagcacaaggacaacgaggccatcgagttcagcttcaacctggagaccgacacccccgaggaggtggcctacgagatggtgaagagcggcttcttccacgagagcgacagcaaggccgtggccaagagcatcagagacagagtgacccccatcaagaagaccagagagaagaagcccgccggctgcctggaggagagaagagacagccagtgcaagagcatgggcaacgtgttcccccagccccagaacaccaccctgcccctggcccccgcccagcagaccggcgccgagtgcgaggagaccgaggtggaccagcacgtgagacagcagctgctgcagagaaagccccagcagcactgcagcagcgtgaccggcgacaacctgagcgaggccggcgccgccagcgtgatccacagcgacaccagcagccagcccagcgtggcctacagcagcaaccagaccatgggcagccagatggtgagcaacatcccccaggccgaggtgaacgtgcccggccagatctacagcagccagcagctggtgggccactaccagcaggtgagcggcctgcagaagcacagcaagctgacccagccccagatcctgcccctggtgcagggccagagcaccgtgctgcccgtgcacgtgctgggccccaccgtggtgagccagccccaggtgagccccctgaccgtgcagaaggtgccccagatcaagcccgtgagccagcccgtgggcgccgagcagcaggccgccctgctgaagcccgacctggtgagaagcctgaaccaggacgtggccaccaccaaggagaacgtgagcagccccgacaaccccagcggcaacggcaagcaggacagaatcaagcagagaagagccagctgccccagacccgagaagggcaccaagttccagctgaccgtgctgcaggtgagcaccagcggcgacaacatggtggagtgccagctggagacccacaacaacaagatggtgaccttcaagttcgacgtggacggcgacgcccccgaggacatcgccgactacatggtggaggacaacttcgtgctggagagcgagaaggagaagttcgtggaggagctgagagccatcgtgggccaggcccaggagatcctgcacgtgcacttcgccaccgagagagccaccggcgtggacagcatcaccgtggacagcaacagcagccagaccggcagcagcgagcaggtgcagatcaacagcaccagcacccagaccagcaacgagagcgccccccagagcagccccgtgggcagatggagattctgcatcaaccagaccatcagaaacagagagacccagagcccccccagcctgcagcacagcatgagcgccgtgcccggcagacaccccctgcccagccccaagaacaccagcaacaaggagatcagcagagacaccctgctgaccatcgagaacaacccctgccacagagccctgttcaccagcaagagcgagcacaaggacgtggtggacggcaagatcagcgagtgcgccagcgtggagaccaagcagcccgccatcctgtaccaggtggaggacaacagacagatcatggcccccgtgaccaacagcagcagctacagcaccaccagcgtgagagccgtgcccgccgagtgcgagggcctgaccaagcaggccagcatcttcatccccgtgtacccctgccaccagaccgccagccaggccgacgccctgatgagccaccccggcgagagcacccagaccagcggcaacagcctgaccaccctggccttcgaccagaagccccagaccctgagcgtgcagcagcccgccatggacgccgagttcatcagccaggagggcgagaccaccgtgaacaccgaggccagcagccccaagaccgtgatccccacccagacccccggcctggagcccaccaccctgcagcccaccaccgtgctggagagcgacggcgagagaccccccaagctggagttcgccgacaacagaatcaagaccctggacgagaagctgagaaacctgctgtaccaggagcacagcatcagcagcatctaccccgagagccagaaggacacccagagcatcgacagccccttcagcagcagcgccgaggacaccctgagctgccccgtgaccgaggtgatcgccatcagccactgcggcatcaaggacagccccgtgcagagccccaacttccagcagaccggcagcaagctgctgagcaacgtggccgccagccagcccgccaacatcagcgtgttcaagagagacctgaacgtgatcaccagcgtgcccagcgagctgtgcctgcacgagatgagcagcgacgccagcctgcccggcgaccccgaggcctaccccgccgccgtgagcagcggcggcgccatccacctgcagaccggcgtggagaccgaggagatgagaagcgccatcgcccccgaccccatccccctgaccagagagagcaccgccgacaccagagccctgaacagatgcaaggccatgagcggcagcttccagagaggcagattccaggtgatcaccatcccccagcagcagagcgccaagatgaccagcttcggcatcgagcacatcagcgtgttcagcgagaccaaccacagcagcgaggaggccttcatcaagaccgccaagagccagctggtggagatcgagcccgccacccagaaccccaagaccagcttcagctacgagaagctgcaggccctgcaggagacctgcaaggagaacaagggcgtgcccaagcagggcgacaacttcctgagcttcagcgccgcctgcgagaccgacgtgagcagcgtgacccccgagaaggagttcgaggagaccagcgccaccggcagcagcatgcagagcggcagcgagctgctgctgaaggagagagagatcctgaccgccggcaagcagcccagcagcgacagcgagttcagcgccagcctggccggcagcggcaagagcgtggccaagaccggccccgagagcaaccagtgcctgccccaccacgaggagcaggcctacgcccagacccagagcagcctgttctacagccccagcagccccatgagcagcgacgacgagagcgagatcgaggacgaggacctgaaggtggagctgcagagactgagagagaagcacatccaggaggtggtgaacctgcagacccagcagaacaaggagctgcaggagctgtacgagagactgagaagcatcaaggacagcaagacccagagcaccgagatccccctgccccccgccagccccagaagacccagaagcttcaagagcaagctgagaagcagaccccagagcctgacccacgtggacaacggcatcgtggccaccgaccccctgtgcgtggagagcaacgccgccagctgccagcagagccccgccagcaagaagggcatgttcaccgacgacctgcacaagctggtggacgactggaccaaggaggccgtgggcaacagcctgatcaagcccagcctgaaccagctgaagcagagccagcacaagctggagaccgagaactggaacaaggtgagcgagaacacccccagcaccatgggctacaccagcacctggatcagcagcctgagccagatcagaggcgccgtgcccaccagcctgccccagggcctgagcctgcccagcttccccggccccctgagcagctacggcatgccccacgtgtgccagtacaacgccgtggccggcgccggctaccccgtgcagtgggtgggcatcagcggcaccacccagcagagcgtggtgatccccgcccagagcggcggccccttccagcccggcatgaacatgcaggccttccccaccagcagcgtgcagaaccccgccaccatcccccccggccccaagtag

SEQ ID NO: 105318 - DNA, 498 bp, synthetic construct
  misc_feature 1..498: note = Description of Artificial Sequence: Synthetic coding sequence
  source 1..498: mol_type = other DNA
atggccaccgacagcggcgaccccgccagcaccgaggacagcgagaagcccgacggcatcagcttcgagaacagagtgccccaggtggccgccaccctgaccgtggaggccagactgaaggagaagaacagcaccttcagcgccagcggcgagaccgtggagagaaagagattcttcagaaagagcgtggagatgaccgaggacgacaaggtggccgagagcagccccaaggacgagagaatcaaggccgccatgaacatccccagagtggacaagctgcccagcaacgtgctgagaggcggccaggaggtgaagtacgagcagtgcagcaagagcaccagcgagatcagcaaggactgcttcaaggagaagaacgagaaggagatggaggaggaggccgagatgaaggccgtggccaccagccccagcggcagattcctgaagttcgacatcgagctgggcagaggcgccttcaagaccgtgtacaagggcctgtag

SEQ ID NO: 105319 - DNA, 3732 bp, synthetic construct
  misc_feature 1..3732: note = Description of Artificial Sequence: Synthetic coding sequence
  source 1..3732: mol_type = other DNA
atgctggccagccccgccaccgagaccaccgtgctgatgagccagaccgaggccgacctggccctgagaccccccccccccctgggcaccgccggccagcccagactgggccccccccccagaagagccagaagattcagcggcaaggccgagcccagacccagaagcagcagactgagcagaagaagcagcgtggacctgggcctgctgagcagctggagcctgcccgccagccccgcccccgacccccccgacccccccgacagcgccggccccggccccgccagaagccccccccccagcagcaaggagccccccgagggcacctggaccgagggcgcccccgtgaaggccgccgaggacagcgccagacccgagctgcccgacagcgccgtgggccccggcagcagagagcccctgagagtgcccgaggccgtggccctggagagaagaagagagcaggaggagaaggaggacatggagacccaggccgtggccaccagccccgacggcagatacctgaagttcgacatcgagatcggcagaggcagcttcaagaccgtgtacagaggcctggacaccgacaccaccgtggaggtggcctggtgcgagctgcagaccagaaagctgagcagagccgagagacagagattcagcgaggaggtggagatgctgaagggcctgcagcaccccaacatcgtgagattctacgacagctggaagagcgtgctgagaggccaggtgtgcatcgtgctggtgaccgagctgatgaccagcggcaccctgaagacctacctgagaagattcagagagatgaagcccagagtgctgcagagatggagcagacagatcctgagaggcctgcacttcctgcacagcagagtgccccccatcctgcacagagacctgaagtgcgacaacgtgttcatcaccggccccaccggcagcgtgaagatcggcgacctgggcctggccaccctgaagagagccagcttcgccaagagcgtgatcggcacccccgagttcatggcccccgagatgtacgaggagaagtacgacgaggccgtggacgtgtacgccttcggcatgtgcatgctggagatggccaccagcgagtacccctacagcgagtgccagaacgccgcccagatctacagaaaggtgaccagcggcagaaagcccaacagcttccacaaggtgaagatccccgaggtgaaggagatcatcgagggctgcatcagaaccgacaagaacgagagattcaccatccaggacctgctggcccacgccttcttcagagaggagagaggcgtgcacgtggagctggccgaggaggacgacggcgagaagcccggcctgaagctgtggctgagaatggaggacgccagaagaggcggcagacccagagacaaccaggccatcgagttcctgttccagctgggcagagacgccgccgaggaggtggcccaggagatggtggccctgggcctggtgtgcgaggccgactaccagcccgtggccagagccgtgagagagagagtggccgccatccagagaaagagagagaagctgagaaaggccagagagctggaggccctgccccccgagcccggccccccccccgccaccgtgcccatggcccccggcccccccagcgtgttcccccccgagcccgaggagcccgaggccgaccagcaccagcccttcctgttcagacacgccagctacagcagcaccaccagcgactgcgagaccgacggctacctgagcagcagcggcttcctggacgccagcgaccccgccctgcagccccccggcggcgtgcccagcagcctggccgagagccacctgtgcctgcccagcgccttcgccctgagcatccccagaagcggccccggcagcgacttcagccccggcgacagctacgccagcgacgccgccagcggcctgagcgacgtgggcgagggcatgggccagatgagaagaccccccggcagaaacctgagaagaagacccagaagcagactgagagtgaccagcgtgagcgaccagaacgacagagtggtggagtgccagctgcagacccacaacagcaagatggtgaccttcagattcgacctggacggcgacagccccgaggagatcgccgccgccatggtgtacaacgagttcatcctgcccagcgagagagacggcttcctgagaagaatcagagagatcatccagagagtggagaccctgctgaagagagacaccggccccatggaggccgccgaggacaccctgagcccccaggaggagcccgcccccctgcccgccctgcccgtgcccctgcccgaccccagcaacgaggagctgcagagcagcaccagcctggagcacagaagctggaccgccttcagcaccagcagcagcagccccggcacccccctgagccccggcaaccccttcagccccggcacccccatcagccccggccccatcttccccatcaccagccccccctgccaccccagccccagccccttcagccccatcagcagccaggtgagcagcaaccccagcccccaccccaccagcagccccctgcccttcagcagcagcacccccgagttccccgtgcccctgagccagtgcccctggagcagcctgcccaccaccagcccccccaccttcagccccacctgcagccaggtgaccctgagcagccccttcttccccccctgccccagcaccagcagcttccccagcaccaccgccgcccccctgctgagcctggccagcgccttcagcctggccgtgatgaccgtggcccagagcctgctgagccccagccccggcctgctgagccagagcccccccgccccccccagccccctgcccagcctgcccctgcccccccccgtggcccccggcggccaggagagccccagcccccacaccgccgaggtggagagcgaggccagccccccccccgccagacccctgcccggcgaggccagactggcccccatcagcgaggagggcaagccccagctggtgggcagattccaggtgaccagcagcaaggagcccgccgagcccctgcccctgcagcccaccagccccaccctgagcggcagccccaagcccagcaccccccagctgaccagcgagagcagcgacaccgaggacagcgccggcggcggccccgagaccagagaggccctggccgagagcgacagagccgccgagggcctgggcgccggcgtggaggaggagggcgacgacggcaaggagccccaggtgggcggcagcccccagcccctgagccaccccagccccgtgtggatgaactacagctacagcagcctgtgcctgagcagcgaggagagcgagagcagcggcgaggacgaggagttctgggccgagctgcagagcctgagacagaagcacctgagcgaggtggagaccctgcagaccctgcagaagaaggagatcgaggacctgtacagcagactgggcaagcagcccccccccggcatcgtggcccccgccgccatgctgagcagcagacagagaagactgagcaagggcagcttccccaccagcagaagaaacagcctgcagagaagcgagccccccggccccggcatcatgagaagaaacagcctgagcggcagcagcaccggcagccaggagcagagagccagcaagggcgtgaccttcgccggcgacgtgggcagaatgtag

SEQ ID NO: 105320 - DNA, 1992 bp, synthetic construct
  misc_feature 1..1992: note = Description of Artificial Sequence: Synthetic coding sequence
  source 1..1992: mol_type = other DNA
atgagaagaagacagcagggcgccgccggcggcaacttccccgtgggcggcagcttccccgaggacgtgagcccccaccaggacagcggctacgcccccagccccagatacctgagaagattcagagagatgaagcccagagtgctgcagagatggagcagacagatcctgagaggcctgcacttcctgcacagcagagtgccccccatcctgcacagagacctgaagtgcgacaacgtgttcatcaccggccccaccggcagcgtgaagatcggcgacctgggcctggccaccctgaagagagccagcttcgccaagagcgtgatcggcacccccgagttcatggcccccgagatgtacgaggagaagtacgacgaggccgtggacgtgtacgccttcggcatgtgcatgctggagatggccaccagcgagtacccctacagcgagtgccagaacgccgcccagatctacagaaaggtgaccagcggcagaaagcccaacagcttccacaaggtgaagatccccgaggtgaaggagatcatcgagggctgcatcagaaccgacaagaacgagagattcaccatccaggacctgctggcccacgccttcttcagagaggagagaggcgtgcacgtggagctggccgaggaggacgacggcgagaagcccggcctgaagctgtggctgagaatggaggacgccagaagaggcggcagacccagagacaaccaggccatcgagttcctgttccagctgggcagagacgccgccgaggaggtggcccaggagatggtggccctgggcctggtgtgcgaggccgactaccagcccgtggccagagccgtgagagagagagtggccgccatccagagaaagagagagaagctgagaaaggccagagagctggaggccctgccccccgagcccggccccccccccgccaccgtgcccatggcccccggcccccccagcgtgttcccccccgagcccgaggagcccgaggccgaccagcaccagcccttcctgttcagacacgccagctacagcagcaccaccagcgactgcgagaccgacggctacctgagcagcagcggcttcctggacgccagcgaccccgccctgcagccccccggcggcgtgcccagcagcctggccgagagccacctgtgcctgcccagcgccttcgccctgagcatccccagaagcggccccggcagcgacttcagccccggcgacagctacgccagcgacgccgccagcggcctgagcgacgtgggcgagggcatgggccagatgagaagaccccccggcagaaacctgagaagaagacccagaagcagactgagagtgaccagcgtgagcgaccagaacgacagagtggtggagtgccagctgcagacccacaacagcaagatggtgaccttcagattcgacctggacggcgacagccccgaggagatcgccgccgccatggtgtacaacgagttcatcctgcccagcgagagagacggcttcctgagaagaatcagagagatcatccagagagtggagaccctgctgaagagagacaccggccccatggaggccgccgaggacaccctgagcccccaggaggagcccgcccccctgcccgccctgcccgtgcccctgcccgaccccagcaacgaggagctgcagagcagcaccagcctggagcacagaagctggaccgccttcagcaccagcagcagcagccccggcacccccctgagccccggcaaccccttcagccccggcacccccatcagccccggccccatcgccctgcagagagagagcagaagcttcagcctgcagagagcccagatccagagaaccgtgctggaggccggccagagacccggcaagctgtggctgagagccaccgtgcagctgagagtgtggggcctggagctgagaagaaaggagatgatgggcagaaaccccaagctgggcgccgcccccaacccctag

SEQ ID NO: 105321 - DNA, 471 bp, synthetic construct
  misc_feature 1..471: note = Description of Artificial Sequence: Synthetic coding sequence
  source 1..471: mol_type = other DNA
atgggccagatgagaagaccccccggcagaaacctgagaagaagacccagaagcagactgagagtgaccagcgtgagcgaccagaacgacagagtggtggagtgccagctgcagacccacaacagcaagatggtgaccttcagattcgacctggacggcgacagccccgaggagatcgccgccgccatggtgtacaacgagttcatcctgcccagcgagagagacggcttcctgagaagaatcagagagatcatccagagagtggagaccctgctgaagagagacaccggccccatggaggccgccgaggacaccctgagcccccaggtgagacccctgggcggccacttccagggcaagtggaccctgtgcagcagagtgtactacagcctgcccagcgccgtgcccctggacctgacccccctgcacctgtgggaccccaagaccgtggccctgttcttcttcttctag

SEQ ID NO: 105322 - DNA, 894 bp, synthetic construct
  misc_feature 1..894: note = Description of Artificial Sequence: Synthetic coding sequence
  source 1..894: mol_type = other DNA
atggccaaggtgagcgagctgtacgacgtgacctgggaggagatgagagacaagatgagaaagtggagagaggagaacagcagaaacagcgagcagatcgtggaggtgggcgaggagctgatcaacgagtacgccagcaagctgggcgacgacatctggatcatctacgagcaggtgatgatcgccgccctggactacggcagagacgacctggccctgttctgcctgcaggagctgagaagacagttccccggcagccacagagtgaagagactgaccggcatgagattcgaggccatggagagatacgacgacgccatccagctgtacgacagaatcctgcaggaggaccccaccaacaccgccgccagaaagagaaagatcgccatcagaaaggcccagggcaagaacgtggaggccatcagagagctgaacgagtacctggagcagttcgtgggcgaccaggaggcctggcacgagctggccgagctgtacatcaacgagcacgactacgccaaggccgccttctgcctggaggagctgatgatgaccaacccccacaaccacctgtactgccagcagtacgccgaggtgaagtacacccagggcggcctggagaacctggagctgagcagaaagtacttcgcccaggccctgaagctgaacaacagaaacatgagagccctgttcggcctgtacatgagcgccagccacatcgccagcaaccccaaggccagcgccaagaccaagaaggacaacatgaagtacgccagctgggccgccagccagatcaacagagcctaccagttcgccggcagaagcaagaaggagaccaagtacagcctgaaggccgtggaggacatgctggagaccctgcagatcacccagagctag

SEQ ID NO: 105323 - DNA, 1104 bp, synthetic construct
  misc_feature 1..1104: note = Description of Artificial Sequence: Synthetic coding sequence
  source 1..1104: mol_type = other DNA
atgagatggttcctgccctggaccctggccgccgtgaccgccgccgccgccagcaccgtgctggccaccgccctgagccccgcccccaccaccatggacttcacccccgcccccctggaggacaccagcagcagaccccagttctgcaagtggccctgcgagtgcccccccagcccccccagatgccccctgggcgtgagcctgatcaccgacggctgcgagtgctgcaagatgtgcgcccagcagctgggcgacaactgcaccgaggccgccatctgcgacccccacagaggcctgtactgcgactacagcggcgacagacccagatacgccatcggcgtgtgcgcccaggtggtgggcgtgggctgcgtgctggacggcgtgagatacaacaacggccagagcttccagcccaactgcaagtacaactgcacctgcatcgacggcgccgtgggctgcacccccctgtgcctgagagtgagaccccccagactgtggtgcccccaccccagaagagtgagcatccccggccactgctgcgagcagtgggtgtgcgaggacgacgccaagagacccagaaagaccgcccccagagacaccggcgccttcgacgccgtgggcgaggtggaggcctggcacagaaactgcatcgcctacaccagcccctggagcccctgcagcaccagctgcggcctgggcgtgagcaccagaatcagcaacgtgaacgcccagtgctggcccgagcaggagagcagactgtgcaacctgagaccctgcgacgtggacatccacaccctgatcaaggccggcaagaagtgcctggccgtgtaccagcccgaggccagcatgaacttcaccctggccggctgcatcagcaccagaagctaccagcccaagtactgcggcgtgtgcatggacaacagatgctgcatcccctacaagagcaagaccatcgacgtgagcttccagtgccccgacggcctgggcttcagcagacaggtgctgtggatcaacgcctgcttctgcaacctgagctgcagaaaccccaacgacatcttcgccgacctggagagctaccccgacttcagcgagatcgccaactag

SEQ ID NO: 105324 - DNA, 588 bp, synthetic construct
  misc_feature 1..588: note = Description of Artificial Sequence: Synthetic coding sequence
  source 1..588: mol_type = other DNA
atgcccgtgcccctgaccagcagacacgaggtggtgcccgccctggacgccggcagcagcgacagcagcagcagacagcacagacccggccacgacgccgtgggcgaggtggaggcctggcacagaaactgcatcgcctacaccagcccctggagcccctgcagcaccagctgcggcctgggcgtgagcaccagaatcagcaacgtgaacgcccagtgctggcccgagcaggagagcagactgtgcaacctgagaccctgcgacgtggacatccacaccctgatcaaggccggcaagaagtgcctggccgtgtaccagcccgaggccagcatgaacttcaccctggccggctgcatcagcaccagaagctaccagcccaagtactgcggcgtgtgcatggacaacagatgctgcatcccctacaagagcaagaccatcgacgtgagcttccagtgccccgacggcctgggcttcagcagacaggtgctgtggatcaacgcctgcttctgcaacctgagctgcagaaaccccaacgacatcttcgccgacctggagagctaccccgacttcagcgagatcgccaactag

SEQ ID NO: 105325 - DNA, 468 bp, synthetic construct
  misc_feature 1..468: note = Description of Artificial Sequence: Synthetic coding sequence
  source 1..468: mol_type = other DNA
atgagatggttcctgccctggaccctggccgccgtgaccgccgccgccgccagcaccgtgctggccaccgccctgagccccgcccccaccaccatggacttcacccccgcccccctggaggacaccagcagcagaccccagttctgcaagtggccctgcgagtgcccccccagcccccccagatgccccctgggcgtgagcctgatcaccgacggctgcgagtgctgcaagatgtgcgcccagcagctgggcgacaactgcaccgaggccgccatctgcgacccccacagaggcctgtactgcgactacagcggcgacagacccagatacgccatcggcgtgtgcgccagaagagaggaggtgagcggctgcgtgcccgccagaggcatccacgagctgcacacctgcggcctgcaccagcacaccctgctgagcacccaggtgctgtggagcctgcacggccagtag

SEQ ID NO: 105326 - DNA, 369 bp, synthetic construct
  misc_feature 1..369: note = Description of Artificial Sequence: Synthetic coding sequence
  source 1..369: mol_type = other DNA
atgagatggttcctgccctggaccctggccgccgtgaccgccgccgccgccagcaccgtgctggccaccgccggcaagaagtgcctggccgtgtaccagcccgaggccagcatgaacttcaccctggccggctgcatcagcaccagaagctaccagcccaagtactgcggcgtgtgcatggacaacagatgctgcatcccctacaagagcaagaccatcgacgtgagcttccagtgccccgacggcctgggcttcagcagacaggtgctgtggatcaacgcctgcttctgcaacctgagctgcagaaaccccaacgacatcttcgccgacctggagagctaccccgacttcagcgagatcgccaactag

SEQ ID NO: 105327 - DNA, 753 bp, synthetic construct
  misc_feature 1..753: note = Description of Artificial Sequence: Synthetic coding sequence
  source 1..753: mol_type = other DNA
atgagaggcacccccaagacccacctgctggccttcagcctgctgtgcctgctgagcaaggtgagaacccagctgtgccccaccccctgcacctgcccctggcccccccccagatgccccctgggcgtgcccctggtgctggacggctgcggctgctgcagagtgtgcgccagaagactgggcgagccctgcgaccagctgcacgtgtgcgacgccagccagggcctggtgtgccagcccggcgccggccccggcggcagaggcgccctgtgcctgctggccgaggacgacagcagctgcgaggtgaacggcagactgtacagagagggcgagaccttccagccccactgcagcatcagatgcagatgcgaggacggcggcttcacctgcgtgcccctgtgcagcgaggacgtgagactgcccagctgggactgcccccaccccagaagagtggaggtgctgggcaagtgctgccccgagtgggtgtgcggccagggcggcggcctgggcacccagcccctgcccgcccagggcccccagttcagcggcctggtgagcagcctgccccccggcgtgccctgccccgagtggagcaccgcctggggcccctgcagcaccacctgcggcctgggcatggccaccagagtgagcaaccagaacagattctgcagactggagacccagagaagactgtgcctgagcagaccctgcccccccagcagaggcagaagcccccagaacagcgccttctag

SEQ ID NO: 105328 - DNA, 657 bp, synthetic construct
  misc_feature 1..657: note = Description of Artificial Sequence: Synthetic coding sequence
  source 1..657: mol_type = other DNA
atgagaggcacccccaagacccacctgctggccttcagcctgctgtgcctgctgagcaaggtgagaacccagctgtgccccaccccctgcacctgcccctggcccccccccagatgccccctgggcgtgcccctggtgctggacggctgcggctgctgcagagtgtgcgccagaagactgggcgagccctgcgaccagctgcacgtgtgcgacgccagccagggcctggtgtgccagcccggcgccggccccggcggcagaggcgccctgtgcctgtgcaagcaggaccccagcttcctggccctgagcctgccctgccccctggtgagccccgcccagaacggcgccagacccggcgaccccgccagaccccccgtgggctgggcctggccccccggctgccccaccagaaccgccagcgccgactggagacccagcgccgcctgcgcctgccccggccccgcccacccccccggcgtggccgtgcacaagaccgtgcccagcagagccggcctgggcatgggcaccagatgcccccccagccccgccggcggccccgtgcccggcccctgggccgacggcagatggagcgtgcccagacccctggccgccggcaacaccctggcctgggtgcaccacgccgagcaccagtactag

SEQ ID NO: 105329 - DNA, 753 bp, synthetic construct; identical to SEQ ID NO: 105327
  misc_feature 1..753: note = Description of Artificial Sequence: Synthetic coding sequence
  source 1..753: mol_type = other DNA

SEQ ID NO: 105330 - DNA, 2571 bp, synthetic construct
  misc_feature 1..2571: note = Description of Artificial Sequence: Synthetic coding sequence
  source 1..2571: mol_type = other DNA
atggagagcgaggacctgagcggcagagagctgaccatcgacagcatcatgaacaaggtgagagacatcaagaacaagttcaagaacgaggacctgaccgacgagctgagcctgaacaagatcagcgccgacaccaccgacaacagcggcaccgtgaaccagatcatgatgatggccaacaaccccgaggactggctgagcctgctgctgaagctggagaagaacagcgtgcccctgagcgacgccctgctgaacaagctgatcggcagatacagccaggccatcgaggccctgccccccgacaagtacggccagaacgagagcttcgccagaatccaggtgagattcgccgagctgaaggccatccaggagcccgacgacgccagagactacttccagatggccagagccaactgcaagaagttcgccttcgtgcacatcagcttcgcccagttcgagctgagccagggcaacgtgaagaagagcaagcagctgctgcagaaggccgtggagagaggcgccgtgcccctggagatgctggagatcgccctgagaaacctgaacctgcagaagaagcagctgctgagcgaggaggagaagaagaacctgagcgccagcaccgtgctgaccgcccaggagagcttcagcggcagcctgggccacctgcagaacagaaacaacagctgcgacagcagaggccagaccaccaaggccagattcctgtacggcgagaacatgcccccccaggacgccgagatcggctacagaaacagcctgagacagaccaacaagaccaagcagagctgccccttcggcagagtgcccgtgaacctgctgaacagccccgactgcgacgtgaagaccgacgacagcgtggtgccctgcttcatgaagagacagaccagcagaagcgagtgcagagacctggtggtgcccggcagcaagcccagcggcaacgacagctgcgagctgagaaacctgaagagcgtgcagaacagccacttcaaggagcccctggtgagcgacgagaagagcagcgagctgatcatcaccgacagcatcaccctgaagaacaagaccgagagcagcctgctggccaagctggaggagaccaaggagtaccaggagcccgaggtgcccgagagcaaccagaagcagtggcagagcaagagaaagagcgagtgcatcaaccagaaccccgccgccagcagcaaccactggcagatccccgagctggccagaaaggtgaacaccgagaagcacaccaccttcgagcagcccgtgttcagcgtgagcaagcagagcccccccatcagcaccagcaagtggttcgaccccaagagcatctgcaagacccccagcagcaacaccctggacgactacatgagctgcttcagaacccccgtggtgaagaacgacttcccccccgcctgccagctgagcaccccctacggccagcccgcctgcttccagcagcagcagcaccagatcctggccacccccctgcagaacctgcaggtgctggccagcagcagcgccaacgagtgcatcagcgtgaagggcagaatctacagcatcctgaagcagatcggcagcggcggcagcagcaaggtgttccaggtgctgaacgagaagaagcagatctacgccatcaagtacgtgaacctggaggaggccgacaaccagaccctggacagctacagaaacgagatcgcctacctgaacaagctgcagcagcacagcgacaagatcatcagactgtacgactacgagatcaccgaccagtacatctacatggtgatggagtgcggcaacatcgacctgaacagctggctgaagaagaagaagagcatcgacccctgggagagaaagagctactggaagaacatgctggaggccgtgcacaccatccaccagcacggcatcgtgcacagcgacctgaagcccgccaacttcctgatcgtggacggcatgctgaagctgatcgacttcggcatcgccaaccagatgcagcccgacaccaccagcgtggtgaaggacagccaggtgggcaccgtgaactacatgccccccgaggccatcaaggacatgagcagcagcagagagaacggcaagagcaagagcaagatcagccccaagagcgacgtgtggagcctgggctgcatcctgtactacatgacctacggcaagacccccttccagcagatcatcaaccagatcagcaagctgcacgccatcatcgaccccaaccacgagatcgagttccccgacatccccgagaaggacctgcaggacgtgctgaagtgctgcctgaagagagaccccaagcagagaatcagcatccccgagctgctggcccacccctacgtgcagatccagacccaccccgtgaaccagatggccaagggcaccaccgaggagatgaagtacgtgctgggccagctggtgggcctgaacagccccaacagcatcctgaaggccgccaagaccctgtacgagcactacagcggcggcgagagccacaacagcagcagcagcaagaccttcgagaagaagagaggcaagaagtag

SEQ ID NO: 105331 - DNA, 1119 bp, synthetic construct
  misc_feature 1..1119: note = Description of Artificial Sequence: Synthetic coding sequence
  source 1..1119: mol_type = other DNA
atgaacaagagaagactgctgtaccccagcggctggctgcacggccccagcgacatgcagggcctgctgttcagcaccctgctgctggccggcctggcccagttctgctgcagagtgcagggcaccggccccctggacaccacccccgagggcagacccggcgaggtgagcgacgccccccagagaaagcagttctgccactggccctgcaagtgcccccagcagaagcccagatgcccccccggcgtgagcctggtgagagacggctgcggctgctgcaagatctgcgccaagcagcccggcgagatctgcaacgaggccgacctgtgcgacccccacaagggcctgtactgcgactacagcgtggacagacccagatacgagaccggcgtgtgcgcctacctggtggccgtgggctgcgagttcaaccaggtgcactaccacaacggccaggtgttccagcccaaccccctgttcagctgcctgtgcgtgagcggcgccatcggctgcacccccctgttcatccccaagctggccggcagccactgcagcggcgccaagggcggcaagaagagcgaccagagcaactgcagcctggagcccctgctgcagcagctgagcaccagctacaagaccatgcccgcctacagaaacctgcccctgatctggaagaagaagtgcctggtgcaggccaccaagtggaccccctgcagcagaacctgcggcatgggcatcagcaacagagtgaccaacgagaacagcaactgcgagatgagaaaggagaagagactgtgctacatccagccctgcgacagcaacatcctgaagaccatcaagatccccaagggcaagacctgccagcccaccttccagctgagcaaggccgagaagttcgtgttcagcggctgcagcagcacccagagctacaagcccaccttctgcggcatctgcctggacaagagatgctgcatccccaacaagagcaagatgatcaccatccagttcgactgccccaacgagggcagcttcaagtggaagatgctgtggatcaccagctgcgtgtgccagagaaactgcagagagcccggcgacatcttcagcgagctgaagatcctgtag

SEQ ID NO: 105332 - DNA, 996 bp, synthetic construct
  misc_feature 1..996: note = Description of Artificial Sequence: Synthetic coding sequence
  source 1..996: mol_type = other DNA
atgaagatcagcagaggcagagtgtgcctggagagcgagaacaaggacgccggcgtggccggcagaaagcagttctgccactggccctgcaagtgcccccagcagaagcccagatgcccccccggcgtgagcctggtgagagacggctgcggctgctgcaagatctgcgccaagcagcccggcgagatctgcaacgaggccgacctgtgcgacccccacaagggcctgtactgcgactacagcgtggacagacccagatacgagaccggcgtgtgcgcctgcaagagcgtgggctgcgagttcaaccaggtgcactaccacaacggccaggtgttccagcccaaccccctgttcagctgcctgtgcgtgagcggcgccatcggctgcacccccctgttcatccccaagctggccggcagccactgcagcggcgccaagggcggcaagaagagcgaccagagcaactgcagcctggagcccctgctgcagcagctgagcaccagctacaagaccatgcccgcctacagaaacctgcccctgatctggaagaagaagtgcctggtgcaggccaccaagtggaccccctgcagcagaacctgcggcatgggcatcagcaacagagtgaccaacgagaacagcaactgcgagatgagaaaggagaagagactgtgctacatccagccctgcgacagcaacatcctgaagaccatcaagatccccaagggcaagacctgccagcccaccttccagctgagcaaggccgagaagttcgtgttcagcggctgcagcagcacccagagctacaagcccaccttctgcggcatctgcctggacaagagatgctgcatccccaacaagagcaagatgatcaccatccagttcgactgccccaacgagggcagcttcaagtggaagatgctgtggatcaccagctgcgtgtgccagagaaactgcagagagcccggcgacatcttcagcgagctgaagatcctgtag

SEQ ID NO: 105333 - DNA, 1065 bp, synthetic construct; identical to SEQ ID NO: 86490
  misc_feature 1..1065: note = Description of Artificial Sequence: Synthetic coding sequence
  source 1..1065: mol_type = other DNA

SEQ ID NO: 105334 - DNA, 693 bp, synthetic construct
  misc_feature 1..693: note = Description of Artificial Sequence: Synthetic coding sequence
  source 1..693: mol_type = other DNA
atgcagggcctgctgttcagcaccctgctgctggccggcctggcccagttctgctgcagagtgcagggcaccggccccctggacaccacccccgagggcagacccggcgaggtgagcgacgccccccagagaaagcagttctgccactggccctgcaagtgcccccagcagaagcccagatgcccccccggcgtgagcctggtgagagacggctgcggctgctgcaagatctgcgccaagcagcccggcgagatctgcaacgaggccgacctgtgcgacccccacaagggcctgtactgcgactacagcgtggacagacccagatacgagaccggcgtgtgcgcctacctggtggccgtgggctgcgagttcaaccaggtgcactaccacaacggccaggtgttccagcccaaccccctgttcagctgcctgtgcgtgagcggcgccatcggctgcacccccctgttcatccccaagctggccggcagccactgcagcggcgccaagggcggcaagaagagcgaccagagcaactgcagcctggagcccctgctgcagcagctgagcaccagctacaagaccatgcccgcctacagaaacctgcccctgatctggaagaagaacgtgctgtgcaagcagcagaacggcctgcccgcccccgagcacgtgggctgggagtacctgaccggctag

SEQ ID NO: 105335 - DNA, 393 bp, synthetic construct
  misc_feature 1..393: note = Description of Artificial Sequence: Synthetic coding sequence
  source 1..393: mol_type = other DNA
atgggcatcagcaacagagtgaccaacgagaacagcaactgcgagatgagaaaggagaagagactgtgctacatccagccctgcgacagcaacatcctgaagaccatcaagatccccaagggcaagacctgccagcccaccttccagctgagcaaggccgagaagttcgtgttcagcggctgcagcagcacccagagctacaagcccaccttctgcggcatctgcctggacaagagatgctgcatccccaacaagagcaagatgatcaccatccagttcgactgccccaacgagggcagcttcaagtggaagatgctgtggatcaccagctgcgtgtgccagagaaactgcagagagcccggcgacatcttcagcgagctgaagatcctgtag

SEQ ID NO: 105336 - DNA, 1626 bp, synthetic construct
  misc_feature 1..1626: note = Description of Artificial Sequence: Synthetic coding sequence
  source 1..1626: mol_type = other DNA
atggccggcgccatcatcgagaacatgagcaccaagaagctgtgcatcgtgggcggcatcctgctggtgttccagatcatcgccttcctggtgggcggcctgatcgcccccggccccaccaccgccgtgagctacatgagcgtgaagtgcgtggacgccagaaagaaccaccacaagaccaagtggttcgtgccctggggccccaaccactgcgacaagatcagagacatcgaggaggccatccccagagagatcgaggccaacgacatcgtgttcagcgtgcacatccccctgccccacatggagatgagcccctggttccagttcatgctgttcatcctgcagctggacatcgccttcaagctgaacaaccagatcagagagaacgccgaggtgagcatggacgtgagcctggcctacagagacgacgccttcgccgagtggaccgagatggcccacgagagagtgcccagaaagctgaagtgcaccttcaccagccccaagacccccgagcacgagggcagatactacgagtgcgacgtgctgcccttcatggagatcggcagcgtggcccacaagttctacctgctgaacatcagactgcccgtgaacgagaagaagaagatcaacgtgggcatcggcgagatcaaggacatcagactggtgggcatccaccagaacggcggcttcaccaaggtgtggttcgccatgaagaccttcctgacccccagcatcttcatcatcatggtgtggtactggagaagaatcaccatgatgagcagaccccccgtgctgctggagaaggtgatcttcgccctgggcatcagcatgaccttcatcaacatccccgtggagtggttcagcatcggcttcgactggacctggatgctgctgttcggcgacatcagacagggcatcttctacgccatgctgctgagcttctggatcatcttctgcggcgagcacatgatggaccagcacgagagaaaccacatcgccggctactggaagcaggtgggccccatcgccgtgggcagcttctgcctgttcatcttcgacatgtgcgagagaggcgtgcagctgaccaaccccttctacagcatctggaccaccgacatcggcaccgagctggccatggccttcatcatcgtggccggcatctgcctgtgcctgtacttcctgttcctgtgcttcatggtgttccaggtgttcagaaacatcagcggcaagcagagcagcctgcccgccatgagcaaggtgagaagactgcactacgagggcctgatcttcagattcaagttcctgatgctgatcaccctggcctgcgccgccatgaccgtgatcttcttcatcgtgagccaggtgaccgagggccactggaagtggggcggcgtgaccgtgcaggtgaacagcgccttcttcaccggcatctacggcatgtggaacctgtacgtgttcgccctgatgttcctgtacgcccccagccacaagaactacggcgaggaccagagcaacggcgacctgggcgtgcacagcggcgaggagctgcagctgaccaccaccatcacccacgtggacggccccaccgagatctacaagctgaccagaaaggaggcccaggagtag

SEQ ID NO: 105337 - DNA, 1632 bp, synthetic construct
  misc_feature 1..1632: note = Description of Artificial Sequence: Synthetic coding sequence
  source 1..1632: mol_type = other DNA
atggccggcgccatcatcgagaacatgagcaccaagaagctgtgcatcgtgggcggcatcctgctggtgttccagatcatcgccttcctggtgggcggcctgatcggccccaccaccgccgtgagctacatgagcgtgaagtgcgtggacgccagaaagaaccaccacaagaccaagtggttcgtgccctggggccccaaccactgcgacaagatcagagacatcgaggaggccatccccagagagatcgaggccaacgacatcgtgttcagcgtgcacatccccctgccccacatggagatgagcccctggttccagttcatgctgttcatcctgcagctggacatcgccttcaagctgaacaaccagatcagagagaacgccgaggtgagcatggacgtgagcctggcctacagagacgacgccttcgccgagtggaccgagatggcccacgagagagtgcccagaaagctgaagtgcaccttcaccagccccaagacccccgagcacgagggcagatactacgagtgcgacgtgctgcccttcatggagatcggcagcgtggcccacaagttctacctgctgaacatcagactgcccgtgaacgagaagaagaagatcaacgtgggcatcggcgagatcaaggacatcagactggtgggcatccaccagaacggcggcttcaccaaggtgtggttcgccatgaagaccttcctgacccccagcatcttcatcatcatggtgtggtactggagaagaatcaccatgatgagcagaccccccgtgctgctggagaaggtgatcttcgccctgggcatcagcatgaccttcatcaacatccccgtggagtggttcagcatcggcttcgactggacctggatgctgctgttcggcgacatcagacagggcatcttctacgccatgctgctgagcttctggatcatcttctgcggcgagcacatgatggaccagcacgagagaaaccacatcgccggctactggaagcaggtgggccccatcgccgtgggcagcttctgcctgttcatcttcgacatgtgcgagagaggcgtgcagctgaccaaccccttctacagcatctggaccaccgacatcggcaccgagctggccatggccttcatcatcgtggccggcatctgcctgtgcctgtacttcctgttcctgtgcttcatggtgttccaggtgttcagaaacatcagcggcaagcagagcagcctgcccgccatgagcaaggtgagaagactgcactacgagggcctgatcttcagattcaagttcctgatgctgatcaccctggcctgcgccgccatgaccgtgatcttcttcatcgtgagccaggtgaccgagggccactggaagtggggcggcgtgaccgtgcaggtgaacagcgccttcttcaccggcatctacggcatgtggaacctgtacgtgttcgccctgatgttcctgtacgcccccagccacaagaactacggcgaggaccagagcaacggcatgcagctgccctgcaagagcagagaggactgcgccctgttcgtgagcgagctgtaccaggagctgttcagcgccagcaagtacagcttcatcaacgacaacgccgccagcggcatctag

SEQ ID NO: 105338 - DNA, 1353 bp, synthetic construct
  misc_feature 1..1353: note = Description of Artificial Sequence: Synthetic coding sequence
  source 1..1353: mol_type = other DNA
atggccggcgccatcatcgagaacatgagcaccaagaagctgtgcatcgtgggcggcatcctgctggtgttccagatcatcgccttcctggtgggcggcctgatcggcgagaacgccgaggtgagcatggacgtgagcctggcctacagagacgacgccttcgccgagtggaccgagatggcccacgagagagtgcccagaaagctgaagtgcaccttcaccagccccaagacccccgagcacgagggcagatactacgagtgcgacgtgctgcccttcatggagatcggcagcgtggcccacaagttctacctgctgaacatcagactgcccgtgaacgagaagaagaagatcaacgtgggcatcggcgagatcaaggacatcagactggtgggcatccaccagaacggcggcttcaccaaggtgtggttcgccatgaagaccttcctgacccccagcatcttcatcatcatggtgtggtactggagaagaatcaccatgatgagcagaccccccgtgctgctggagaaggtgatcttcgccctgggcatcagcatgaccttcatcaacatccccgtggagtggttcagcatcggcttcgactggacctggatgctgctgttcggcgacatcagacagggcatcttctacgccatgctgctgagcttctggatcatcttctgcggcgagcacatgatggaccagcacgagagaaaccacatcgccggctactggaagcaggtgggccccatcgccgtgggcagcttctgcctgttcatcttcgacatgtgcgagagaggcgtgcagctgaccaaccccttctacagcatctggaccaccgacatcggcaccgagctggccatggccttcatcatcgtggccggcatctgcctgtgcctgtacttcctgttcctgtgcttcatggtgttccaggtgttcagaaacatcagcggcaagcagagcagcctgcccgccatgagcaaggtgagaagactgcactacgagggcctgatcttcagattcaagttcctgatgctgatcaccctggcctgcgccgccatgaccgtgatcttcttcatcgtgagccaggtgaccgagggccactggaagtggggcggcgtgaccgtgcaggtgaacagcgccttcttcaccggcatctacggcatgtggaacctgtacgtgttcgccctgatgttcctgtacgcccccagccacaagaactacggcgaggaccagagcaacggcgacctgggcgtgcacagcggcgaggagctgcagctgaccaccaccatcacccacgtggacggccccaccgagatctacaagctgaccagaaaggaggcccaggagtag

SEQ ID NO: 105339 - DNA, 1638 bp, synthetic construct
  misc_feature 1..1638: note = Description of Artificial Sequence: Synthetic coding sequence
  source 1..1638: mol_type = other DNA
atggccggcgccatcatcgagaacatgagcaccaagaagctgtgcatcgtgggcggcatcctgctggtgttccagatcatcgccttcctggtgggcggcctgatcgcccccggccccaccaccgccgtgagctacatgagcgtgaagtgcgtggacgccagaaagaaccaccacaagaccaagtggttcgtgccctggggccccaaccactgcgacaagatcagagacatcgaggaggccatccccagagagatcgaggccaacgacatcgtgttcagcgtgcacatccccctgccccacatggagatgagcccctggttccagttcatgctgttcatcctgcagctggacatcgccttcaagctgaacaaccagatcagagagaacgccgaggtgagcatggacgtgagcctggcctacagagacgacgccttcgccgagtggaccgagatggcccacgagagagtgcccagaaagctgaagtgcaccttcaccagccccaagacccccgagcacgagggcagatactacgagtgcgacgtgctgcccttcatggagatcggcagcgtggcccacaagttctacctgctgaacatcagactgcccgtgaacgagaagaagaagatcaacgtgggcatcggcgagatcaaggacatcagactggtgggcatccaccagaacggcggcttcaccaaggtgtggttcgccatgaagaccttcctgacccccagcatcttcatcatcatggtgtggtactggagaagaatcaccatgatgagcagaccccccgtgctgctggagaaggtgatcttcgccctgggcatcagcatgaccttcatcaacatccccgtggagtggttcagcatcggcttcgactggacctggatgctgctgttcggcgacatcagacagggcatcttctacgccatgctgctgagcttctggatcatcttctgcggcgagcacatgatggaccagcacgagagaaaccacatcgccggctactggaagcaggtgggccccatcgccgtgggcagcttctgcctgttcatcttcgacatgtgcgagagaggcgtgcagctgaccaaccccttctacagcatctggaccaccgacatcggcaccgagctggccatggccttcatcatcgtggccggcatctgcctgtgcctgtacttcctgttcctgtgcttcatggtgttccaggtgttcagaaacatcagcggcaagcagagcagcctgcccgccatgagcaaggtgagaagactgcactacgagggcctgatcttcagattcaagttcctgatgctgatcaccctggcctgcgccgccatgaccgtgatcttcttcatcgtgagccaggtgaccgagggccactggaagtggggcggcgtgaccgtgcaggtgaacagcgccttcttcaccggcatctacggcatgtggaacctgtacgtgttcgccctgatgttcctgtacgcccccagccacaagaactacggcgaggaccagagcaacggcatgcagctgccctgcaagagcagagaggactgcgccctgttcgtgagcgagctgtaccaggagctgttcagcgccagcaagtacagcttcatcaacgacaacgccgccagcggcatctag

SEQ ID NO: 105340 - DNA, 2142 bp, synthetic construct
  misc_feature 1..2142: note = Description of Artificial Sequence: Synthetic coding sequence
  source 1..2142: mol_type = other DNA
atggccggcagcttctgctggagaatgctgggcctggtgagcaaggtgggcaacagagccagatgcttcagcagcatggccgccagcgaggaggagctgctggacttcagcggcagcgagctgcagttcaacagctgcagcctgcacctgagcctgcaccccttcttcaacttcctgctgggcatccacagctgcttcgtgtgcaaggagagcaagaccgacgtgaagagatgcgtggtgacccagtgcggcaagttctaccacgaggcctgcgtgaagaagtaccccctgaccgtgttcgagagcagaggcttcagatgccccctgcacagctgcgtgagctgccacgccagcaaccccagcaaccccagacccagcaagggcaagatgatgagatgcgtgagatgccccgtggcctaccacagcggcgacgcctgcctggccgccggctgcagcgtgatcgccagcaacagcatcatctgcaccgcccacttcaccgccagaaagggcaagagacaccacgcccacgtgaacgtgagctggtgcttcgtgtgcagcaagggcggcagcctgctgtgctgcgagagctgccccgccgccttccaccccgactgcctgaacatcgagatgcccgacggcagctggttctgcaacgactgcagagccggcaagaagctgcacttccaggacatcatctgggtgaagctgggcaactacagatggtggcccgccgaggtgtgccaccccaagaacgtgccccccaacatccagaagatgaagcacgagatcggcgagttccccgtgttcttcttcggcagcaaggactactactggacccaccaggccagagtgttcccctacatggagggcgacagaggcagcagataccagggcgtgagaggcatcggcagagtgttcaagaacgccctgcaggaggccgaggccagattcagagagatcaagctgcagagagaggccagagagacccaggagagcgagagaaagccccccccctacaagcacatcaaggtgaacaagccctacggcaaggtgcagatctacaccgccgacatcagcgagatccccaagtgcaactgcaagcccaccgacgagaacccctgcggcttcgacagcgagtgcctgaacagaatgctgatgttcgagtgccacccccaggtgtgccccgccggcgagttctgccagaaccagtgcttcaccaagagacagtaccccgagaccaagatcatcaagaccgacggcaagggctggggcctggtggccaagagagacatcagaaagggcgagttcgtgaacgagtacgtgggcgagctgatcgacgaggaggagtgcatggccagaatcaagcacgcccacgagaacgacatcacccacttctacatgctgaccatcgacaaggacagaatcatcgacgccggccccaagggcaactacagcagattcatgaaccacagctgccagcccaactgcgagaccctgaagtggaccgtgaacggcgacaccagagtgggcctgttcgccgtgtgcgacatccccgccggcaccgagctgaccttcaactacaacctggactgcctgggcaacgagaagaccgtgtgcagatgcggcgccagcaactgcagcggcttcctgggcgacagacccaagaccagcaccaccctgagcagcgaggagaagggcaagaagaccaagaagaagaccagaagaagaagagccaagggcgagggcaagagacagagcgaggacgagtgcttcagatgcggcgacggcggccagctggtgctgtgcgacagaaagttctgcaccaaggcctaccacctgagctgcctgggcctgggcaagagacccttcggcaagtgggagtgcccctggcaccactgcgacgtgtgcggcaagcccagcaccagcttctgccacctgtgccccaacagcttctgcaaggagcaccaggacggcaccgccttcagctgcacccccgacggcagaagctactgctgcgagcacgacctgggcgccgccagcgtgagaagcaccaagaccgagaagcccccccccgagcccggcaagcccaagggcaagagaagaagaagaagaggctggagaagagtgaccgagggcaagtag

SEQ ID NO: 105341 - DNA, 4098 bp, synthetic construct
  misc_feature 1..4098: note = Description of Artificial Sequence: Synthetic coding sequence
  source 1..4098: mol_type = other DNA
atggagttcagcatcaagcagagccccctgagcgtgcagagcgtggtgaagtgcatcaagatgaagcaggcccccgagatcctgggcagcgccaacggcaagacccccagctgcgaggtgaacagagagtgcagcgtgttcctgagcaaggcccagctgagcagcagcctgcaggagggcgtgatgcagaagttcaacggccacgacgccctgcccttcatccccgccgacaagctgaaggacctgaccagcagagtgttcaacggcgagcccggcgcccacgacgccaagctgagattcgagagccaggagatgaagggcatcggcaccccccccaacaccacccccatcaagaacggcagccccgagatcaagctgaagatcaccaagacctacatgaacggcaagcccctgttcgagagcagcatctgcggcgacagcgccgccgacgtgagccagagcgaggagaacggccagaagcccgagaacaaggccagaagaaacagaaagagaagcatcaagtacgacagcctgctggagcagggcctggtggaggccgccctggtgagcaagatcagcagccccagcgacaagaagatccccgccaagaaggagagctgccccaacaccggcagagacaaggaccacctgctgaagtacaacgtgggcgacctggtgtggagcaaggtgagcggctacccctggtggccctgcatggtgagcgccgaccccctgctgcacagctacaccaagctgaagggccagaagaagagcgccagacagtaccacgtgcagttcttcggcgacgcccccgagagagcctggatcttcgagaagagcctggtggccttcgagggcgagggccagttcgagaagctgtgccaggagagcgccaagcaggcccccaccaaggccgagaagatcaagctgctgaagcccatcagcggcaagctgagagcccagtgggagatgggcatcgtgcaggccgaggaggccgccagcatgagcgtggaggagagaaaggccaagttcaccttcctgtacgtgggcgaccagctgcacctgaacccccaggtggccaaggaggccggcatcgccgccgagagcctgggcgagatggccgagagcagcggcgtgagcgaggaggccgccgagaaccccaagagcgtgagagaggagtgcatccccatgaagagaagaagaagagccaagctgtgcagcagcgccgagaccctggagagccaccccgacatcggcaagagcaccccccagaagaccgccgaggccgaccccagaagaggcgtgggcagcccccccggcagaaagaagaccaccgtgagcatgcccagaagcagaaagggcgacgccgccagccagttcctggtgttctgccagaagcacagagacgaggtggtggccgagcaccccgacgccagcggcgaggagatcgaggagctgctgagaagccagtggagcctgctgagcgagaagcagagagccagatacaacaccaagttcgccctggtggcccccgtgcaggccgaggaggacagcggcaacgtgaacggcaagaagagaaaccacaccaagagaatccaggaccccaccgaggacgccgaggccgaggacacccccagaaagagactgagaaccgacaagcacagcctgagaaagagagacaccatcaccgacaagaccgccagaaccagcagctacaaggccatggaggccgccagcagcctgaagagccaggccgccaccaagaacctgagcgacgcctgcaagcccctgaagaagagaaacagagccagcaccgccgccagcagcgccctgggcttcagcaagagcagcagccccagcgccagcctgaccgagaacgaggtgagcgacagccccggcgacgagcccagcgagagcccctacgagagcgccgacgagacccagaccgaggtgagcgtgagcagcaagaagagcgagagaggcgtgaccgccaagaaggagtacgtgtgccagctgtgcgagaagcccggcagcctgctgctgtgcgagggcccctgctgcggcgccttccacctggcctgcctgggcctgagcagaagacccgagggcagattcacctgcagcgagtgcgccagcggcatccacagctgcttcgtgtgcaaggagagcaagaccgacgtgaagagatgcgtggtgacccagtgcggcaagttctaccacgaggcctgcgtgaagaagtaccccctgaccgtgttcgagagcagaggcttcagatgccccctgcacagctgcgtgagctgccacgccagcaaccccagcaaccccagacccagcaagggcaagatgatgagatgcgtgagatgccccgtggcctaccacagcggcgacgcctgcctggccgccggctgcagcgtgatcgccagcaacagcatcatctgcaccgcccacttcaccgccagaaagggcaagagacaccacgcccacgtgaacgtgagctggtgcttcgtgtgcagcaagggcggcagcctgctgtgctgcgagagctgccccgccgccttccaccccgactgcctgaacatcgagatgcccgacggcagctggttctgcaacgactgcagagccggcaagaagctgcacttccaggacatcatctgggtgaagctgggcaactacagatggtggcccgccgaggtgtgccaccccaagaacgtgccccccaacatccagaagatgaagcacgagatcggcgagttccccgtgttcttcttcggcagcaaggactactactggacccaccaggccagagtgttcccctacatggagggcgacagaggcagcagataccagggcgtgagaggcatcggcagagtgttcaagaacgccctgcaggaggccgaggccagattcagagagatcaagctgcagagagaggccagagagacccaggagagcgagagaaagccccccccctacaagcacatcaaggtgaacaagccctacggcaaggtgcagatctacaccgccgacatcagcgagatccccaagtgcaactgcaagcccaccgacgagaacccctgcggcttcgacagcgagtgcctgaacagaatgctgatgttcgagtgccacccccaggtgtgccccgccggcgagttctgccagaaccagtgcttcaccaagagacagtaccccgagaccaagatcatcaagaccgacggcaagggctggggcctggtggccaagagagacatcagaaagggcgagttcgtgaacgagtacgtgggcgagctgatcgacgaggaggagtgcatggccagaatcaagcacgcccacgagaacgacatcacccacttctacatgctgaccatcgacaaggacagaatcatcgacgccggccccaagggcaactacagcagattcatgaaccacagctgccagcccaactgcgagaccctgaagtggaccgtgaacggcgacaccagagtgggcctgttcgccgtgtgcgacatccccgccggcaccgagctgaccttcaactacaacctggactgcctgggcaacgagaagaccgtgtgcagatgcggcgccagcaactgcagcggcttcctgggcgacagacccaagaccagcaccaccctgagcagcgaggagaagggcaagaagaccaagaagaagaccagaagaagaagagccaagggcgagggcaagagacagagcgaggacgagtgcttcagatgcggcgacggcggccagctggtgctgtgcgacagaaagttctgcaccaaggcctaccacctgagctgcctgggcctgggcaagagacccttcggcaagtgggagtgcccctggcaccactgcgacgtgtgcggcaagcccagcaccagcttctgccacctgtgccccaacagcttctgcaaggagcaccaggacggcaccgccttcagctgcacccccgacggcagaagctactgctgcgagcacgacctgggcgccgccagcgtgagaagcaccaagaccgagaagcccccccccgagcccggcaagcccaagggcaagagaagaagaagaagaggctggagaagagtgaccgagggcaagtag

SEQ ID NO: 105342 - DNA, 4098 bp, synthetic construct; identical to SEQ ID NO: 105341
  misc_feature 1..4098: note = Description of Artificial Sequence: Synthetic coding sequence
  source 1..4098: mol_type = other DNA

SEQ ID NO: 105343 - DNA, 4098 bp, synthetic construct; identical to SEQ ID NO: 105341
  misc_feature 1..4098: note = Description of Artificial Sequence: Synthetic coding sequence
  source 1..4098: mol_type = other DNA

SEQ ID NO: 105344 - DNA, 1944 bp, synthetic construct
  misc_feature 1..1944: note = Description of Artificial Sequence: Synthetic coding sequence
  source 1..1944: mol_type = other DNA
atggagttcagcatcaagcagagccccctgagcgtgcagagcgtggtgaagtgcatcaagatgaagcaggcccccgagatcctgggcagcgccaacggcaagacccccagctgcgaggtgaacagagagtgcagcgtgttcctgagcaaggcccagctgagcagcagcctgcaggagggcgtgatgcagaagttcaacggccacgacgccctgcccttcatccccgccgacaagctgaaggacctgaccagcagagtgttcaacggcgagcccggcgcccacgacgccaagctgagattcgagagccaggagatgaagggcatcggcaccccccccaacaccacccccatcaagaacggcagccccgagatcaagctgaagatcaccaagacctacatgaacggcaagcccctgttcgagagcagcatctgcggcgacagcgccgccgacgtgagccagagcgaggagaacggccagaagcccgagaacaaggccagaagaaacagaaagagaagcatcaagtacgacagcctgctggagcagggcctggtggaggccgccctggtgagcaagatcagcagccccagcgacaagaagatccccgccaagaaggagagctgccccaacaccggcagagacaaggaccacctgctgaagtacaacgtgggcgacctggtgtggagcaaggtgagcggctacccctggtggccctgcatggtgagcgccgaccccctgctgcacagctacaccaagctgaagggccagaagaagagcgccagacagtaccacgtgcagttcttcggcgacgcccccgagagagcctggatcttcgagaagagcctggtggccttcgagggcgagggccagttcgagaagctgtgccaggagagcgccaagcaggcccccaccaaggccgagaagatcaagctgctgaagcccatcagcggcaagctgagagcccagtgggagatgggcatcgtgcaggccgaggaggccgccagcatgagcgtggaggagagaaaggccaagttcaccttcctgtacgtgggcgaccagctgcacctgaacccccaggtggccaaggaggccggcatcgccgccgagagcctgggcgagatggccgagagcagcggcgtgagcgaggaggccgccgagaaccccaagagcgtgagagaggagtgcatccccatgaagagaagaagaagagccaagctgtgcagcagcgccgagaccctggagagccaccccgacatcggcaagagcaccccccagaagaccgccgaggccgaccccagaagaggcgtgggcagcccccccggcagaaagaagaccaccgtgagcatgcccagaagcagaaagggcgacgccgccagccagttcctggtgttctgccagaagcacagagacgaggtggtggccgagcaccccgacgccagcggcgaggagatcgaggagctgctgagaagccagtggagcctgctgagcgagaagcagagagccagatacaacaccaagttcgccctggtggcccccgtgcaggccgaggaggacagcggcaacgtgaacggcaagaagagaaaccacaccaagagaatccaggaccccaccgaggacgccgaggccgaggacacccccagaaagagactgagaaccgacaagcacagcctgagaaagagagacaccatcaccgacaagaccgccagaaccagcagctacaaggccatggaggccgccagcagcctgaagagccaggccgccaccaagaacctgagcgacgcctgcaagcccctgaagaagagaaacagagccagcaccgccgccagcagcgccctgggcttcagcaagagcagcagccccagcgccagcctgaccgagaacgagctgctgtgggagcccacccccgtgaagctggacctgaaccccgccgccctgtactgcacctag

SEQ ID NO: 105345 - DNA, 1890 bp, synthetic construct
  misc_feature 1..1890: note = Description of Artificial Sequence: Synthetic coding sequence
  source 1..1890: mol_type = other DNA
atggagttcagcatcaagcagagccccctgagcgtgcagagcgtggtgaagtgcatcaagatgaagcaggcccccgagatcctgggcagcgccaacggcaagacccccagctgcgaggtgaacagagagtgcagcgtgttcctgagcaaggcccagctgagcagcagcctgcaggagggcgtgatgcagaagttcaacggccacgacgccctgcccttcatccccgccgacaagctgaaggacctgaccagcagagtgttcaacggcgagcccggcgcccacgacgccaagctgagattcgagagccaggagatgaagggcatcggcaccccccccaacaccacccccatcaagaacggcagccccgagatcaagctgaagatcaccaagacctacatgaacggcaagcccctgttcgagagcagcatctgcggcgacagcgccgccgacgtgagccagagcgaggagaacggccagaagcccgagaacaaggccagaagaaacagaaagagaagcatcaagtacgacagcctgctggagcagggcctggtggaggccgccctggtgagcaagatcagcagccccagcgacaagaagatccccgccaagaaggagagctgccccaacaccggcagagacaaggaccacctgctgaagtacaacgtgggcgacctggtgtggagcaaggtgagcggctacccctggtggccctgcatggtgagcgccgaccccctgctgcacagctacaccaagctgaagggccagaagaagagcgccagacagtaccacgtgcagttcttcggcgacgcccccgagagagcctggatcttcgagaagagcctggtggccttcgagggcgagggccagttcgagaagctgtgccaggagagcgccaagcaggcccccaccaaggccgagaagatcaagctgctgaagcccatcagcggcaagctgagagcccagtgggagatgggcatcgtgcaggccgaggaggccgccagcatgagcgtggaggagagaaaggccaagttcaccttcctgtacgtgggcgaccagctgcacctgaacccccaggtggccaaggaggccggcatcgccgccgagagcctgggcgagatggccgagagcagcggcgtgagcgaggaggccgccgagaaccccaagagcgtgagagaggagtgcatccccatgaagagaagaagaagagccaagctgtgcagcagcgccgagaccctggagagccaccccgacatcggcaagagcaccccccagaagaccgccgaggccgaccccagaagaggcgtgggcagcccccccggcagaaagaagaccaccgtgagcatgcccagaagcagaaagggcgacgccgccagccagttcctggtgttctgccagaagcacagagacgaggtggtggccgagcaccccgacgccagcggcgaggagatcgaggagctgctgagaagccagtggagcctgctgagcgagaagcagagagccagatacaacaccaagttcgccctggtggcccccgtgcaggccgaggaggacagcggcaacgtgaacggcaagaagagaaaccacaccaagagaatccaggaccccaccgaggacgccgaggccgaggacacccccagaaagagactgagaaccgacaagcacagcctgagaaagagagacaccatcaccgacaagaccgccagaaccagcagctacaaggccatggaggccgccagcagcctgaagagccaggccgccaccaagaacctgagcgacgcctgcaagcccctgaagaagagaaacagagccagcaccgccgccagcagcgccctgggcttcagcaagagcagcagccccagcgccagcctgaccgagaacgaggtgaagtag

SEQ ID NO: 105346 - DNA, 822 bp, synthetic construct
  misc_feature 1..822: note = Description of Artificial Sequence: Synthetic coding sequence
  source 1..822: mol_type = other DNA
atggagttcagcatcaagcagagccccctgagcgtgcagagcgtggtgaagtgcatcaagatgaagcaggcccccgagatcctgggcagcgccaacggcaagacccccagctgcgaggtgaacagagagtgcagcgtgttcctgagcaaggcccagctgagcagcagcctgcaggagggcgtgatgcagaagttcaacggccacgacgccctgcccttcatccccgccgacaagctgaaggacctgaccagcagagtgttcaacggcgagcccggcgcccacgacgccaagctgagattcgagagccaggagatgaagggcatcggcaccccccccaacaccacccccatcaagaacggcagccccgagatcaagctgaagatcaccaagacctacatgaacggcaagcccctgttcgagagcagcatctgcggcgacagcgccgccgacgtgagccagagcgaggagaacggccagaagcccgagaacaaggccagaagaaacagaaagagaagcatcaagtacgacagcctgctggagcagggcctggtggaggccgccctggtgagcaagatcagcagccccagcgacaagaagatccccgccaagaaggagagctgccccaacaccggcagagacaaggaccacctgctgaagtacaacgtgggcgacctggtgtggagcaaggtgagcggctacccctggtggccctgcatggtgagcgccgaccccctgctgcacagctacaccaagctgaagggcatcttcaagagcaagaagttcgagcacctgaagaccagccagatcgtgctgaaggactag

SEQ ID NO: 105347 - DNA, 1944 bp, synthetic construct; identical to SEQ ID NO: 105344
  misc_feature 1..1944: note = Description of Artificial Sequence: Synthetic coding sequence
  source 1..1944: mol_type = other DNA

SEQ ID NO: 105348 - DNA, 114 bp, synthetic construct
  misc_feature 1..114: note = Description of Artificial Sequence: Synthetic coding sequence
  source 1..114: mol_type = other DNA
atggagttcagcatcaagcagagccccctgagcgtgcagagcgtggtgaagtgcatcaagatgaagcaggcccccgagatcctgggcagcgccaacggcaagacccccagctag

SEQ ID NO: 105349 - DNA, 4098 bp, synthetic construct; identical to SEQ ID NO: 105341
  misc_feature 1..4098: note = Description of Artificial Sequence: Synthetic coding sequence
  source 1..4098: mol_type = other DNA

SEQ ID NO: 105350 - DNA, 1179 bp, synthetic construct
  misc_feature 1..1179: note = Description of Artificial Sequence: Synthetic coding sequence
  source 1..1179: mol_type = other DNA
atggagttcagcatcaagcagagccccctgagcgtgcagagcgtggtgaagtgcatcaagatgaagcaggcccccgagatcctgggcagcgccaacggcaagacccccagctgcgaggtgaacagagagtgcagcgtgttcctgagcaaggcccagctgagcagcagcctgcaggagggcgtgatgcagaagttcaacggccacgacgccctgcccttcatccccgccgacaagctgaaggacctgaccagcagagtgttcaacggcgagcccggcgcccacgacgccaagctgagattcgagagccaggagatgaagggcatcggcaccccccccaacaccacccccatcaagaacggcagccccgagatcaagctgaagatcaccaagacctacatgaacggcaagcccctgttcgagagcagcatctgcggcgacagcgccgccgacgtgagccagagcgaggagaacggccagaagcccgagaacaaggccagaagaaacagaaagagaagcatcaagtacgacagcctgctggagcagggcctggtggaggccgccctggtgagcaagatcagcagccccagcgacaagaagatccccgccaagaaggagagctgccccaacaccggcagagacaaggaccacctgctgaagtacaacgtgggcgacctggtgtggagcaaggtgagcggctacccctggtggccctgcatggtgagcgccgaccccctgctgcacagctacaccaagctgaagggccagaagaagagcgccagacagtaccacgtgcagttcttcggcgacgcccccgagagagcctggatcttcgagaagagcctggtggccttcgagggcgagggccagttcgagaagctgtgccaggagagcgccaagcaggcccccaccaaggccgagaagatcaagctgctgaagcccatcagcggcaagctgagagcccagtgggagatgggcatcgtgcaggccgaggaggccgccagcatgagcgtggaggagagaaaggccaagttcaccttcctgtacgtgggcgaccagctgcacctgaacccccaggtggccaaggaggccggcatcgccgccgagagcctgggcgagatggccgagagcagcggcgtgagcgaggaggccgccgagaaccccaagagcgtgagagagtag

SEQ ID NO: 105351 - DNA, 1890 bp, synthetic construct; identical to SEQ ID NO: 105345
  misc_feature 1..1890: note = Description of Artificial Sequence: Synthetic coding sequence
  source 1..1890: mol_type = other DNA

SEQ ID NO: 105352 - DNA, 600 bp, synthetic construct
  misc_feature 1..600: note = Description of Artificial Sequence: Synthetic coding sequence
  source 1..600: mol_type = other DNA
atggagttcagcatcaagcagagccccctgagcgtgcagagcgtggtgaagtgcatcaagatgaagcaggcccccgagatcctgggcagcgccaacggcaagacccccagctgcgaggtgaacagagagtgcagcgtgttcctgagcaaggcccagctgagcagcagcctgcaggagggcgtgatgcagaagttcaacggccacgacgccctgcccttcatccccgccgacaagctgaaggacctgaccagcagagtgttcaacggcgagcccggcgcccacgacgccaagctgagattcgagagccaggagatgaagggcatcggcaccccccccaacaccacccccatcaagaacggcagccccgagatcaagctgaagatcaccaagacctacatgaacggcaagcccctgttcgagagcagcatctgcggcgacagcgccgccgacgtgagccagagcgaggagaacggccagaagcccgagaacaaggccagaagaaacagaaagagaagcatcaagtacgacagcctgctggagcagggcctggtggaggccgccctggtgagcaagatcagcagccccagcgacaagaagtag

SEQ ID NO: 105353 - DNA, 1938 bp, synthetic construct
  misc_feature 1..1938: note = Description of Artificial Sequence: Synthetic coding sequence
  source 1..1938: mol_type = other DNA
atggacttcagcttcagcttcatgcagggcatcatgggcaacaccatccagcagcccccccagctgatcgacagcgccaacatcagacaggaggacgccttcgacaacaacagcgacatcgccgaggacggcggccagaccccctacgaggccaccctgcagcagggcttccagtaccccgccaccaccgaggacctgccccccctgaccaacggctaccccagcagcatcagcgtgtacgagacccagaccaagtaccagagctacaaccagtaccccaacggcagcgccaacggcttcggcgccgtgagaaacttcagccccaccgactactaccacagcgagatccccaacaccagaccccacgagatcctggagaagcccagccccccccagcccccccccccccccagcgtgccccagaccgtgatccccaagaagaccggcagccccgagatcaagctgaagatcaccaagaccatccagaacggcagagagctgttcgagagcagcctgtgcggcgacctgctgaacgaggtgcaggccagcgagcacaccaagagcaagcacgagagcagaaaggagaagagaaagaagagcaacaagcacgacagcagcagaagcgaggagagaaagagccacaagatccccaagctggagcccgaggagcagaacagacccaacgagagagtggacaccgtgagcgagaagcccagagaggagcccgtgctgaaggaggaggcccccgtgcagcccatcctgagcagcgtgcccaccaccgaggtgagcaccggcgtgaagttccaggtgggcgacctggtgtggagcaaggtgggcacctacccctggtggccctgcatggtgagcagcgacccccagctggaggtgcacaccaagatcaacaccagaggcgccagagagtaccacgtgcagttcttcagcaaccagcccgagagagcctgggtgcacgagaagagagtgagagagtacaagggccacaagcagtacgaggagctgctggccgaggccaccaagcaggccagcaaccacagcgagaagcagaagatcagaaagcccagaccccagagagagagagcccagtgggacatcggcatcgcccacgccgagaaggccctgaagatgaccagagaggagagaatcgagcagtacaccttcatctacatcgacaagcagcccgaggaggccctgagccaggccaagaagagcgtggccagcaagaccgaggtgaagaagaccagaagacccagaagcgtgctgaacacccagcccgagcagaccaacgccggcgaggtggccagcagcctgagcagcaccgagatcagaagacacagccagagaagacacaccagcgccgaggaggaggagcccccccccgtgaagatcgcctggaagaccgccgccgccagaaagagcctgcccgccagcatcaccatgcacaagggcagcctggacctgcagaagtgcaacatgagccccgtggtgaagatcgagcaggtgttcgccctgcagaacgccaccggcgacggcaagttcatcgaccagttcgtgtacagcaccaagggcatcggcaacaagaccgagatcagcgtgagaggccaggacagactgatcatcagcacccccaaccagagaaacgagaagcccacccagagcgtgagcagccccgaggccaccagcggcagcaccggcagcgtggagaagaagcagcagagaagaagcatcagaaccagaagcgagagcgagaagagcaccgaggtggtgcccaagaagaagatcaagaaggagcaggtggagaccgtgccccaggccaccgtgaagaccggcctgcagaagggcagcgccgacagaggcgtgcagggcagcgtgagattcagcgacagcagcgtgagcgccgccatcgaggagaccgtggactag

SEQ ID NO: 105354 - DNA, 4314 bp, synthetic construct
  misc_feature 1..4314: note = Description of Artificial Sequence: Synthetic coding sequence
  source 1..4314: mol_type = other DNA
atggacttcagcttcagcttcatgcagggcatcatgggcaacaccatccagcagcccccccagctgatcgacagcgccaacatcagacaggaggacgccttcgacaacaacagcgacatcgccgaggacggcggccagaccccctacgaggccaccctgcagcagggcttccagtaccccgccaccaccgaggacctgccccccctgaccaacggctaccccagcagcatcagcgtgtacgagacccagaccaagtaccagagctacaaccagtaccccaacggcagcgccaacggcttcggcgccgtgagaaacttcagccccaccgactactaccacagcgagatccccaacaccagaccccacgagatcctggagaagcccagccccccccagcccccccccccccccagcgtgccccagaccgtgatccccaagaagaccggcagccccgagatcaagctgaagatcaccaagaccatccagaacggcagagagctgttcgagagcagcctgtgcggcgacctgctgaacgaggtgcaggccagcgagcacaccaagagcaagcacgagagcagaaaggagaagagaaagaagagcaacaagcacgacagcagcagaagcgaggagagaaagagccacaagatccccaagctggagcccgaggagcagaacagacccaacgagagagtggacaccgtgagcgagaagcccagagaggagcccgtgctgaaggaggaggcccccgtgcagcccatcctgagcagcgtgcccaccaccgaggtgagcaccggcgtgaagttccaggtgggcgacctggtgtggagcaaggtgggcacctacccctggtggccctgcatggtgagcagcgacccccagctggaggtgcacaccaagatcaacaccagaggcgccagagagtaccacgtgcagttcttcagcaaccagcccgagagagcctgggtgcacgagaagagagtgagagagtacaagggccacaagcagtacgaggagctgctggccgaggccaccaagcaggccagcaaccacagcgagaagcagaagatcagaaagcccagaccccagagagagagagcccagtgggacatcggcatcgcccacgccgagaaggccctgaagatgaccagagaggagagaatcgagcagtacaccttcatctacatcgacaagcagcccgaggaggccctgagccaggccaagaagagcgtggccagcaagaccgaggtgaagaagaccagaagacccagaagcgtgctgaacacccagcccgagcagaccaacgccggcgaggtggccagcagcctgagcagcaccgagatcagaagacacagccagagaagacacaccagcgccgaggaggaggagcccccccccgtgaagatcgcctggaagaccgccgccgccagaaagagcctgcccgccagcatcaccatgcacaagggcagcctggacctgcagaagtgcaacatgagccccgtggtgaagatcgagcaggtgttcgccctgcagaacgccaccggcgacggcaagttcatcgaccagttcgtgtacagcaccaagggcatcggcaacaagaccgagatcagcgtgagaggccaggacagactgatcatcagcacccccaaccagagaaacgagaagcccacccagagcgtgagcagccccgaggccaccagcggcagcaccggcagcgtggagaagaagcagcagagaagaagcatcagaaccagaagcgagagcgagaagagcaccgaggtggtgcccaagaagaagatcaagaaggagcaggtggagaccgtgccccaggccaccgtgaagaccggcctgcagaagggcgccagcgagatcagcgacagctgcaagcccctgaagaagagaagcagagccagcaccgacgtggagatgaccagcagcgcctacagagacaccagcgacagcgacagcagaggcctgagcgacctgcaggtgggcttcggcaagcaggtggacagccccagcgccaccgccgacgccgacgtgagcgacgtgcagagcatggacagcagcctgagcagaagaggcaccggcatgagcaagaaggacaccgtgtgccagatctgcgagagcagcggcgacagcctgatcccctgcgagggcgagtgctgcaagcacttccacctggagtgcctgggcctggccagcctgcccgacagcaagttcatctgcatggagtgcaagaccggccagcacccctgcttcagctgcaaggtgagcggcaaggacgtgaagagatgcagcgtgggcgcctgcggcaagttctaccacgaggcctgcgtgagaaagttccccaccgccatcttcgagagcaagggcttcagatgcccccagcactgctgcagcgcctgcagcatggagaaggacatccacaaggccagcaagggcagaatgatgagatgcctgagatgccccgtggcctaccacagcggcgacgcctgcatcgccgccggcagcatgctggtgagcagctacatcctgatctgcagcaaccacagcaagagaagcagcaacagcagcgccgtgaacgtgggcttctgcttcgtgtgcgccagaggcctgatcgtgcaggaccacagcgaccccatgttcagcagctacgcctacaagagccactacctgctgaacgagagcaacagagccgagctgatgaagctgcccatgatccccagcagcagcgccagcaagaagaagtgcgagaagggcggcagactgctgtgctgcgagagctgccccgccagcttccaccccgagtgcctgagcatcgagatgcccgagggctgctggaactgcaacgactgcaaggccggcaagaagctgcactacaagcagatcgtgtgggtgaagctgggcaactacagatggtggcccgccgagatctgcaaccccagaagcgtgcccctgaacatccagggcctgaagcacgacctgggcgacttccccgtgttcttcttcggcagccacgactactactgggtgcaccagggcagagtgttcccctacgtggagggcgacaagagcttcgccgagggccagaccagcatcaacaagaccttcaagaaggccctggaggaggccgccaagagattccaggagctgaaggcccagagagagagcaaggaggccctggagatcgagaagaacagcagaaagccccccccctacaagcacatcaaggccaacaaggtgatcggcaaggtgcagatccaggtggccgacctgagcgagatccccagatgcaactgcaagcccgccgacgagaacccctgcggcctggagagcgagtgcctgaacagaatgctgcagtacgagtgccacccccaggtgtgccccgccggcgacagatgccagaaccagtgcttcaccaagagactgtaccccgacgccgagatcatcaagaccgagagaagaggctggggcctgagaaccaagagaagcatcaagaagggcgagttcgtgaacgagtacgtgggcgagctgatcgacgaggaggagtgcagactgagaatcaagagagcccacgagaacagcgtgaccaacttctacatgctgaccgtgaccaaggacagaatcatcgacgccggccccaagggcaactacagcagattcatgaaccacagctgcaaccccaactgcgagacccagaagtggaccgtgaacggcgacgtgagagtgggcctgttcgccctgtgcgacatccccgccggcatggagctgaccttcaactacaacctggactgcctgggcaacggcagaaccgagtgccactgcggcgccgacaactgcagcggcttcctgggcgtgagacccaagagcgcctgcgccagcaccaacgaggagaaggccaagaacgccaagctgaagcagaagagaagaaagatcaagaccgagcccaagcagatgcacgaggactactgcttccagtgcggcgacggcggcgagctggtgatgtgcgacaagaaggactgccccaaggcctaccacctgctgtgcctgaacctgacccagcccccctacggcaagtgggagtgcccctggcaccagtgcgacgagtgcagcagcgccgccgtgagcttctgcgagttctgcccccacagcttctgcaaggaccacgagaagggcgccctggtgcccagcgccctggagggcagactgtgctgcagcgagcacgaccccatggcccccgtgagccccgagtactggagcaagatcaagtgcaagtgggagagccaggaccacggcgaggaggtgaaggagtag

SEQ ID NO: 105355 - DNA, 4167 bp, synthetic construct
  misc_feature 1..4167: note = Description of Artificial Sequence: Synthetic coding sequence
  source 1..4167: mol_type = other DNA
atggacttcagcttcagcttcatgcagggcatcatgggcaacaccatccagcagcccccccagctgatcgacagcgccaacatcagacaggaggacgccttcgacaacaacagcgacatcgccgaggacggcggccagaccccctacgaggccaccctgcagcagggcttccagtaccccgccaccaccgaggacctgccccccctgaccaacggctaccccagcagcatcagcgtgtacgagacccagaccaagtaccagagctacaaccagtaccccaacggcagcgccaacggcttcggcgccgtgagaaacttcagccccaccgactactaccacagcgagatccccaacaccagaccccacgagatcctggagaagcccagccccccccagcccccccccccccccagcgtgccccagaccgtgatccccaagaagaccggcagccccgagatcaagctgaagatcaccaagaccatccagaacggcagagagctgttcgagagcagcctgtgcggcgacctgctgaacgaggtgcaggccagcgagcacaccaagagcaagcacgagagcagaaaggagaagagaaagaagagcaacaagcacgacagcagcagaagcgaggagagaaagagccacaagatccccaagctggagcccgaggagcagaacagacccaacgagagagtggacaccgtgagcgagaagcccagagaggagcccgtgctgaaggaggaggcccccgtgcagcccatcctgagcagcgtgcccaccaccgaggtgagcaccggcgtgaagttccaggtgggcgacctggtgtggagcaaggtgggcacctacccctggtggccctgcatggtgagcagcgacccccagctggaggtgcacaccaagatcaacaccagaggcgccagagagtaccacgtgcagttcttcagcaaccagcccgagagagcctgggtgcacgagaagagagtgagagagtacaagggccacaagcagtacgaggagctgctggccgaggccaccaagcaggccagcaaccacagcgagaagcagaagatcagaaagcccagaccccagagagagagagcccagtgggacatcggcatcgcccacgccgagaaggccctgaagatgaccagagaggagagaatcgagcagtacaccttcatctacatcgacaagcagcccgaggaggccctgagccaggccaagaagagcgtggccagcaagaccgaggtgaagaagaccagaagacccagaagcgtgctgaacacccagcccgagcagaccaacgccggcgaggtggccagcagcctgagcagcaccgagatcagaagacacagccagagaagacacaccagcgccgaggaggaggagcccccccccgtgaagatcgcctggaagaccgccgccgccagaaagagcctgcccgccagcatcaccatgcacaagggcagcctggacctgcagaagtgcaacatgagccccgtggtgaagatcgagcaggtgttcgccctgcagaacgccaccggcgacggcaagttcatcgaccagttcgtgtacagcaccaagggcatcggcaacaagaccgagatcagcgtgagaggccaggacagactgatcatcagcacccccaaccagagaaacgagaagcccacccagagcgtgagcagccccgaggccaccagcggcagcaccggcagcgtggagaagaagcagcagagaagaagcatcagaaccagaagcgagagcgagaagagcaccgaggtggtgcccaagaagaagatcaagaaggagcaggtggagaccgtgccccaggccaccgtgaagaccggcctgcagaagggcgccagcgagatcagcgacagctgcaagcccctgaagaagagaagcagagccagcaccgacgtggagatgaccagcagcgcctacagagacaccagcgacagcgacagcagaggcctgagcgacctgcaggtgggcttcggcaagcaggtggacagccccagcgccaccgccgacgccgacgtgagcgacgtgcagagcatggacagcagcctgagcagaagaggcaccggcatgagcaagaaggacaccgtgtgccagatctgcgagagcagcggcgacagcctgatcccctgcgagggcgagtgctgcaagcacttccacctggagtgcctgggcctggccagcctgcccgacagcaagttcatctgcatggagtgcaagaccggccagcacccctgcttcagctgcaaggtgagcggcaaggacgtgaagagatgcagcgtgggcgcctgcggcaagttctaccacgaggcctgcgtgagaaagttccccaccgccatcttcgagagcaagggcttcagatgcccccagcactgctgcagcgcctgcagcatggagaaggacatccacaaggccagcaagggcagaatgatgagatgcctgagatgccccgtggcctaccacagcggcgacgcctgcatcgccgccggcagcatgctggtgagcagctacatcctgatctgcagcaaccacagcaagagaagcagcaacagcagcgccgtgaacgtgggcttctgcttcgtgtgcgccagaggcggcagactgctgtgctgcgagagctgccccgccagcttccaccccgagtgcctgagcatcgagatgcccgagggctgctggaactgcaacgactgcaaggccggcaagaagctgcactacaagcagatcgtgtgggtgaagctgggcaactacagatggtggcccgccgagatctgcaaccccagaagcgtgcccctgaacatccagggcctgaagcacgacctgggcgacttccccgtgttcttcttcggcagccacgactactactgggtgcaccagggcagagtgttcccctacgtggagggcgacaagagcttcgccgagggccagaccagcatcaacaagaccttcaagaaggccctggaggaggccgccaagagattccaggagctgaaggcccagagagagagcaaggaggccctggagatcgagaagaacagcagaaagccccccccctacaagcacatcaaggccaacaaggtgatcggcaaggtgcagatccaggtggccgacctgagcgagatccccagatgcaactgcaagcccgccgacgagaacccctgcggcctggagagcgagtgcctgaacagaatgctgcagtacgagtgccacccccaggtgtgccccgccggcgacagatgccagaaccagtgcttcaccaagagactgtaccccgacgccgagatcatcaagaccgagagaagaggctggggcctgagaaccaagagaagcatcaagaagggcgagttcgtgaacgagtacgtgggcgagctgatcgacgaggaggagtgcagactgagaatcaagagagcccacgagaacagcgtgaccaacttctacatgctgaccgtgaccaaggacagaatcatcgacgccggccccaagggcaactacagcagattcatgaaccacagctgcaaccccaactgcgagacccagaagtggaccgtgaacggcgacgtgagagtgggcctgttcgccctgtgcgacatccccgccggcatggagctgaccttcaactacaacctggactgcctgggcaacggcagaaccgagtgccactgcggcgccgacaactgcagcggcttcctgggcgtgagacccaagagcgcctgcgccagcaccaacgaggagaaggccaagaacgccaagctgaagcagaagagaagaaagatcaagaccgagcccaagcagatgcacgaggactactgcttccagtgcggcgacggcggcgagctggtgatgtgcgacaagaaggactgccccaaggcctaccacctgctgtgcctgaacctgacccagcccccctacggcaagtgggagtgcccctggcaccagtgcgacgagtgcagcagcgccgccgtgagcttctgcgagttctgcccccacagcttctgcaaggaccacgagaagggcgccctggtgcccagcgccctggagggcagactgtgctgcagcgagcacgaccccatggcccccgtgagccccgagtactggagcaagatcaagtgcaagtgggagagccaggaccacggcgaggaggtgaaggagtag

SEQ ID NO: 105356 - DNA, 4125 bp, synthetic construct
  misc_feature 1..4125: note = Description of Artificial Sequence: Synthetic coding sequence
  source 1..4125: mol_type = other DNA
atggacttcagcttcagcttcatgcagggcatcatgggcaacaccatccagcagcccccccagctgatcgacagcgccaacatcagacaggaggacgccttcgacaacaacagcgacatcgccgaggacggcggccagaccccctacgaggccaccctgcagcagggcttccagtaccccgccaccaccgaggacctgccccccctgcccccccccccccccagcgtgccccagaccgtgatccccaagaagaccggcagccccgagatcaagctgaagatcaccaagaccatccagaacggcagagagctgttcgagagcagcctgtgcggcgacctgctgaacgaggtgcaggccagcgagcacaccaagagcaagcacgagagcagaaaggagaagagaaagaagagcaacaagcacgacagcagcagaagcgaggagagaaagagccacaagatccccaagctggagcccgaggagcagaacagacccaacgagagagtggacaccgtgagcgagaagcccagagaggagcccgtgctgaaggaggaggcccccgtgcagcccatcctgagcagcgtgcccaccaccgaggtgagcaccggcgtgaagttccaggtgggcgacctggtgtggagcaaggtgggcacctacccctggtggccctgcatggtgagcagcgacccccagctggaggtgcacaccaagatcaacaccagaggcgccagagagtaccacgtgcagttcttcagcaaccagcccgagagagcctgggtgcacgagaagagagtgagagagtacaagggccacaagcagtacgaggagctgctggccgaggccaccaagcaggccagcaaccacagcgagaagcagaagatcagaaagcccagaccccagagagagagagcccagtgggacatcggcatcgcccacgccgagaaggccctgaagatgaccagagaggagagaatcgagcagtacaccttcatctacatcgacaagcagcccgaggaggccctgagccaggccaagaagagcgtggccagcaagaccgaggtgaagaagaccagaagacccagaagcgtgctgaacacccagcccgagcagaccaacgccggcgaggtggccagcagcctgagcagcaccgagatcagaagacacagccagagaagacacaccagcgccgaggaggaggagcccccccccgtgaagatcgcctggaagaccgccgccgccagaaagagcctgcccgccagcatcaccatgcacaagggcagcctggacctgcagaagtgcaacatgagccccgtggtgaagatcgagcaggtgttcgccctgcagaacgccaccggcgacggcaagttcatcgaccagttcgtgtacagcaccaagggcatcggcaacaagaccgagatcagcgtgagaggccaggacagactgatcatcagcacccccaaccagagaaacgagaagcccacccagagcgtgagcagccccgaggccaccagcggcagcaccggcagcgtggagaagaagcagcagagaagaagcatcagaaccagaagcgagagcgagaagagcaccgaggtggtgcccaagaagaagatcaagaaggagcaggtggagaccgtgccccaggccaccgtgaagaccggcctgcagaagggcgccagcgagatcagcgacagctgcaagcccctgaagaagagaagcagagccagcaccgacgtggagatgaccagcagcgcctacagagacaccagcgacagcgacagcagaggcctgagcgacctgcaggtgggcttcggcaagcaggtggacagccccagcgccaccgccgacgccgacgtgagcgacgtgcagagcatggacagcagcctgagcagaagaggcaccggcatgagcaagaaggacaccgtgtgccagatctgcgagagcagcggcgacagcctgatcccctgcgagggcgagtgctgcaagcacttccacctggagtgcctgggcctggccagcctgcccgacagcaagttcatctgcatggagtgcaagaccggccagcacccctgcttcagctgcaaggtgagcggcaaggacgtgaagagatgcagcgtgggcgcctgcggcaagttctaccacgaggcctgcgtgagaaagttccccaccgccatcttcgagagcaagggcttcagatgcccccagcactgctgcagcgcctgcagcatggagaaggacatccacaaggccagcaagggcagaatgatgagatgcctgagatgccccgtggcctaccacagcggcgacgcctgcatcgccgccggcagcatgctggtgagcagctacatcctgatctgcagcaaccacagcaagagaagcagcaacagcagcgccgtgaacgtgggcttctgcttcgtgtgcgccagaggcctgatcgtgcaggaccacagcgaccccatgttcagcagctacgcctacaagagccactacctgctgaacgagagcaacagagccgagctgatgaagctgcccatgatccccagcagcagcgccagcaagaagaagtgcgagaagggcggcagactgctgtgctgcgagagctgccccgccagcttccaccccgagtgcctgagcatcgagatgcccgagggctgctggaactgcaacgactgcaaggccggcaagaagctgcactacaagcagatcgtgtgggtgaagctgggcaactacagatggtggcccgccgagatctgcaaccccagaagcgtgcccctgaacatccagggcctgaagcacgacctgggcgacttccccgtgttcttcttcggcagccacgactactactgggtgcaccagggcagagtgttcccctacgtggagggcgacaagagcttcgccgagggccagaccagcatcaacaagaccttcaagaaggccctggaggaggccgccaagagattccaggagctgaaggcccagagagagagcaaggaggccctggagatcgagaagaacagcagaaagccccccccctacaagcacatcaaggccaacaaggtgatcggcaaggtgcagatccaggtggccgacctgagcgagatccccagatgcaactgcaagcccgccgacgagaacccctgcggcctggagagcgagtgcctgaacagaatgctgcagtacgagtgccacccccaggtgtgccccgccggcgacagatgccagaaccagtgcttcaccaagagactgtaccccgacgccgagatcatcaagaccgagagaagaggctggggcctgagaaccaagagaagcatcaagaagggcgagttcgtgaacgagtacgtgggcgagctgatcgacgaggaggagtgcagactgagaatcaagagagcccacgagaacagcgtgaccaacttctacatgctgaccgtgaccaaggacagaatcatcgacgccggccccaagggcaactacagcagattcatgaaccacagctgcaaccccaactgcgagacccagaagtggaccgtgaacggcgacgtgagagtgggcctgttcgccctgtgcgacatccccgccggcatggagctgaccttcaactacaacctggactgcctgggcaacggcagaaccgagtgccactgcggcgccgacaactgcagcggcttcctgggcgtgagacccaagagcgcctgcgccagcaccaacgaggagaaggccaagaacgccaagctgaagcagaagagaagaaagatcaagaccgagcccaagcagatgcacgaggactactgcttccagtgcggcgacggcggcgagctggtgatgtgcgacaagaaggactgccccaaggcctaccacctgctgtgcctgaacctgacccagcccccctacggcaagtgggagtgcccctggcaccagtgcgacgagtgcagcagcgccgccgtgagcttctgcgagttctgcccccacagcttctgcaaggaccacgagaagggcgccctggtgcccagcgccctggagggcagactgtgctgcagcgagcacgaccccatggcccccgtgagccccgagtactggagcaagatcaagtgcaagtgggagagccaggaccacggcgaggaggtgaaggagtag

SEQ ID NO: 105357 - DNA, 4281 bp, synthetic construct
  misc_feature 1..4281: note = Description of Artificial Sequence: Synthetic coding sequence
  source 1..4281: mol_type = other DNA
atggacttcagcttcagcttcatgcagggcatcatgggcaacaccatccagcagcccccccagctgatcgacagcgccaacatcagacaggaggacgccttcgacaacaacagcgacatcgccgaggacggcggccagaccccctacgaggccaccctgcagcagggcttccagtaccccgccaccaccgaggacctgccccccctgaccaacggctaccccagcagcatcagcgtgtacgagacccagaccaagtaccagagctacaaccagtaccccaacggcagcgccaacggcttcggcgccgtgagaaacttcagccccaccgactactaccacagcgagatccccaacaccagaccccacgagatcctggagaagcccagccccccccagcccccccccccccccagcgtgccccagaccgtgatccccaagaagaccggcagccccgagatcaagctgaagatcaccaagaccatccagaacggcagagagctgttcgagagcagcctgtgcggcgacctgctgaacgaggtgcaggccagcgagcacaccaagagcaagcacgagagcagaaaggagaagagaaagaagagcaacaagcacgacagcagcagaagcgaggagagaaagagccacaagatccccaagctggagcccgaggagcagaacagacccaacgagagagtggacaccgtgagcgagaagcccagagaggagcccgtgctgaaggaggaggcccccgtgcagcccatcctgagcagcgtgcccaccaccgaggtgagcaccggcgtgaagttccaggtgggcgacctggtgtggagcaaggtgggcacctacccctggtggccctgcatggtgagcagcgacccccagctggaggtgcacaccaagatcaacaccagaggcgccagagagtaccacgtgcagttcttcagcaaccagcccgagagagcctgggtgcacgagaagagagtgagagagtacaagggccacaagcagtacgaggagctgctggccgaggccaccaagcaggccagcaaccacagcgagaagcagaagatcagaaagcccagaccccagagagagagagcccagtgggacatcggcatcgcccacgccgagaaggccctgaagatgaccagagaggagagaatcgagcagtacaccttcatctacatcgacaagcagcccgaggaggccctgagccaggccaagaagagcgtggccagcaagaccgaggtgaagaagaccagaagacccagaagcgtgctgaacacccagcccgagcagaccaacgccggcgaggtggccagcagcctgagcagcaccgagatcagaagacacagccagagaagacacaccagcgccgaggaggaggagcccccccccgtgaagatcgcctggaagaccgccgccgccagaaagagcctgcccgccagcatcaccatgcacaagggcagcctggacctgcagaagtgcaacatgagccccgtggtgaagatcgagcaggtgttcgccctgcagaacgccaccggcgacggcaagttcatcgaccagttcgtgtacagcaccaagggcatcggcaacaagaccgagatcagcgtgagaggccaggacagactgatcatcagcacccccaaccagagaaacgagaagcccacccagagcgtgagcagccccgaggccaccagcggcagcaccggcagcgtggagaagaagcagcagagaagaagcatcagaaccagaagcgagagcgagaagagcaccgaggtggtgcccaagaagaagatcaagaaggagcaggtggagaccgtgccccaggccaccgtgaagaccggcctgcagaagggcgccagcgagatcagcgacagctgcaagcccctgaagaagagaagcagagccagcaccgacgtggagatgaccagcagcgcctacagagacaccagcgacagcgacagcagaggcctgagcgacctgcaggtgggcttcggcaagcaggtggacagccccagcgccaccgccgacgccgacgtgagcgacgtgcagagcatggacagcagcctgagcagaagaggcaccggcatgagcaagaaggacaccgtgtgccagatctgcgagagcagcggcgacagcctgatcccctgcgagggcgagtgctgcaagcacttccacctggagtgcctgggcctggccagcctgcccgacagcaagttcatctgcatggagtgcaagaccggccagcacccctgcttcagctgcaaggtgagcggcaaggacgtgaagagatgcagcgtgggcgcctgcggcaagttctaccacgaggcctgcgtgagaaagttccccaccgccatcttcgagagcaagggcttcagatgcccccagcactgctgcagcgcctgcagcatggagaaggacatccacaaggccagcaagggcagaatgatgagatgcctgagatgccccgtggcctaccacagcggcgacgcctgcatcgccgccggcagcatgctggtgagcagctacatcctgatctgcagcaaccacagcaagagaagcagcaacagcagcgccgtgaacgtgggcttctgcttcgtgtgcgccagaggcctgatcgtgcaggaccacagcgaccccatgttcagcagctacgcctacaagagccactacctgctgaacgagagcaacagagccgagctgatgaagctgcccatgatccccagcagcagcgccagcaagaagaagtgcgagaagggcggcagactgctgtgctgcgagagctgccccgccagcttccaccccgagtgcctgagcatcgagatgcccgagggctgctggaactgcaacgactgcaaggccggcaagaagctgcactacaagcagatcgtgtgggtgaagctgggcaactacagatggtggcccgccgagatctgcaaccccagaagcgtgcccctgaacatccagggcctgaagcacgacctgggcgacttccccgtgttcttcttcggcagccacgactactactgggtgcaccagggcagagtgttcccctacgtggagggcgacaagagcttcgccgagggccagaccagcatcaacaagaccttcaagaaggccctggaggaggccgccaagagattccaggagctgaaggcccagagagagagcaaggaggccctggagatcgagaagaacagcagaaagccccccccctacaagcacatcaaggccaacaaggtgatcggcaaggtgcagatccaggtggccgacctgagcgagatccccagatgcaactgcaagcccgccgacgagaacccctgcggcctggagagcgagtgcctgaacagaatgctgcagtacgagtgccacccccaggtgtgccccgccggcgacagatgccagaaccagtgcttcaccaagagactgtaccccgacgccgagatcatcaagaccgagagaagaggctggggcctgagaaccaagagaagcatcaagaagggcgagttcgtgaacgagtacgtgggcgagctgatcgacgaggaggagtgcagactgagaatcaagagagcccacgagaacagcgacagaatcatcgacgccggccccaagggcaactacagcagattcatgaaccacagctgcaaccccaactgcgagacccagaagtggaccgtgaacggcgacgtgagagtgggcctgttcgccctgtgcgacatccccgccggcatggagctgaccttcaactacaacctggactgcctgggcaacggcagaaccgagtgccactgcggcgccgacaactgcagcggcttcctgggcgtgagacccaagagcgcctgcgccagcaccaacgaggagaaggccaagaacgccaagctgaagcagaagagaagaaagatcaagaccgagcccaagcagatgcacgaggactactgcttccagtgcggcgacggcggcgagctggtgatgtgcgacaagaaggactgccccaaggcctaccacctgctgtgcctgaacctgacccagcccccctacggcaagtgggagtgcccctggcaccagtgcgacgagtgcagcagcgccgccgtgagcttctgcgagttctgcccccacagcttctgcaaggaccacgagaagggcgccctggtgcccagcgccctggagggcagactgtgctgcagcgagcacgaccccatggcccccgtgagccccgagtactggagcaagatcaagtgcaagtgggagagccaggaccacggcgaggaggtgaaggagtag

SEQ ID NO: 105358 - DNA, 849 bp, synthetic construct
  misc_feature 1..849: note = Description of Artificial Sequence: Synthetic coding sequence
  source 1..849: mol_type = other DNA
atggacttcagcttcagcttcatgcagggcatcatgggcaacaccatccagcagcccccccagctgatcgacagcgccaacatcagacaggaggacgccttcgacaacaacagcgacatcgccgaggacggcggccagaccccctacgaggccaccctgcagcagggcttccagtaccccgccaccaccgaggacctgccccccctgaccaacggctaccccagcagcatcagcgtgtacgagacccagaccaagtaccagagctacaaccagtaccccaacggcagcgccaacggcttcggcgccgtgagaaacttcagccccaccgactactaccacagcgagatccccaacaccagaccccacgagatcctggagaagcccagccccccccagcccccccccccccccagcgtgccccagaccgtgatccccaagaagaccggcagccccgagatcaagctgaagatcaccaagaccatccagaacggcagagagctgttcgagagcagcctgtgcggcgacctgctgaacgaggtgcaggccagcgagcacaccaagagcaagcacgagagcagaaaggagaagagaaagaagagcaacaagcacgacagcagcagaagcgaggagagaaagagccacaagatccccaagctggagcccgaggagcagaacagacccaacgagagagtggacaccgtgagcgagaagcccagagaggagcccgtgctgaaggaggaggcccccgtgcagcccatcctgagcagcgtgcccaccaccgaggtgagcaccggcgtgaagttccaggtgggcgacctggtgtggagcaaggtgggcacctacccctag

SEQ ID NO: 105359 - DNA, 78 bp, synthetic construct
  misc_feature 1..78: note = Description of Artificial Sequence: Synthetic coding sequence
  source 1..78: mol_type = other DNA
atggacttcagcttcagcttcatgcagggcatcatgggcaacaccatccagcagcccccccagctgatcgacagctag

SEQ ID NO: 105360 - DNA, 48 bp, synthetic construct
  misc_feature 1..48: note = Description of Artificial Sequence: Synthetic coding sequence
  source 1..48: mol_type = other DNA
atggacttcagcttcagcttcatgcagggcatcatgggcaacacctag

SEQ ID NO: 105361 - DNA, 1620 bp, synthetic construct
  misc_feature 1..1620: note = Description of Artificial Sequence: Synthetic coding sequence
  source 1..1620: mol_type = other DNA
atgcccggccagagaagagccctgagccccaagatggccagcatgagagagagcgacaccggcctgtggctgcacaacaagctgggcgccaccgacgagctgtgggccccccccagcatcgccagcctgctgaccgccgccgtgatcgacaacatcagactgtgcttccacggcctgagcagcgccgtgaagctgaagctgctgctgggcaccctgcacctgcccagaagaaccgtggacgagatgaagggcgccctgatggagatcatccagctggccagcctggacagcgacccctgggtgctgatggtggccgacatcctgaagagcttccccgacaccggcagcctgaacctggagctggaggagcagaaccccaacgtgcaggacatcctgggcgagctgagagagaaggtgggcgagtgcgaggccagcgccatgctgcccctggagtgccagtacctgaacaagaacgccctgaccaccctggccggccccctgaccccccccgtgaagcacttccagctgaagagaaagcccaagagcgccaccctgagagccgagctgctgcagaagagcaccgagaccgcccagcagctgaagagaagcgccggcgtgcccttccacgccaagggcagaggcctgctgagaaagatggacaccaccacccccctgaagggcatccccaagcaggcccccttcagaagccccaccgcccccagcgtgttcagccccaccggcaacagaacccccatcccccccagcagaaccctgctgagaaaggagagaggcgtgaagctgctggacatcagcgagctggacatggtgggcgccggcagagaggccaagagaagaagaaagaccctggacgccgaggtggtggagaagcccgccaaggaggagaccgtggtggagaacgccacccccgactacgccgccggcctggtgagcacccagaagctgggcagcctgaacaacgagcccgccctgcccagcaccagctacctgcccagcacccccagcgtggtgcccgccagcagctacatccccagcagcgagaccccccccgcccccagcagcagagaggccagcagaccccccgaggagcccagcgcccccagccccaccctgcccgcccagttcaagcagagagcccccatgtacaacagcggcctgagccccgccacccccacccccgccgcccccaccagccccctgacccccaccaccccccccgccgtggcccccaccacccagaccccccccgtggccatggtggccccccagacccaggcccccgcccagcagcagcccaagaagaacctgagcctgaccagagagcagatgttcgccgcccaggagatgttcaagaccgccaacaaggtgaccagacccgagaaggccctgatcctgggcttcatggccggcagcagagagaacccctgccaggagcagggcgacgtgatccagatcaagctgagcgagcacaccgaggacctgcccaaggccgacggccagggcagcaccaccatgctggtggacaccgtgttcgagatgaactacgccaccggccagtggaccagattcaagaagtacaagcccatgaccaacgtgagctag

SEQ ID NO: 105362 - DNA, 1587 bp, synthetic construct
  misc_feature 1..1587: note = Description of Artificial Sequence: Synthetic coding sequence
  source 1..1587: mol_type = other DNA
atggccagcatgagagagagcgacaccggcctgtggctgcacaacaagctgggcgccaccgacgagctgtgggccccccccagcatcgccagcctgctgaccgccgccgtgatcgacaacatcagactgtgcttccacggcctgagcagcgccgtgaagctgaagctgctgctgggcaccctgcacctgcccagaagaaccgtggacgagatgaagggcgccctgatggagatcatccagctggccagcctggacagcgacccctgggtgctgatggtggccgacatcctgaagagcttccccgacaccggcagcctgaacctggagctggaggagcagaaccccaacgtgcaggacatcctgggcgagctgagagagaaggtgggcgagtgcgaggccagcgccatgctgcccctggagtgccagtacctgaacaagaacgccctgaccaccctggccggccccctgaccccccccgtgaagcacttccagctgaagagaaagcccaagagcgccaccctgagagccgagctgctgcagaagagcaccgagaccgcccagcagctgaagagaagcgccggcgtgcccttccacgccaagggcagaggcctgctgagaaagatggacaccaccacccccctgaagggcatccccaagcaggcccccttcagaagccccaccgcccccagcgtgttcagccccaccggcaacagaacccccatcccccccagcagaaccctgctgagaaaggagagaggcgtgaagctgctggacatcagcgagctggacatggtgggcgccggcagagaggccaagagaagaagaaagaccctggacgccgaggtggtggagaagcccgccaaggaggagaccgtggtggagaacgccacccccgactacgccgccggcctggtgagcacccagaagctgggcagcctgaacaacgagcccgccctgcccagcaccagctacctgcccagcacccccagcgtggtgcccgccagcagctacatccccagcagcgagaccccccccgcccccagcagcagagaggccagcagaccccccgaggagcccagcgcccccagccccaccctgcccgcccagttcaagcagagagcccccatgtacaacagcggcctgagccccgccacccccacccccgccgcccccaccagccccctgacccccaccaccccccccgccgtggcccccaccacccagaccccccccgtggccatggtggccccccagacccaggcccccgcccagcagcagcccaagaagaacctgagcctgaccagagagcagatgttcgccgcccaggagatgttcaagaccgccaacaaggtgaccagacccgagaaggccctgatcctgggcttcatggccggcagcagagagaacccctgccaggagcagggcgacgtgatccagatcaagctgagcgagcacaccgaggacctgcccaaggccgacggccagggcagcaccaccatgctggtggacaccgtgttcgagatgaactacgccaccggccagtggaccagattcaagaagtacaagcccatgaccaacgtgagctag

SEQ ID NO: 105363 - DNA, 1182 bp, synthetic construct
  misc_feature 1..1182: note = Description of Artificial Sequence: Synthetic coding sequence
  source 1..1182: mol_type = other DNA
atgctgcccctggagtgccagtacctgaacaagaacgccctgaccaccctggccggccccctgaccccccccgtgaagcacttccagctgaagagaaagcccaagagcgccaccctgagagccgagctgctgcagaagagcaccgagaccgcccagcagctgaagagaagcgccggcgtgcccttccacgccaagggcagaggcctgctgagaaagatggacaccaccacccccctgaagggcatccccaagcaggcccccttcagaagccccaccgcccccagcgtgttcagccccaccggcaacagaacccccatcccccccagcagaaccctgctgagaaaggagagaggcgtgaagctgctggacatcagcgagctggacatggtgggcgccggcagagaggccaagagaagaagaaagaccctggacgccgaggtggtggagaagcccgccaaggaggagaccgtggtggagaacgccacccccgactacgccgccggcctggtgagcacccagaagctgggcagcctgaacaacgagcccgccctgcccagcaccagctacctgcccagcacccccagcgtggtgcccgccagcagctacatccccagcagcgagaccccccccgcccccagcagcagagaggccagcagaccccccgaggagcccagcgcccccagccccaccctgcccgcccagttcaagcagagagcccccatgtacaacagcggcctgagccccgccacccccacccccgccgcccccaccagccccctgacccccaccaccccccccgccgtggcccccaccacccagaccccccccgtggccatggtggccccccagacccaggcccccgcccagcagcagcccaagaagaacctgagcctgaccagagagcagatgttcgccgcccaggagatgttcaagaccgccaacaaggtgaccagacccgagaaggccctgatcctgggcttcatggccggcagcagagagaacccctgccaggagcagggcgacgtgatccagatcaagctgagcgagcacaccgaggacctgcccaaggccgacggccagggcagcaccaccatgctggtggacaccgtgttcgagatgaactacgccaccggccagtggaccagattcaagaagtacaagcccatgaccaacgtgagctag

SEQ ID NO: 105364 - DNA, 462 bp, synthetic construct
  misc_feature 1..462: note = Description of Artificial Sequence: Synthetic coding sequence
  source 1..462: mol_type = other DNA
atgtacagaatgcagctgctgagctgcatcgccctgagcctggccctggtgaccaacagcgcccccaccagcagcagcaccaagaagacccagctgcagctggagcacctgctgctggacctgcagatgatcctgaacggcatcaacaactacaagaaccccaagctgaccagaatgctgaccttcaagttctacatgcccaagaaggccaccgagctgaagcacctgcagtgcctggaggaggagctgaagcccctggaggaggtgctgaacctggcccagagcaagaacttccacctgagacccagagacctgatcagcaacatcaacgtgatcgtgctggagctgaagggcagcgagaccaccttcatgtgcgagtacgccgacgagaccgccaccatcgtggagttcctgaacagatggatcaccttctgccagagcatcatcagcaccctgacctag

SEQ ID NO: 105365 - DNA, 2673 bp, synthetic construct
  misc_feature 1..2673: note = Description of Artificial Sequence: Synthetic coding sequence
  source 1..2673: mol_type = other DNA
atggacagcaacaccgcccccctgggccccagctgcccccagcccccccccgccccccagccccaggccagaagcagactgaacgccaccgccagcctggagcaggagagaagcgagagacccagagcccccggcccccaggccggccccggccccggcgtgagagacgccgccgcccccgccgagccccaggcccagcacaccagaagcagagagagagccgacggcaccggccccaccaagggcgacatggagatccccttcgaggaggtgctggagagagccaaggccggcgaccccaaggcccagaccgaggtgggcaagcactacctgcagctggccggcgacaccgacgaggagctgaacagctgcaccgccgtggactggctggtgctggccgccaagcagggcagaagagaggccgtgaagctgctgagaagatgcctggccgacagaagaggcatcaccagcgagaacgagagagaggtgagacagctgagcagcgagaccgacctggagagagccgtgagaaaggccgccctggtgatgtactggaagctgaaccccaagaagaagaagcaggtggccgtggccgagctgctggagaacgtgggccaggtgaacgagcacgacggcggcgcccagcccggccccgtgcccaagagcctgcagaagcagagaagaatgctggagagactggtgagcagcgagagcaagaactacatcgccctggacgacttcgtggagatcaccaagaagtacgccaagggcgtgatccccagcagcctgttcctgcaggacgacgaggacgacgacgagctggccggcaagagccccgaggacctgcccctgagactgaaggtggtgaagtaccccctgcacgccatcatggagatcaaggagtacctgatcgacatggccagcagagccggcatgcactggctgagcaccatcatccccacccaccacatcaacgccctgatcttcttcttcatcgtgagcaacctgaccatcgacttcttcgccttcttcatccccctggtgatcttctacctgagcttcatcagcatggtgatctgcaccctgaaggtgttccaggacagcaaggcctgggagaacttcagaaccctgaccgacctgctgctgagattcgagcccaacctggacgtggagcaggccgaggtgaacttcggctggaaccacctggagccctacgcccacttcctgctgagcgtgttcttcgtgatcttcagcttccccatcgccagcaaggactgcatcccctgcagcgagctggccgtgatcaccggcttcttcaccgtgaccagctacctgagcctgagcacccacgccgagccctacaccagaagagccctggccaccgaggtgaccgccggcctgctgagcctgctgcccagcatgcccctgaactggccctacctgaaggtgctgggccagaccttcatcaccgtgcccgtgggccacctggtggtgctgaacgtgagcgtgccctgcctgctgtacgtgtacctgctgtacctgttcttcagaatggcccagctgagaaacttcaagggcacctactgctacctggtgccctacctggtgtgcttcatgtggtgcgagctgagcgtggtgatcctgctggagagcaccggcctgggcctgctgagagccagcatcggctacttcctgttcctgttcgccctgcccatcctggtggccggcctggccctggtgggcgtgctgcagttcgccagatggttcaccagcctggagctgaccaagatcgccgtgaccgtggccgtgtgcagcgtgcccctgctgctgagatggtggaccaaggccagcttcagcgtggtgggcatggtgaagagcctgaccagaagcagcatggtgaagctgatcctggtgtggctgaccgccatcgtgctgttctgctggttctacgtgtacagaagcgagggcatgaaggtgtacaacagcaccctgacctggcagcagtacggcgccctgtgcggccccagagcctggaaggagaccaacatggccagaacccagatcctgtgcagccacctggagggccacagagtgacctggaccggcagattcaagtacgtgagagtgaccgacatcgacaacagcgccgagagcgccatcaacatgctgcccttcttcatcggcgactggatgagatgcctgtacggcgaggcctaccccgcctgcagccccggcaacaccagcaccgccgaggaggagctgtgcagactgaagctgctggccaagcacccctgccacatcaagaagttcgacagatacaagttcgagatcaccgtgggcatgcccttcagcagcggcgccgacggcagcagaagcagagaggaggacgacgtgaccaaggacatcgtgctgagagccagcagcgagttcaagagcgtgctgctgagcctgagacagggcagcctgatcgagttcagcaccatcctggagggcagactgggcagcaagtggcccgtgttcgagctgaaggccatcagctgcctgaactgcatggcccagctgagccccaccagaagacacgtgaagatcgagcacgactggagaagcaccgtgcacggcgccgtgaagttcgccttcgacttcttcttcttccccttcctgagcgccgcctag

SEQ ID NO: 105366 - DNA, 807 bp, synthetic construct
  misc_feature 1..807: note = Description of Artificial Sequence: Synthetic coding sequence
  source 1..807: mol_type = other DNA
atggtgaagagcctgaccagaagcagcatggtgaagctgatcctggtgtggctgaccgccatcgtgctgttctgctggttctacgtgtacagaagcgagggcatgaaggtgtacaacagcaccctgacctggcagcagtacggcgccctgtgcggccccagagcctggaaggagaccaacatggccagaacccagatcctgtgcagccacctggagggccacagagtgacctggaccggcagattcaagtacgtgagagtgaccgacatcgacaacagcgccgagagcgccatcaacatgctgcccttcttcatcggcgactggatgagatgcctgtacggcgaggcctaccccgcctgcagccccggcaacaccagcaccgccgaggaggagctgtgcagactgaagctgctggccaagcacccctgccacatcaagaagttcgacagatacaagttcgagatcaccgtgggcatgcccttcagcagcggcgccgacggcagcagaagcagagaggaggacgacgtgaccaaggacatcgtgctgagagccagcagcgagttcaagagcgtgctgctgagcctgagacagggcagcctgatcgagttcagcaccatcctggagggcagactgggcagcaagtggcccgtgttcgagctgaaggccatcagctgcctgaactgcatggcccagctgagccccaccagaagacacgtgaagatcgagcacgactggagaagcaccgtgcacggcgccgtgaagttcgccttcgacttcttcttcttccccttcctgagcgccgcctag

SEQ ID NO: 105367 - DNA, 3342 bp, synthetic construct
  misc_feature 1..3342: note = Description of Artificial Sequence: Synthetic coding sequence
  source 1..3342: mol_type = other DNA
atgcccagacccgagctgcccctgcccgagggctgggaggaggccagagacttcgacggcaaggtgtactacatcgaccacaccaacagaaccaccagctggatcgaccccagagacagatacaccaagcccctgaccttcgccgactgcatcagcgacgagctgcccctgggctgggaggaggcctacgacccccaggtgggcgactacttcatcgaccacaacaccaagaccacccagatcgaggaccccagagtgcagtggagaagagagcaggagcacatgctgaaggactacctggtggtggcccaggaggccctgagcgcccagaaggagatctaccaggtgaagcagcagagactggagctggcccagcaggagtaccagcagctgcacgccgtgtgggagcacaagctgggcagccaggtgagcctggtgagcggcagcagcagcagcagcaagtacgaccccgagatcctgaaggccgagatcgccaccgccaagagcagagtgaacaagctgaagagagagatggtgcacctgcagcacgagctgcagttcaaggagagaggcttccagaccctgaagaagatcgacaagaagatgagcgacgcccagggcagctacaagctggacgaggcccaggccgtgctgagagagaccaaggccatcaagaaggccatcacctgcggcgagaaggagaagcaggacctgatcaagagcctggccatgctgaaggacggcttcagaaccgacagaggcagccacagcgacctgtggagcagcagcagcagcctggagagcagcagcttccccctgcccaagcagtacctggacgtgagcagccagaccgacatcagcggcagcttcggcatcaacagcaacaaccagctggccgagaaggtgagactgagactgagatacgaggaggccaagagaagaatcgccaacctgaagatccagctggccaagctggacagcgaggcctggcccggcgtgctggacagcgagagagacagactgatcctgatcaacgagaaggaggagctgctgaaggagatgagattcatcagccccagaaagtggacccagggcgaggtggagcagctggagatggccagaaagagactggagaaggacctgcaggccgccagagacacccagagcaaggccctgaccgagagactgaagctgaacagcaagagaaaccagctggtgagagagctggaggaggccaccagacaggtggccaccctgcacagccagctgaagagcctgagcagcagcatgcagagcctgagcagcggcagcagccccggcagcctgaccagcagcagaggcagcctggtggccagcagcctggacagcagcaccagcgccagcttcaccgacctgtactacgaccccttcgagcagctggacagcgagctgcagagcaaggtggagttcctgctgctggagggcgccaccggcttcagacccagcggctgcatcaccaccatccacgaggacgaggtggccaagacccagaaggccgagggcggcggcagactgcaggccctgagaagcctgagcggcacccccaagagcatgaccagcctgagccccagaagcagcctgagcagccccagccccccctgcagccccctgatggccgaccccctgctggccggcgacgccttcctgaacagcctggagttcgaggaccccgagctgagcgccaccctgtgcgagctgagcctgggcaacagcgcccaggagagatacagactggaggagcccggcaccgagggcaagcagctgggccaggccgtgaacaccgcccagggctgcggcctgaaggtggcctgcgtgagcgccgccgtgagcgacgagagcgtggccggcgacagcggcgtgtacgaggccagcgtgcagagactgggcgccagcgaggccgccgccttcgacagcgacgagagcgaggccgtgggcgccaccagaatccagatcgccctgaagtacgacgagaagaacaagcagttcgccatcctgatcatccagctgagcaacctgagcgccctgctgcagcagcaggaccagaaggtgaacatcagagtggccgtgctgccctgcagcgagagcaccacctgcctgttcagaaccagacccctggacgccagcgacaccctggtgttcaacgaggtgttctgggtgagcatgagctaccccgccctgcaccagaagaccctgagagtggacgtgtgcaccaccgacagaagccacctggaggagtgcctgggcggcgcccagatcagcctggccgaggtgtgcagaagcggcgagagaagcaccagatggtacaacctgctgagctacaagtacctgaagaagcagagcagagagctgaagcccgtgggcgtgatggcccccgccagcggccccgccagcaccgacgccgtgagcgccctgctggagcagaccgccgtggagctggagaagagacaggagggcagaagcagcacccagaccctggaggacagctggagatacgaggagaccagcgagaacgaggccgtggccgaggaggaggaggaggaggtggaggaggaggagggcgaggaggacgtgttcaccgagaaggccagccccgacatggacggctaccccgccctgaaggtggacaaggagaccaacaccgagacccccgcccccagccccaccgtggtgagacccaaggacagaagagtgggcacccccagccagggccccttcctgagaggcagcaccatcatcagaagcaagaccttcagccccggcccccagagccagtacgtgtgcagactgaacagaagcgacagcgacagcagcaccctgagcaagaagccccccttcgtgagaaacagcctggagagaagaagcgtgagaatgaagagacccagcagcgtgaagagcctgagaagcgagagactgatcagaaccagcctggacctggagctggacctgcaggccaccagaacctggcacagccagctgacccaggagatcagcgtgctgaaggagctgaaggagcagctggagcaggccaagagccacggcgagaaggagctgccccagtggctgagagaggacgagagattcagactgctgctgagaatgctggagaagagacagatggacagagccgagcacaagggcgagctgcagaccgacaagatgatgagagccgccgccaaggacgtgcacagactgagaggccagagctgcaaggagccccccgaggtgcagagcttcagagagaagatggccttcttcaccagacccagaatgaacatccccgccctgagcgccgacgacgtgtag

SEQ ID NO: 105368 - DNA, 3360 bp, synthetic construct
  misc_feature 1..3360: note = Description of Artificial Sequence: Synthetic coding sequence
  source 1..3360: mol_type = other DNA
atgcccagacccgagctgcccctgcccgagggctgggaggaggccagagacttcgacggcaaggtgtactacatcgaccacaccaacagaaccaccagctggatcgaccccagagacagatacaccaagcccctgaccttcgccgactgcatcagcgacgagctgcccctgggctgggaggaggcctacgacccccaggtgggcgactacttcatcgaccacaacaccaagaccacccagatcgaggaccccagagtgcagtggagaagagagcaggagcacatgctgaaggactacctggtggtggcccaggaggccctgagcgcccagaaggagatctaccaggtgaagcagcagagactggagctggcccagcaggagtaccagcagctgcacgccgtgtgggagcacaagctgggcagccaggtgagcctggtgagcggcagcagcagcagcagcaagtacgaccccgagatcctgaaggccgagatcgccaccgccaagagcagagtgaacaagctgaagagagagatggtgcacctgcagcacgagctgcagttcaaggagagaggcttccagaccctgaagaagatcgacaagaagatgagcgacgcccagggcagctacaagctggacgaggcccaggccgtgctgagagagaccaaggccatcaagaaggccatcacctgcggcgagaaggagaagcaggacctgatcaagagcctggccatgctgaaggacggcttcagaaccgacagaggcagccacagcgacctgtggagcagcagcagcagcctggagagcagcagcttccccctgcccaagcagtacctggacgtgagcagccagaccgacatcagcggcagcttcggcatcaacagcaacaaccagctggccgagaaggtgagactgagactgagatacgaggaggccaagagaagaatcgccaacctgaagatccagctggccaagctggacagcgaggcctggcccggcgtgctggacagcgagagagacagactgatcctgatcaacgagaaggaggagctgctgaaggagatgagattcatcagccccagaaagtggacccagggcgaggtggagcagctggagatggccagaaagagactggagaaggacctgcaggccgccagagacacccagagcaaggccctgaccgagagactgaagctgaacagcaagagaaaccagctggtgagagagctggaggaggccaccagacaggtggccaccctgcacagccagctgaagagcctgagcagcagcatgcagagcctgagcagcggcagcagccccggcagcctgaccagcagcagaggcagcctggtggccagcagcctggacagcagcaccagcgccagcttcaccgacctgtactacgaccccttcgagcagctggacagcgagctgcagagcaaggtggagttcctgctgctggagggcgccaccggcttcagacccagcggctgcatcaccaccatccacgaggacgaggtggccaagacccagaaggccgagggcggcggcagactgcaggccctgagaagcctgagcggcacccccaagagcatgaccagcctgagccccagaagcagcctgagcagccccagccccccctgcagccccctgatggccgaccccctgctggccggcgacgccttcctgaacagcctggagttcgaggaccccgagctgagcgccaccctgtgcgagctgagcctgggcaacagcgcccaggagagatacagactggaggagcccggcaccgagggcaagcagctgggccaggccgtgaacaccgcccagggctgcggcctgaaggtggcctgcgtgagcgccgccgtgagcgacgagagcgtggccggcgacagcggcgtgtacgaggccagcgtgcagagactgggcgccagcgaggccgccgccttcgacagcgacgagagcgaggccgtgggcgccaccagaatccagatcgccctgaagtacgacgagaagaacaagcagttcgccatcctgatcatccagctgagcaacctgagcgccctgctgcagcagcaggaccagaaggtgaacatcagagtggccgtgctgccctgcagcgagagcaccacctgcctgttcagaaccagacccctggacgccagcgacaccctggtgttcaacgaggtgttctgggtgagcatgagctaccccgccctgcaccagaagaccctgagagtggacgtgtgcaccaccgacagaagccacctggaggagtgcctgggcggcgcccagatcagcctggccgaggtgtgcagaagcggcgagagaagcaccagatggtacaacctgctgagctacaagtacctgaagaagcagagcagagagctgaagcccgtgggcgtgatggcccccgccagcggccccgccagcaccgacgccgtgagcgccctgctggagcagaccgccgtggagctggagaagagacaggagggcagaagcagcacccagaccctggaggacagctggagatacgaggagaccagcgagaacgaggccgtggccgaggaggaggaggaggaggtggaggaggaggagggcgaggaggacgtgttcaccgagaaggccagccccgacatggacggctaccccgccctgaaggtggacaaggagaccaacaccgagacccccgcccccagccccaccgtggtgagacccaaggacagaagagtgggcacccccagccagggccccttcctgagaggcagcaccatcatcagaagcaagaccttcagccccggcccccagagccagtacgtgtgcagactgaacagaagcgacagcgacagcagcaccctgagcaagaagccccccttcgtgagaaacagcctggagagaagaagcgtgagaatgaagagacccagcccccccccccagcccagcagcgtgaagagcctgagaagcgagagactgatcagaaccagcctggacctggagctggacctgcaggccaccagaacctggcacagccagctgacccaggagatcagcgtgctgaaggagctgaaggagcagctggagcaggccaagagccacggcgagaaggagctgccccagtggctgagagaggacgagagattcagactgctgctgagaatgctggagaagagacagatggacagagccgagcacaagggcgagctgcagaccgacaagatgatgagagccgccgccaaggacgtgcacagactgagaggccagagctgcaaggagccccccgaggtgcagagcttcagagagaagatggccttcttcaccagacccagaatgaacatccccgccctgagcgccgacgacgtgtag

SEQ ID NO: 105369 - DNA, 438 bp, synthetic construct; identical to SEQ ID NO: 97486
  misc_feature 1..438: note = Description of Artificial Sequence: Synthetic coding sequence
  source 1..438: mol_type = other DNA

SEQ ID NO: 105370 - DNA, 786 bp, synthetic construct
  misc_feature 1..786: note = Description of Artificial Sequence: Synthetic coding sequence
  source 1..786: mol_type = other DNA
atggccctgaacaagaaccacagcgagggcggcggcgtgatcgtgaacaacaccgagagcatcctgatgagctacgaccacgtggagctgaccttcaacgacatgaagaacgtgcccgaggccttcaagggcaccaagaagggcaccgtgtacctgaccccctacagagtgatcttcctgagcaagggcaaggacgccatgcagagcttcatgatgcccttctacctgatgaaggactgcgagatcaagcagcccgtgttcggcgccaactacatcaagggcaccgtgaaggccgaggccggcggcggctgggagggcagcgccagctacaagctgaccttcaccgccggcggcgccatcgagttcggccagagaatgctgcaggtggccagccaggccagcagaggcgaggtgcccagcggcgcctacggctacagctacatgcccagcggcgcctacgtgtaccccccccccgtggccaacggcatgtacccctgcccccccggctacccctaccccccccccccccccgagttctaccccggcccccccatgatggacggcgccatgggctacgtgcagccccccccccccccctaccccggccccatggagccccccgtgagcggccccgacgtgcccagcacccccgccgccgaggccaaggccgccgaggccgccgccagcgcctactacaaccccggcaacccccacaacgtgtacatgcccaccagccagccccccccccccccctactacccccccgaggacaagaagacccagtag

SEQ ID NO: 105371 - DNA, 720 bp, synthetic construct
  misc_feature 1..720: note = Description of Artificial Sequence: Synthetic coding sequence
  source 1..720: mol_type = other DNA
atgagctacgaccacgtggagctgaccttcaacgacatgaagaacgtgcccgaggccttcaagggcaccaagaagggcaccgtgtacctgaccccctacagagtgatcttcctgagcaagggcaaggacgccatgcagagcttcatgatgcccttctacctgatgaaggactgcgagatcaagcagcccgtgttcggcgccaactacatcaagggcaccgtgaaggccgaggccggcggcggctgggagggcagcgccagctacaagctgaccttcaccgccggcggcgccatcgagttcggccagagaatgctgcaggtggccagccaggccagcagaggcgaggtgcccagcggcgcctacggctacagctacatgcccagcggcgcctacgtgtaccccccccccgtggccaacggcatgtacccctgcccccccggctacccctaccccccccccccccccgagttctaccccggcccccccatgatggacggcgccatgggctacgtgcagccccccccccccccctaccccggccccatggagccccccgtgagcggccccgacgtgcccagcacccccgccgccgaggccaaggccgccgaggccgccgccagcgcctactacaaccccggcaacccccacaacgtgtacatgcccaccagccagccccccccccccccctactacccccccgaggacaagaagacccagtag

SEQ ID NO: 105372 - DNA, 654 bp, synthetic construct
  misc_feature 1..654: note = Description of Artificial Sequence: Synthetic coding sequence
  source 1..654: mol_type = other DNA
atggccctgaacaagaaccacagcgagggcggcggcgtgatcgtgaacaacaccgagagcatcctgatgagctacgaccacgtggagctgaccttcaacgacatgaagaacgtgcccgaggccttcaagggcaccaagaagggcaccgtgtacctgaccccctacagagtgatcttcctgagcaagggcaaggacgccatgcagagcttcatgatgcccttctacctgatgaaggactgcgagatcaagcagcccgtgttcggcgccaactacatcaagggcaccgtgaaggccgaggccggcgccagcagaggcgaggtgcccagcggcgcctacggctacagctacatgcccagcggcgcctacgtgtaccccccccccgtggccaacggcatgtacccctgcccccccggctacccctaccccccccccccccccgagttctaccccggcccccccatgatggacggcgccatgggctacgtgcagccccccccccccccctaccccggccccatggagccccccgtgagcggccccgacgtgcccagcacccccgccggcgagggcccctgggtgctggccgccctgagagaccagcccagcccccccagatgcagaaccgagagcctgagaatggccagagactgctag

SEQ ID NO: 105373 - DNA, 630 bp, synthetic construct
  misc_feature 1..630: note = Description of Artificial Sequence: Synthetic coding sequence
  source 1..630: mol_type = other DNA
atggccctgaacaagaaccacagcgagggcggcggcgtgatcgtgaacaacaccgagagcatcctgatgagctacgaccacgtggagctgaccttcaacgacatgaagaacgtgcccgaggccttcaagggcaccaagaagggcaccgtgtacctgaccccctacagagtgatcttcctgagcaagggcaaggacgccatgcagagcttcatgatgcccttctacctgatgaaggactgcgagatcaagcagcccgtgttcggcgccaactacatcaagggcaccgtgaaggccgaggccggcggcggctgggagggcagcgccagctacaagctgaccttcaccgcccccatgagcccccccctgctgcagcccaagcccagaccccagaagcagccccccgcccccatcaccacccaggccatcgccagcagaagacacctgcccaccacccacagaaagatcgaggaccccgtgggcccccccgccagcctgccccccaccctgatcagcctgccctaccccagccacagaggctgcgccggcgcctggggcggcgagggcgccccctgcagccccagcagaagcgaccacaagcagctgcccggcaccagcatcgtgggccactag

SEQ ID NO: 105374 - DNA, 651 bp, synthetic construct
  misc_feature 1..651: note = Description of Artificial Sequence: Synthetic coding sequence
  source 1..651: mol_type = other DNA
atggccctgaacaagaaccacagcgagggcggcggcgtgatcgtgaacaacaccgagagcatcctgatgagctacgaccacgtggagctgaccttcaacgacatgaagaacgtgcccgaggccttcaagggcaccaagaagggcaccgtgtacctgaccccctacagagtgatcttcctgagcaagggcaaggacgccatgcagagcttcatgatgcccttctacctgatgaaggactgcgagatcaagcagcccgtgttcggcgccaactacatcaagggcaccgtgaaggccgaggccggcggcggctgggagggcagcgccagctacaagctgaccttcaccgccggcggcgccatcgagttcggccagagaatgctgcaggtggccagccaggagttctaccccggcccccccatgatggacggcgccatgggctacgtgcagccccccccccccccctaccccggccccatggagccccccgtgagcggccccgacgtgcccagcacccccgccgccgaggccaaggccgccgaggccgccgccagcgcctactacaaccccggcaacccccacaacgtgtacatgcccaccagccagccccccccccccccctactacccccccgaggacaagaagacccagtag

SEQ ID NO: 105375 - DNA, 2769 bp, synthetic construct
  misc_feature 1..2769: note = Description of Artificial Sequence: Synthetic coding sequence
  source 1..2769: mol_type = other DNA
atggccaccgccagccccagaagcgacaccagcaacaaccacagcggcagactgcagctgcaggtgaccgtgagcagcgccaagctgaagagaaagaagaactggttcggcaccgccatctacaccgaggtggtggtggacggcgagatcaccaagaccgccaagagcagcagcagcagcaaccccaagtgggacgagcagctgaccgtgaacgtgaccccccagaccaccctggagttccaggtgtggagccacagaaccctgaaggccgacgccctgctgggcaaggccaccatcgacctgaagcaggccctgctgatccacaacagaaagctggagagagtgaaggagcagctgaagctgagcctggagaacaagaacggcatcgcccagaccggcgagctgaccgtggtgctggacggcctggtgatcgagcaggagaacatcaccaactgcagcagcagccccaccatcgagatccaggagaacggcgacgccctgcacgagaacggcgagcccagcgccagaaccaccgccagactggccgtggagggcaccaacggcatcgacaaccacgtgcccaccagcaccctggtgcagaacagctgctgcagctacgtggtgaacggcgacaacacccccagcagccccagccaggtggccgccagacccaagaacacccccgcccccaagcccctggccagcgagcccgccgacgacaccgtgaacggcgagagcagcagcttcgcccccaccgacaacgccagcgtgaccggcacccccgtggtgagcgaggagaacgccctgagccccaactgcaccagcaccaccgtggaggacccccccgtgcaggagatcctgaccagcagcgagaacaacgagtgcatccccagcaccagcgccgagctggagagcgaggccagaagcatcctggagcccgacaccagcaacagcagaagcagcagcgccttcgaggccgccaagagcagacagcccgacggctgcatggaccccgtgagacagcagagcggcaacgccaacaccgagaccctgcccagcggctgggagcagagaaaggacccccacggcagaacctactacgtggaccacaacaccagaaccaccacctgggagagaccccagcccctgccccccggctgggagagaagagtggacgacagaagaagagtgtactacgtggaccacaacaccagaaccaccacctggcagagacccaccatggagagcgtgagaaacttcgagcagtggcagagccagagaaaccagctgcagggcgccatgcagcagttcaaccagagatacctgtacagcgccagcatgctggccgccgagaacgacccctacggccccctgccccccggctgggagaagagagtggacagcaccgacagagtgtacttcgtgaaccacaacaccaagaccacccagtgggaggaccccagaacccagggcctgcagaacgaggagcccctgcccgagggctgggagatcagatacaccagagagggcgtgagatacttcgtggaccacaacaccagaaccaccaccttcaaggaccccagaaacggcaagagcagcgtgaccaagggcggcccccagatcgcctacgagagaggcttcagatggaagctggcccacttcagatacctgtgccagagcaacgccctgcccagccacgtgaagatcaacgtgagcagacagaccctgttcgaggacagcttccagcagatcatggccctgaagccctacgacctgagaagaagactgtacgtgatcttcagaggcgaggagggcctggactacggcggcctggccagagagtggttcttcctgctgagccacgaggtgctgaaccccatgtactgcctgttcgagtacgccggcaagaacaactactgcctgcagatcaaccccgccagcaccatcaaccccgaccacctgagctacttctgcttcatcggcagattcatcgccatggccctgttccacggcaagttcatcgacaccggcttcagcctgcccttctacaagagaatgctgagcaagaagctgaccatcaaggacctggagagcatcgacaccgagttctacaacagcctgatctggatcagagacaacaacatcgaggagtgcggcctggagatgtacttcagcgtggacatggagatcctgggcaaggtgaccagccacgacctgaagctgggcggcagcaacatcctggtgaccgaggagaacaaggacgagtacatcggcctgatgaccgagtggagattcagcagaggcgtgcaggagcagaccaaggccttcctggacggcttcaacgaggtggtgcccctgcagtggctgcagtacttcgacgagaaggagctggaggtgatgctgtgcggcatgcaggaggtggacctggccgactggcagagaaacaccgtgtacagacactacaccagaaacagcaagcagatcatctggttctggcagttcgtgaaggagaccgacaacgaggtgagaatgagactgctgcagttcgtgaccggcacctgcagactgcccctgggcggcttcgccgagctgatgggcagcaacggcccccagaagttctgcatcgagaaggtgggcaaggacacctggctgcccagaagccacacctgcttcaacagactggacctgcccccctacaagagctacgagcagctgaaggagaagctgctgttcgccatcgaggagaccgagggcttcggccaggagtag

SEQ ID NO: 105376 - DNA, 2379 bp, synthetic construct
  misc_feature 1..2379: note = Description of Artificial Sequence: Synthetic coding sequence
  source 1..2379: mol_type = other DNA
atggccaccgccagccccagaagcgacaccagcaacaaccacagcggcagactgcagctgcaggtgaccgtgagcagcgccaagctgaagagaaagaagaactggttcggcaccgccatctacaccgaggtggtggtggacggcgagatcaccaagaccgccaagagcagcagcagcagcaaccccaagtgggacgagcagctgaccgtgaacgtgaccccccagaccaccctggagttccaggtgtggagccacagaaccctgaaggccgacgccctgctgggcaaggccaccatcgacctgaagcaggccctgctgatccacaacagaaagttcaacggcgagagcagcagcttcgcccccaccgacaacgccagcgtgaccggcacccccgtggtgagcgaggagaacgccctgagccccaactgcaccagcaccaccgtggaggacccccccgtgcaggagatcctgaccagcagcgagaacaacgagtgcatccccagcaccagcgccgagctggagagcgaggccagaagcatcctggagcccgacaccagcaacagcagaagcagcagcgccttcgaggccgccaagagcagacagcccgacggctgcatggaccccgtgagacagcagagcggcaacgccaacaccgagaccctgcccagcggctgggagcagagaaaggacccccacggcagaacctactacgtggaccacaacaccagaaccaccacctgggagagaccccagcccctgccccccggctgggagagaagagtggacgacagaagaagagtgtactacgtggaccacaacaccagaaccaccacctggcagagacccaccatggagagcgtgagaaacttcgagcagtggcagagccagagaaaccagctgcagggcgccatgcagcagttcaaccagagatacctgtacagcgccagcatgctggccgccgagaacgacccctacggccccctgccccccggctgggagaagagagtggacagcaccgacagagtgtacttcgtgaaccacaacaccaagaccacccagtgggaggaccccagaacccagggcctgcagaacgaggagcccctgcccgagggctgggagatcagatacaccagagagggcgtgagatacttcgtggaccacaacaccagaaccaccaccttcaaggaccccagaaacggcaagagcagcgtgaccaagggcggcccccagatcgcctacgagagaggcttcagatggaagctggcccacttcagatacctgtgccagagcaacgccctgcccagccacgtgaagatcaacgtgagcagacagaccctgttcgaggacagcttccagcagatcatggccctgaagccctacgacctgagaagaagactgtacgtgatcttcagaggcgaggagggcctggactacggcggcctggccagagagtggttcttcctgctgagccacgaggtgctgaaccccatgtactgcctgttcgagtacgccggcaagaacaactactgcctgcagatcaaccccgccagcaccatcaaccccgaccacctgagctacttctgcttcatcggcagattcatcgccatggccctgttccacggcaagttcatcgacaccggcttcagcctgcccttctacaagagaatgctgagcaagaagctgaccatcaaggacctggagagcatcgacaccgagttctacaacagcctgatctggatcagagacaacaacatcgaggagtgcggcctggagatgtacttcagcgtggacatggagatcctgggcaaggtgaccagccacgacctgaagctgggcggcagcaacatcctggtgaccgaggagaacaaggacgagtacatcggcctgatgaccgagtggagattcagcagaggcgtgcaggagcagaccaaggccttcctggacggcttcaacgaggtggtgcccctgcagtggctgcagtacttcgacgagaaggagctggaggtgatgctgtgcggcatgcaggaggtggacctggccgactggcagagaaacaccgtgtacagacactacaccagaaacagcaagcagatcatctggttctggcagttcgtgaaggagaccgacaacgaggtgagaatgagactgctgcagttcgtgaccggcacctgcagactgcccctgggcggcttcgccgagctgatgggcagcaacggcccccagaagttctgcatcgagaaggtgggcaaggacacctggctgcccagaagccacacctgcttcaacagactggacctgcccccctacaagagctacgagcagctgaaggagaagctgctgttcgccatcgaggagaccgagggcttcggccaggagtag

SEQ ID NO: 105377 - DNA, 2115 bp, synthetic construct
  misc_feature 1..2115: note = Description of Artificial Sequence: Synthetic coding sequence
  source 1..2115: mol_type = other DNA
atggccaccgccagccccagaagcgacaccagcaacaaccacagcggcagactgcagctgcaggtgaccgtgaacggcgagagcagcagcttcgcccccaccgacaacgccagcgtgaccggcacccccgtggtgagcgaggagaacgccctgagccccaactgcaccagcaccaccgtggaggacccccccgtgcaggagatcctgaccagcagcgagaacaacgagtgcatccccagcaccagcgccgagctggagagcgaggccagaagcatcctggagcccgacaccagcaacagcagaagcagcagcgccttcgaggccgccaagagcagacagcccgacggctgcatggaccccgtgagacagcagagcggcaacgccaacaccgagaccctgcccagcggctgggagcagagaaaggacccccacggcagaacctactacgtggaccacaacaccagaaccaccacctgggagagaccccagcccctgccccccggctgggagagaagagtggacgacagaagaagagtgtactacgtggaccacaacaccagaaccaccacctggcagagacccaccatggagagcgtgagaaacttcgagcagtggcagagccagagaaaccagctgcagggcgccatgcagcagttcaaccagagatacctgtacagcgccagcatgctggccgccgagaacgacccctacggccccctgccccccggctgggagaagagagtggacagcaccgacagagtgtacttcgtgaaccacaacaccaagaccacccagtgggaggaccccagaacccagggcctgcagaacgaggagcccctgcccgagggctgggagatcagatacaccagagagggcgtgagatacttcgtggaccacaacaccagaaccaccaccttcaaggaccccagaaacggcaagagcagcgtgaccaagggcggcccccagatcgcctacgagagaggcttcagatggaagctggcccacttcagatacctgtgccagagcaacgccctgcccagccacgtgaagatcaacgtgagcagacagaccctgttcgaggacagcttccagcagatcatggccctgaagccctacgacctgagaagaagactgtacgtgatcttcagaggcgaggagggcctggactacggcggcctggccagagagtggttcttcctgctgagccacgaggtgctgaaccccatgtactgcctgttcgagtacgccggcaagaacaactactgcctgcagatcaaccccgccagcaccatcaaccccgaccacctgagctacttctgcttcatcggcagattcatcgccatggccctgttccacggcaagttcatcgacaccggcttcagcctgcccttctacaagagaatgctgagcaagaagctgaccatcaaggacctggagagcatcgacaccgagttctacaacagcctgatctggatcagagacaacaacatcgaggagtgcggcctggagatgtacttcagcgtggacatggagatcctgggcaaggtgaccagccacgacctgaagctgggcggcagcaacatcctggtgaccgaggagaacaaggacgagtacatcggcctgatgaccgagtggagattcagcagaggcgtgcaggagcagaccaaggccttcctggacggcttcaacgaggtggtgcccctgcagtggctgcagtacttcgacgagaaggagctggaggtgatgctgtgcggcatgcaggaggtggacctggccgactggcagagaaacaccgtgtacagacactacaccagaaacagcaagcagatcatctggttctggcagttcgtgaaggagaccgacaacgaggtgagaatgagactgctgcagttcgtgaccggcacctgcagactgcccctgggcggcttcgccgagctgatgggcagcaacggcccccagaagttctgcatcgagaaggtgggcaaggacacctggctgcccagaagccacacctgcttcaacagactggacctgcccccctacaagagctacgagcagctgaaggagaagctgctgttcgccatcgaggagaccgagggcttcggccaggagtag

SEQ ID NO: 105378 - DNA, 336 bp, synthetic construct
  misc_feature 1..336: note = Description of Artificial Sequence: Synthetic coding sequence
  source 1..336: mol_type = other DNA
atggccaccgccagccccagaagcgacaccagcaacaaccacagcggcagactgcagctgcaggtgaccgtgagcagcgccaagctgaagagaaagaagaactggttcggcaccgccatctacaccgaggtggtggtggacggcgagatcaccaagaccgccaagagcagcagcagcagcaaccccaagtgggacgagcagctgaccgtgaacgtgaccccccagaccaccctggagttccaggtgtggagccacagaaccctgaaggccgacgccctgctgggcaaggccaccatcgacctgaagcaggccctgctgatccacaacagaaagtag

SEQ ID NO: 105379 - DNA, 2769 bp, synthetic construct; identical to SEQ ID NO: 105375
  misc_feature 1..2769: note = Description of Artificial Sequence: Synthetic coding sequence
  source 1..2769: mol_type = other DNA

SEQ ID NO: 105380 - DNA, 2613 bp, synthetic construct
  misc_feature 1..2613: note = Description of Artificial Sequence: Synthetic coding sequence
  source 1..2613: mol_type = other DNA
atggccagcgccagcagcagcagagccggcgtggccctgcccttcgagaagagccagctgaccctgaaggtggtgagcgccaagcccaaggtgcacaacagacagcccagaatcaacagctacgtggaggtggccgtggacggcctgcccagcgagaccaagaagaccggcaagagaatcggcagcagcgagctgctgtggaacgagatcatcatcctgaacgtgaccgcccagagccacctggacctgaaggtgtggagctgccacaccctgagaaacgagctgctgggcaccgccagcgtgaacctgagcaacgtgctgaagaacaacggcggcaagatggagaacatgcagctgaccctgaacctgcagaccgagaacaagggcagcgtggtgagcggcggcgagctgaccatcttcctggacggccccaccgtggacctgggcaacgtgcccaacggcagcgccctgaccgacggcagccagctgcccagcagagacagcagcggcaccgccgtggcccccgagaacagacaccagccccccagcaccaactgcttcggcggcagaagcagaacccacagacacagcggcgccagcgccagaaccacccccgccaccggcgagcagagccccggcgccagaagcagacacagacagcccgtgaagaacagcggccacagcggcctggccaacggcaccgtgaacgacgagcccaccaccgccaccgaccccgaggagcccagcgtggtgggcgtgaccagcccccccgccgcccccctgagcgtgacccccaaccccaacaccaccagcctgcccgcccccgccacccccgccgagggcgaggagcccagcaccagcggcacccagcagctgcccgccgccgcccaggcccccgacgccctgcccgccggctgggagcagagagagctgcccaacggcagagtgtactacgtggaccacaacaccaagaccaccacctgggagagacccctgccccccggctgggagaagagaaccgaccccagaggcagattctactacgtggaccacaacaccagaaccaccacctggcagagacccaccgccgagtacgtgagaaactacgagcagtggcagagccagagaaaccagctgcagggcgccatgcagcacttcagccagagattcctgtaccagagcagcagcgccagcaccgaccacgaccccctgggccccctgccccccggctgggagaagagacaggacaacggcagagtgtactacgtgaaccacaacaccagaaccacccagtgggaggaccccagaacccagggcatgatccaggagcccgccctgccccccggctgggagatgaagtacaccagcgagggcgtgagatacttcgtggaccacaacaccagaaccaccaccttcaaggaccccagacccggcttcgagagcggcaccaagcagggcagccccggcgcctacgacagaagcttcagatggaagtaccaccagttcagattcctgtgccacagcaacgccctgcccagccacgtgaagatcagcgtgagcagacagaccctgttcgaggacagcttccagcagatcatgaacatgaagccctacgacctgagaagaagactgtacatcatcatgagaggcgaggagggcctggactacggcggcatcgccagagagtggttcttcctgctgagccacgaggtgctgaaccccatgtactgcctgttcgagtacgccggcaagaacaactactgcctgcagatcaaccccgccagcagcatcaaccccgaccacctgacctacttcagattcatcggcagattcatcgccatggccctgtaccacggcaagttcatcgacaccggcttcaccctgcccttctacaagagaatgctgaacaagagacccaccctgaaggacctggagagcatcgaccccgagttctacaacagcatcgtgtggatcaaggagaacaacctggaggagtgcggcctggagctgtacttcatccaggacatggagatcctgggcaaggtgaccacccacgagctgaaggagggcggcgagagcatcagagtgaccgaggagaacaaggaggagtacatcatgctgctgaccgactggagattcaccagaggcgtggaggagcagaccaaggccttcctggacggcttcaacgaggtggcccccctggagtggctgagatacttcgacgagaaggagctggagctgatgctgtgcggcatgcaggagatcgacatgagcgactggcagaagagcaccatctacagacactacaccaagaacagcaagcagatccagtggttctggcaggtggtgaaggagatggacaacgagaagagaatcagactgctgcagttcgtgaccggcacctgcagactgcccgtgggcggcttcgccgagctgatcggcagcaacggcccccagaagttctgcatcgacaaggtgggcaaggagacctggctgcccagaagccacacctgcttcaacagactggacctgcccccctacaagagctacgagcagctgagagagaagctgctgtacgccatcgaggagaccgagggcttcggccaggagtag

SEQ ID NO: 105381 - DNA, 2613 bp, synthetic construct; identical to SEQ ID NO: 105380
  misc_feature 1..2613: note = Description of Artificial Sequence: Synthetic coding sequence
  source 1..2613: mol_type = other DNA

SEQ ID NO: 105382 - DNA, 2613 bp, synthetic construct; identical to SEQ ID NO: 105380
  misc_feature 1..2613: note = Description of Artificial Sequence: Synthetic coding sequence
  source 1..2613: mol_type = other DNA

SEQ ID NO: 105383 - DNA, 2265 bp, synthetic construct
  misc_feature 1..2265: note = Description of Artificial Sequence: Synthetic coding sequence
  source 1..2265: mol_type = other DNA
atgcagctgaccctgaacctgcagaccgagaacaagggcagcgtggtgagcggcggcgagctgaccatcttcctggacggccccaccgtggacctgggcaacgtgcccaacggcagcgccctgaccgacggcagccagctgcccagcagagacagcagcggcaccgccgtggcccccgagaacagacaccagccccccagcaccaactgcttcggcggcagaagcagaacccacagacacagcggcgccagcgccagaaccacccccgccaccggcgagcagagccccggcgccagaagcagacacagacagcccgtgaagaacagcggccacagcggcctggccaacggcaccgtgaacgacgagcccaccaccgccaccgaccccgaggagcccagcgtggtgggcgtgaccagcccccccgccgcccccctgagcgtgacccccaaccccaacaccaccagcctgcccgcccccgccacccccgccgagggcgaggagcccagcaccagcggcacccagcagctgcccgccgccgcccaggcccccgacgccctgcccgccggctgggagcagagagagctgcccaacggcagagtgtactacgtggaccacaacaccaagaccaccacctgggagagacccctgccccccggctgggagaagagaaccgaccccagaggcagattctactacgtggaccacaacaccagaaccaccacctggcagagacccaccgccgagtacgtgagaaactacgagcagtggcagagccagagaaaccagctgcagggcgccatgcagcacttcagccagagattcctgtaccagagcagcagcgccagcaccgaccacgaccccctgggccccctgccccccggctgggagaagagacaggacaacggcagagtgtactacgtgaaccacaacaccagaaccacccagtgggaggaccccagaacccagggcatgatccaggagcccgccctgccccccggctgggagatgaagtacaccagcgagggcgtgagatacttcgtggaccacaacaccagaaccaccaccttcaaggaccccagacccggcttcgagagcggcaccaagcagggcagccccggcgcctacgacagaagcttcagatggaagtaccaccagttcagattcctgtgccacagcaacgccctgcccagccacgtgaagatcagcgtgagcagacagaccctgttcgaggacagcttccagcagatcatgaacatgaagccctacgacctgagaagaagactgtacatcatcatgagaggcgaggagggcctggactacggcggcatcgccagagagtggttcttcctgctgagccacgaggtgctgaaccccatgtactgcctgttcgagtacgccggcaagaacaactactgcctgcagatcaaccccgccagcagcatcaaccccgaccacctgacctacttcagattcatcggcagattcatcgccatggccctgtaccacggcaagttcatcgacaccggcttcaccctgcccttctacaagagaatgctgaacaagagacccaccctgaaggacctggagagcatcgaccccgagttctacaacagcatcgtgtggatcaaggagaacaacctggaggagtgcggcctggagctgtacttcatccaggacatggagatcctgggcaaggtgaccacccacgagctgaaggagggcggcgagagcatcagagtgaccgaggagaacaaggaggagtacatcatgctgctgaccgactggagattcaccagaggcgtggaggagcagaccaaggccttcctggacggcttcaacgaggtggcccccctggagtggctgagatacttcgacgagaaggagctggagctgatgctgtgcggcatgcaggagatcgacatgagcgactggcagaagagcaccatctacagacactacaccaagaacagcaagcagatccagtggttctggcaggtggtgaaggagatggacaacgagaagagaatcagactgctgcagttcgtgaccggcacctgcagactgcccgtgggcggcttcgccgagctgatcggcagcaacggcccccagaagttctgcatcgacaaggtgggcaaggagacctggctgcccagaagccacacctgcttcaacagactggacctgcccccctacaagagctacgagcagctgagagagaagctgctgtacgccatcgaggagaccgagggcttcggccaggagtag

SEQ ID NO: 105384 - DNA, 2274 bp, synthetic construct
  misc_feature 1..2274: note = Description of Artificial Sequence: Synthetic coding sequence
  source 1..2274: mol_type = other DNA
atggagaacatgcagctgaccctgaacctgcagaccgagaacaagggcagcgtggtgagcggcggcgagctgaccatcttcctggacggccccaccgtggacctgggcaacgtgcccaacggcagcgccctgaccgacggcagccagctgcccagcagagacagcagcggcaccgccgtggcccccgagaacagacaccagccccccagcaccaactgcttcggcggcagaagcagaacccacagacacagcggcgccagcgccagaaccacccccgccaccggcgagcagagccccggcgccagaagcagacacagacagcccgtgaagaacagcggccacagcggcctggccaacggcaccgtgaacgacgagcccaccaccgccaccgaccccgaggagcccagcgtggtgggcgtgaccagcccccccgccgcccccctgagcgtgacccccaaccccaacaccaccagcctgcccgcccccgccacccccgccgagggcgaggagcccagcaccagcggcacccagcagctgcccgccgccgcccaggcccccgacgccctgcccgccggctgggagcagagagagctgcccaacggcagagtgtactacgtggaccacaacaccaagaccaccacctgggagagacccctgccccccggctgggagaagagaaccgaccccagaggcagattctactacgtggaccacaacaccagaaccaccacctggcagagacccaccgccgagtacgtgagaaactacgagcagtggcagagccagagaaaccagctgcagggcgccatgcagcacttcagccagagattcctgtaccagagcagcagcgccagcaccgaccacgaccccctgggccccctgccccccggctgggagaagagacaggacaacggcagagtgtactacgtgaaccacaacaccagaaccacccagtgggaggaccccagaacccagggcatgatccaggagcccgccctgccccccggctgggagatgaagtacaccagcgagggcgtgagatacttcgtggaccacaacaccagaaccaccaccttcaaggaccccagacccggcttcgagagcggcaccaagcagggcagccccggcgcctacgacagaagcttcagatggaagtaccaccagttcagattcctgtgccacagcaacgccctgcccagccacgtgaagatcagcgtgagcagacagaccctgttcgaggacagcttccagcagatcatgaacatgaagccctacgacctgagaagaagactgtacatcatcatgagaggcgaggagggcctggactacggcggcatcgccagagagtggttcttcctgctgagccacgaggtgctgaaccccatgtactgcctgttcgagtacgccggcaagaacaactactgcctgcagatcaaccccgccagcagcatcaaccccgaccacctgacctacttcagattcatcggcagattcatcgccatggccctgtaccacggcaagttcatcgacaccggcttcaccctgcccttctacaagagaatgctgaacaagagacccaccctgaaggacctggagagcatcgaccccgagttctacaacagcatcgtgtggatcaaggagaacaacctggaggagtgcggcctggagctgtacttcatccaggacatggagatcctgggcaaggtgaccacccacgagctgaaggagggcggcgagagcatcagagtgaccgaggagaacaaggaggagtacatcatgctgctgaccgactggagattcaccagaggcgtggaggagcagaccaaggccttcctggacggcttcaacgaggtggcccccctggagtggctgagatacttcgacgagaaggagctggagctgatgctgtgcggcatgcaggagatcgacatgagcgactggcagaagagcaccatctacagacactacaccaagaacagcaagcagatccagtggttctggcaggtggtgaaggagatggacaacgagaagagaatcagactgctgcagttcgtgaccggcacctgcagactgcccgtgggcggcttcgccgagctgatcggcagcaacggcccccagaagttctgcatcgacaaggtgggcaaggagacctggctgcccagaagccacacctgcttcaacagactggacctgcccccctacaagagctacgagcagctgagagagaagctgctgtacgccatcgaggagaccgagggcttcggccaggagtag

SEQ ID NO: 105385 - DNA, 1029 bp, synthetic construct
  misc_feature 1..1029: note = Description of Artificial Sequence: Synthetic coding sequence
  source 1..1029: mol_type = other DNA
atgatccaggagcccgccctgccccccggctgggagatgaagtacaccagcgagggcgtgagatacttcgtggaccacaacaccagaaccaccaccttcaaggaccccagacccggcttcgagagcggcaccaagcagggcagccccggcgcctacgacagaagcttcagatggaagtaccaccagttcagattcctgtgccacagcaacgccctgcccagccacgtgaagatcagcgtgagcagacagaccctgttcgaggacagcttccagcagatcatgaacatgaagccctacgacctgagaagaagactgtacatcatcatgagaggcgaggagggcctggactacggcggcatcgccagagagtggttcttcctgctgagccacgaggtgctgaaccccatgtactgcctgttcgagtacgccggcaagaacaactactgcctgcagatcaaccccgccagcagcatcaaccccgaccacctgacctacttcagattcatcggcagattcatcgccatggccctgtaccacggcaagttcatcgacaccggcttcaccctgcccttctacaagagaatgctgaacaagagacccaccctgaaggacctggagagcatcgaccccgagttctacaacagcatcgtgtggatcaaggagaacaacctggaggagtgcggcctggagctgtacttcatccaggacatggagatcctgggcaaggtgaccacccacgagctgaaggagggcggcgagagcatcagagtgaccgaggagaacaaggaggagtacatcatgctgctgaccgactggagattcaccagaggcgtggaggagcagaccaaggccttcctggacggcttcaacgaggtggcccccctggagtggctgagatacttcgacgagaaggagctggagctgatgctgtgcggcatgcaggagatcgacgccaccggcagaagagcccccagcaccggcaccacccccagaaccgccagcagaagcagcggcagcggcagatggtag

SEQ ID NO: 105386 - DNA, 1296 bp, synthetic construct
  misc_feature 1..1296: note = Description of Artificial Sequence: Synthetic coding sequence
  source 1..1296: mol_type = other DNA
atgatccaggagcccgccctgccccccggctgggagatgaagtacaccagcgagggcgtgagatacttcgtggaccacaacaccagaaccaccaccttcaaggaccccagacccggcttcgagagcggcaccaagcagggcagccccggcgcctacgacagaagcttcagatggaagtaccaccagttcagattcctgtgccacagcaacgccctgcccagccacgtgaagatcagcgtgagcagacagaccctgttcgaggacagcttccagcagatcatgaacatgaagccctacgacctgagaagaagactgtacatcatcatgagaggcgaggagggcctggactacggcggcatcgccagagagtggttcttcctgctgagccacgaggtgctgaaccccatgtactgcctgttcgagtacgccggcaagaacaactactgcctgcagatcaaccccgccagcagcatcaaccccgaccacctgacctacttcagattcatcggcagattcatcgccatggccctgtaccacggcaagttcatcgacaccggcttcaccctgcccttctacaagagaatgctgaacaagagacccaccctgaaggacctggagagcatcgaccccgagttctacaacagcatcgtgtggatcaaggagaacaacctggaggagtgcggcctggagctgtacttcatccaggacatggagatcctgggcaaggtgaccacccacgagctgaaggagggcggcgagagcatcagagtgaccgaggagaacaaggaggagtacatcatgctgctgaccgactggagattcaccagaggcgtggaggagcagaccaaggccttcctggacggcttcaacgaggtggcccccctggagtggctgagatacttcgacgagaaggagctggagctgatgctgtgcggcatgcaggagatcgacatgagcgactggcagaagagcaccatctacagacactacaccaagaacagcaagcagatccagtggttctggcaggtggtgaaggagatggacaacgagaagagaatcagactgctgcagttcgtgaccggcacctgcagactgcccgtgggcggcttcgccgagctgatcggcagcaacggcccccagaagttctgcatcgacaaggtgggcaaggagacctggctgcccagaagccacacctgcttcaacagactggacctgcccccctacaagagctacgagcagctgagagagaagctgctgtacgccatcgaggagaccgagggcttcggccaggagtag

SEQ ID NO: 105387 - DNA, 1008 bp, synthetic construct
  misc_feature 1..1008: note = Description of Artificial Sequence: Synthetic coding sequence
  source 1..1008: mol_type = other DNA
atggccagcgccagcagcagcagagccggcgtggccctgcccttcgagaagagccagctgaccctgaaggtggtgagcgccaagcccaaggtgcacaacagacagcccagaatcaacagctacgtggaggtggccgtggacggcctgcccagcgagaccaagaagaccggcaagagaatcggcagcagcgagctgctgtggaacgagatcatcatcctgaacgtgaccgcccagagccacctggacctgaaggtgtggagctgccacaccctgagaaacgagctgctgggcaccgccagcgtgaacctgagcaacgtgctgaagaacaacggcggcaagatggagaacatgcagctgaccctgaacctgcagaccgagaacaagggcagcgtggtgagcggcggcgagctgaccatcttcctggacggccccaccgtggacctgggcaacgtgcccaacggcagcgccctgaccgacggcagccagctgcccagcagagacagcagcggcaccgccgtggcccccgagaacagacaccagccccccagcaccaactgcttcggcggcagaagcagaacccacagacacagcggcgccagcgccagaaccacccccgccaccggcgagcagagccccggcgccagaagcagacacagacagcccgtgaagaacagcggccacagcggcctggccaacggcaccgtgaacgacgagcccaccaccgccaccgaccccgaggagcccagcgtggtgggcgtgaccagcccccccgccgcccccctgagcgtgacccccaaccccaacaccaccagcctgcccgcccccgccacccccgccgagggcgaggagcccagcaccagcggcacccagcagctgcccgccgccgcccaggcccccgacgccctgcccgccggctgggagcagagagagctgcccaacggcagagtgtactacgtggaccacaacaccaagaccaccacctgggagagacccctgccccccggctag

SEQ ID NO: 105388 - DNA, 210 bp, synthetic construct
  misc_feature 1..210: note = Description of Artificial Sequence: Synthetic coding sequence
  source 1..210: mol_type = other DNA
atggagagccccaagaagaagaaccagcagctgaaggtgggcatcctgcacctgggcagcagacagaagaagatcagaatccagctgagaagccaggtgctgggcagagagatgagagacatggagggcgacctgcaggagctgcaccagagcaacaccggcgacaagagcggcttcggcttcagaagacagggcgaggacaacacctag

SEQ ID NO: 105389 - DNA, 246 bp, synthetic construct
  misc_feature 1..246: note = Description of Artificial Sequence: Synthetic coding sequence
  source 1..246: mol_type = other DNA
atggagagccccaagaagaagaaccagcagctgaaggtgggcatcctgcacctgggcagcagacagaagaagatcagaatccagctgagaagccagtgcgccacctggaaggtgatctgcaagagctgcatcagccagacccccggcatcaacctggacctgggcagcggcgtgaaggtgaagatcatccccaaggaggagcactgcaagatgcccgaggccggcgaggagcagccccaggtgtag

SEQ ID NO: 105390 - DNA, 441 bp, synthetic construct
  misc_feature 1..441: note = Description of Artificial Sequence: Synthetic coding sequence
  source 1..441: mol_type = other DNA
atgctgctgtggtgccccccccagtgcgcctgcagcctgggcgtgttccccagcgcccccagccccgtgtggggcaccagaagaagctgcgagcccgccaccagagtgcccgaggtgtggatcctgagccccctgctgagacacggcggccacacccagacccagaaccacaccgccagccccagaagccccgtgatggagagccccaagaagaagaaccagcagctgaaggtgggcatcctgcacctgggcagcagacagaagaagatcagaatccagctgagaagccagtgcgccacctggaaggtgatctgcaagagctgcatcagccagacccccggcatcaacctggacctgggcagcggcgtgaaggtgaagatcatccccaaggaggagcactgcaagatgcccgaggccggcgaggagcagccccaggtgtag

SEQ ID NO: 105391 - DNA, 210 bp, synthetic construct; identical to SEQ ID NO: 105388
  misc_feature 1..210: note = Description of Artificial Sequence: Synthetic coding sequence
  source 1..210: mol_type = other DNA

SEQ ID NO: 105392 - DNA, 210 bp, synthetic construct; identical to SEQ ID NO: 105388
  misc_feature 1..210: note = Description of Artificial Sequence: Synthetic coding sequence
  source 1..210: mol_type = other DNA

SEQ ID NO: 105393 - DNA, 246 bp, synthetic construct; identical to SEQ ID NO: 105389
  misc_feature 1..246: note = Description of Artificial Sequence: Synthetic coding sequence
  source 1..246: mol_type = other DNA

SEQ ID NO: 105394 - DNA, 210 bp, synthetic construct; identical to SEQ ID NO: 105388
  misc_feature 1..210: note = Description of Artificial Sequence: Synthetic coding sequence
  source 1..210: mol_type = other DNA

SEQ ID NO: 105395 - DNA, 441 bp, synthetic construct; identical to SEQ ID NO: 105390
  misc_feature 1..441: note = Description of Artificial Sequence: Synthetic coding sequence
  source 1..441: mol_type = other DNA

SEQ ID NO: 105396 - DNA, 246 bp, synthetic construct; identical to SEQ ID NO: 105389
  misc_feature 1..246: note = Description of Artificial Sequence: Synthetic coding sequence
  source 1..246: mol_type = other DNA

SEQ ID NO: 105397 - DNA, 210 bp, synthetic construct; identical to SEQ ID NO: 105388
  misc_feature 1..210: note = Description of Artificial Sequence: Synthetic coding sequence
  source 1..210: mol_type = other DNA

SEQ ID NO: 105398 - DNA, 246 bp, synthetic construct; identical to SEQ ID NO: 105389
  misc_feature 1..246: note = Description of Artificial Sequence: Synthetic coding sequence
  source 1..246: mol_type = other DNA

SEQ ID NO: 105399 - DNA, 441 bp, synthetic construct; identical to SEQ ID NO: 105390
  misc_feature 1..441: note = Description of Artificial Sequence: Synthetic coding sequence
  source 1..441: mol_type = other DNA

SEQ ID NO: 105400 - DNA, 210 bp, synthetic construct; identical to SEQ ID NO: 105388
  misc_feature 1..210: note = Description of Artificial Sequence: Synthetic coding sequence
  source 1..210: mol_type = other DNA

SEQ ID NO: 105401 - DNA, 210 bp, synthetic construct; identical to SEQ ID NO: 105388
  misc_feature 1..210: note = Description of Artificial Sequence: Synthetic coding sequence
  source 1..210: mol_type = other DNA

SEQ ID NO: 105402 - DNA, 246 bp, synthetic construct; identical to SEQ ID NO: 105389
  misc_feature 1..246: note = Description of Artificial Sequence: Synthetic coding sequence
  source 1..246: mol_type = other DNA

SEQ ID NO: 105403 - DNA, 441 bp, synthetic construct; identical to SEQ ID NO: 105390
  misc_feature 1..441: note = Description of Artificial Sequence: Synthetic coding sequence
  source 1..441: mol_type = other DNA

SEQ ID NO: 105404 - DNA, 336 bp, synthetic construct
  misc_feature 1..336: note = Description of Artificial Sequence: Synthetic coding sequence
  source 1..336: mol_type = other DNA
atgatctggagaggcagaagcacctacagacccagacccagaagaagcgtgcccccccccgagctgatcggccccatgctggagcccggcgacgaggagccccagcaggaggagccccccaccgagagcagagaccccgcccccggccaggagagagaggaggaccagggcgccgccgagacccaggtgcccgacctggaggccgacctgcaggagctgagccagagcaagaccggcggcgagtgcggcaacggccccgacgaccagggcaagatcctgcccaagagcgagcagttcaagatgcccgagggcggcgacagacagccccaggtgtag

SEQ ID NO: 105405 - DNA, 336 bp, synthetic construct; identical to SEQ ID NO: 105404
  misc_feature 1..336: note = Description of Artificial Sequence: Synthetic coding sequence
  source 1..336: mol_type = other DNA

SEQ ID NO: 105406 - DNA, 4002 bp, synthetic construct
  misc_feature 1..4002: note = Description of Artificial Sequence: Synthetic coding sequence
  source 1..4002: mol_type = other DNA
atgaccgccgacaagctggtgttcttcgtgaacggcagaaaggtggtggagaagaacgccgaccccgagaccaccctgctggcctacctgagaagaaagctgggcctgagcggcaccaagctgggctgcggcgagggcggctgcggcgcctgcaccgtgatgctgagcaagtacgacagactgcagaacaagatcgtgcacttcagcgccaacgcctgcctggcccccatctgcagcctgcaccacgtggccgtgaccaccgtggagggcatcggcagcaccaagaccagactgcaccccgtgcaggagagaatcgccaagagccacggcagccagtgcggcttctgcacccccggcatcgtgatgagcatgtacaccctgctgagaaaccagcccgagcccaccatggaggagatcgagaacgccttccagggcaacctgtgcagatgcaccggctacagacccatcctgcagggcttcagaaccttcgccagagacggcggctgctgcggcggcgacggcaacaaccccaactgctgcatgaaccagaagaaggaccacagcgtgagcctgagccccagcctgttcaagcccgaggagttcacccccctggaccccacccaggagcccatcttcccccccgagctgctgagactgaaggacacccccagaaagcagctgagattcgagggcgagagagtgacctggatccaggccagcaccctgaaggagctgctggacctgaaggcccagcaccccgacgccaagctggtggtgggcaacaccgagatcggcatcgagatgaagttcaagaacatgctgttccccatgatcgtgtgccccgcctggatccccgagctgaacagcgtggagcacggccccgacggcatcagcttcggcgccgcctgccccctgagcatcgtggagaagaccctggtggacgccgtggccaagctgcccgcccagaagaccgaggtgttcagaggcgtgctggagcagctgagatggttcgccggcaagcaggtgaagagcgtggccagcgtgggcggcaacatcatcaccgccagccccatcagcgacctgaaccccgtgttcatggccagcggcgccaagctgaccctggtgagcagaggcaccagaagaaccgtgcagatggaccacaccttcttccccggctacagaaagaccctgctgagccccgaggagatcctgctgagcatcgagatcccctacagcagagagggcgagtacttcagcgccttcaagcaggccagcagaagagaggacgacatcgccaaggtgaccagcggcatgagagtgctgttcaagcccggcaccaccgaggtgcaggagctggccctgtgctacggcggcatggccaacagaaccatcagcgccctgaagaccacccagagacagctgagcaagctgtggaaggaggagctgctgcaggacgtgtgcgccggcctggccgaggagctgcacctgccccccgacgcccccggcggcatggtggacttcagatgcaccctgaccctgagcttcttcttcaagttctacctgaccgtgctgcagaagctgggccaggagaacctggaggacaagtgcggcaagctggaccccaccttcgccagcgccaccctgctgttccagaaggacccccccgccgacgtgcagctgttccaggaggtgcccaagggccagagcgaggaggacatggtgggcagacccctgccccacctggccgccgacatgcaggccagcggcgaggccgtgtactgcgacgacatccccagatacgagaacgagctgagcctgagactggtgaccagcaccagagcccacgccaagatcaagagcatcgacaccagcgaggccaagaaggtgcccggcttcgtgtgcttcatcagcgccgacgacgtgcccggcagcaacatcaccggcatctgcaacgacgagaccgtgttcgccaaggacaaggtgacctgcgtgggccacatcatcggcgccgtggtggccgacacccccgagcacacccagagagccgcccagggcgtgaagatcacctacgaggagctgcccgccatcatcaccatcgaggacgccatcaagaacaacagcttctacggccccgagctgaagatcgagaagggcgacctgaagaagggcttcagcgaggccgacaacgtggtgagcggcgagatctacatcggcggccaggagcacttctacctggagacccactgcaccatcgccgtgcccaagggcgaggccggcgagatggagctgttcgtgagcacccagaacaccatgaagacccagagcttcgtggccaagatgctgggcgtgcccgccaacagaatcgtggtgagagtgaagagaatgggcggcggcttcggcggcaaggagaccagaagcaccgtggtgagcaccgccgtggccctggccgcctacaagaccggcagacccgtgagatgcatgctggacagagacgaggacatgctgatcaccggcggcagacaccccttcctggccagatacaaggtgggcttcatgaagaccggcaccgtggtggccctggaggtggaccacttcagcaacgtgggcaacacccaggacctgagccagagcatcatggagagagccctgttccacatggacaactgctacaagatccccaacatcagaggcaccggcagactgtgcaagaccaacctgcccagcaacaccgccttcagaggcttcggcggcccccagggcatgctgatcgccgagtgctggatgagcgaggtggccgtgacctgcggcatgcccgccgaggaggtgagaagaaagaacctgtacaaggagggcgacctgacccacttcaaccagaagctggagggcttcaccctgcccagatgctgggaggagtgcctggccagcagccagtaccacgccagaaagagcgaggtggacaagttcaacaaggagaactgctggaagaagagaggcctgtgcatcatccccaccaagttcggcatcagcttcaccgtgcccttcctgaaccaggccggcgccctgctgcacgtgtacaccgacggcagcgtgctgctgacccacggcggcaccgagatgggccagggcctgcacaccaagatggtgcaggtggccagcagagccctgaagatccccaccagcaagatctacatcagcgagaccagcaccaacaccgtgcccaacaccagccccaccgccgccagcgtgagcgccgacctgaacggccaggccgtgtacgccgcctgccagaccatcctgaagagactggagccctacaagaagaagaaccccagcggcagctgggaggactgggtgaccgccgcctacatggacaccgtgagcctgagcgccaccggcttctacagaacccccaacctgggctacagcttcgagaccaacagcggcaaccccttccactacttcagctacggcgtggcctgcagcgaggtggagatcgactgcctgaccggcgaccacaagaacctgagaaccgacatcgtgatggacgtgggcagcagcctgaaccccgccatcgacatcggccaggtggagggcgccttcgtgcagggcctgggcctgttcaccctggaggagctgcactacagccccgagggcagcctgcacaccagaggccccagcacctacaagatccccgccttcggcagcatccccatcgagttcagagtgagcctgctgagagactgccccaacaagaaggccatctacgccagcaaggccgtgggcgagccccccctgttcctggccgccagcatcttcttcgccatcaaggacgccatcagagccgccagagcccagcacaccggcaacaacgtgaaggagctgttcagactggacagccccgccacccccgagaagatcagaaacgcctgcgtggacaagttcaccaccctgtgcgtgaccggcgtgcccgagaactgcaagccctggagcgtgagagtgtag

SEQ ID NO: 105407 - DNA, 1896 bp, synthetic construct
  misc_feature 1..1896: note = Description of Artificial Sequence: Synthetic coding sequence
  source 1..1896: mol_type = other DNA
atgaagttcgccgagcacctgagcgcccacatcacccccgagtggagaaagcagtacatccagtacgaggccttcaaggacatgctgtacagcgcccaggaccaggcccccagcgtggaggtgaccgacgaggacaccgtgaagagatacttcgccaagttcgaggagaagttcttccagacctgcgagaaggagctggccaagatcaacaccttctacagcgagaagctggccgaggcccagagaagattcgccaccctgcagaacgagctgcagagcagcctggacgcccagaaggagagcaccggcgtgaccaccctgagacagagaagaaagcccgtgttccacctgagccacgaggagagagtgcagcacagaaacatcaaggacctgaagctggccttcagcgagttctacctgagcctgatcctgctgcagaactaccagaacctgaacttcaccggcttcagaaagatcctgaagaagcacgacaagatcctggagaccagcagaggcgccgactggagagtggcccacgtggaggtggcccccttctacacctgcaagaagatcaaccagctgatcagcgagaccgaggccgtggtgaccaacgagctggaggacggcgacagacagaaggccatgaagagactgagagtgccccccctgggcgccgcccagcccgcccccgcctggaccaccttcagagtgggcctgttctgcggcatcttcatcgtgctgaacatcaccctggtgctggccgccgtgttcaagctggagaccgacagaagcatctggcccctgatcagaatctacagaggcggcttcctgctgatcgagttcctgttcctgctgggcatcaacacctacggctggagacaggccggcgtgaaccacgtgctgatcttcgagctgaaccccagaagcaacctgagccaccagcacctgttcgagatcgccggcttcctgggcatcctgtggtgcctgagcctgctggcctgcttcttcgcccccatcagcgtgatccccacctacgtgtaccccctggccctgtacggcttcatggtgttcttcctgatcaaccccaccaagaccttctactacaagagcagattctggctgctgaagctgctgttcagagtgttcaccgcccccttccacaaggtgggcttcgccgacttctggctggccgaccagctgaacagcctgagcgtgatcctgatggacctggagtacatgatctgcttctacagcctggagctgaagtgggacgagagcaagggcctgctgcccaacaacagcgaggagagaggccacagcgacaccatggtgttcttctacctgtggatcgtgttctacatcatcagcagctgctacaccctgatctgggacctgaagatggactggggcctgttcgacaagaacgccggcgagaacaccttcctgagagaggagatcgtgtacccccagaaggcctactactactgcgccatcatcgaggacgtgatcctgagattcgcctggaccatccagatcagcatcaccagcaccaccctgctgccccacagcggcgacatcatcgccaccgtgttcgcccccctggaggtgttcagaagattcgtgtggaacttcttcagactggagaacgagcacctgaacaactgcggcgagttcagagccgtgagagacatcagcgtggcccccctgaacgccgacgaccagaccctgctggagcagatgatggaccaggacgacggcgtgagaaacagacagaagaacagaagctggaagtacaaccagagcatcagcctgagaagacccagactggccagccagagcaaggccagagacaccaaggtgctgatcgaggacaccgacgacgaggccaacacctag

SEQ ID NO: 105408 - DNA, 2091 bp, synthetic construct
  misc_feature 1..2091: note = Description of Artificial Sequence: Synthetic coding sequence
  source 1..2091: mol_type = other DNA
atgaagttcgccgagcacctgagcgcccacatcacccccgagtggagaaagcagtacatccagtacgaggccttcaaggacatgctgtacagcgcccaggaccaggcccccagcgtggaggtgaccgacgaggacaccgtgaagagatacttcgccaagttcgaggagaagttcttccagacctgcgagaaggagctggccaagatcaacaccttctacagcgagaagctggccgaggcccagagaagattcgccaccctgcagaacgagctgcagagcagcctggacgcccagaaggagagcaccggcgtgaccaccctgagacagagaagaaagcccgtgttccacctgagccacgaggagagagtgcagcacagaaacatcaaggacctgaagctggccttcagcgagttctacctgagcctgatcctgctgcagaactaccagaacctgaacttcaccggcttcagaaagatcctgaagaagcacgacaagatcctggagaccagcagaggcgccgactggagagtggcccacgtggaggtggcccccttctacacctgcaagaagatcaaccagctgatcagcgagaccgaggccgtggtgaccaacgagctggaggacggcgacagacagaaggccatgaagagactgagagtgccccccctgggcgccgcccagcccgcccccgcctggaccaccttcagagtgggcctgttctgcggcatcttcatcgtgctgaacatcaccctggtgctggccgccgtgttcaagctggagaccgacagaagcatctggcccctgatcagaatctacagaggcggcttcctgctgatcgagttcctgttcctgctgggcatcaacacctacggctggagacaggccggcgtgaaccacgtgctgatcttcgagctgaaccccagaagcaacctgagccaccagcacctgttcgagatcgccggcttcctgggcatcctgtggtgcctgagcctgctggcctgcttcttcgcccccatcagcgtgatccccacctacgtgtaccccctggccctgtacggcttcatggtgttcttcctgatcaaccccaccaagaccttctactacaagagcagattctggctgctgaagctgctgttcagagtgttcaccgcccccttccacaaggtgggcttcgccgacttctggctggccgaccagctgaacagcctgagcgtgatcctgatggacctggagtacatgatctgcttctacagcctggagctgaagtgggacgagagcaagggcctgctgcccaacaacagcgaggagagcggcatctgccacaagtacacctacggcgtgagagccatcgtgcagtgcatccccgcctggctgagattcatccagtgcctgagaagatacagagacaccaagagagccttcccccacctggtgaacgccggcaagtacagcaccaccttcttcatggtgaccttcgccgccctgtacagcacccacaaggagagaggccacagcgacaccatggtgttcttctacctgtggatcgtgttctacatcatcagcagctgctacaccctgatctgggacctgaagatggactggggcctgttcgacaagaacgccggcgagaacaccttcctgagagaggagatcgtgtacccccagaaggcctactactactgcgccatcatcgaggacgtgatcctgagattcgcctggaccatccagatcagcatcaccagcaccaccctgctgccccacagcggcgacatcatcgccaccgtgttcgcccccctggaggtgttcagaagattcgtgtggaacttcttcagactggagaacgagcacctgaacaactgcggcgagttcagagccgtgagagacatcagcgtggcccccctgaacgccgacgaccagaccctgctggagcagatgatggaccaggacgacggcgtgagaaacagacagaagaacagaagctggaagtacaaccagagcatcagcctgagaagacccagactggccagccagagcaaggccagagacaccaaggtgctgatcgaggacaccgacgacgaggccaacacctag

SEQ ID NO: 105409 - DNA, 543 bp, synthetic construct
  misc_feature 1..543: note = Description of Artificial Sequence: Synthetic coding sequence
  source 1..543: mol_type = other DNA
atggagagctggtggggcctgccctgcctggccttcctgtgcttcctgatgcacgccagaggccagagagacttcgacctggccgacgccctggacgaccccgagcccaccaagaagcccaacagcgacatctaccccaagcccaagcccccctactacccccagcccgagaaccccgacagcggcggcaacatctaccccagacccaagcccagaccccagccccagcccggcaacagcggcaacagcggcggctacttcaacgacgtggacagagacgacggcagatacccccccagacccagacccagaccccccgccggcggcggcggcggcggctacagcagctacggcaacagcgacaacacccacggcggcgaccaccacagcacctacggcaaccccgagggcaacatggtggccaagatcgtgagccccatcgtgagcgtggtggtggtgaccctgctgggcgccgccgccagctacttcaagctgaacaacagaagaaactgcttcagaacccacgagcccgagaacgtgtag

SEQ ID NO: 105410 - DNA, 588 bp, synthetic construct
  misc_feature 1..588: note = Description of Artificial Sequence: Synthetic coding sequence
  source 1..588: mol_type = other DNA
atggagagctggtggggcctgccctgcctggccttcctgtgcttcctgatgcacgccagaggccagagagacttcgacctggccgacgccctggacgaccccgagcccaccaagaagcccaacagcgacatctaccccaagcccaagcccccctactacccccagcccgagaaccccgacagcggcggcaacatctaccccagacccaagcccagaccccagccccagcccggcaacagcggcaacagcggcggctacttcaacgacgtggacagagacgacggcagatacccccccagacccagacccagaccccccgccggcggcggcggcggcggctacagcagctacggcaacagcgacaacacccacggcagaggcggctacagactgaacagcagatacggcaacacctacggcggcgaccaccacagcacctacggcaaccccgagggcaacatggtggccaagatcgtgagccccatcgtgagcgtggtggtggtgaccctgctgggcgccgccgccagctacttcaagctgaacaacagaagaaactgcttcagaacccacgagcccgagaacgtgtag

SEQ ID NO: 105411 - DNA, 546 bp, synthetic construct
  misc_feature 1..546: note = Description of Artificial Sequence: Synthetic coding sequence
  source 1..546: mol_type = other DNA
atggagagctggtggggcctgccctgcctggccttcctgtgcttcctgatgcacgccagaggccagagagacttcgacctggccgacgccctggacgaccccgagcccaccaagaagcccaacagcgacatctaccccaagcccaagcccccctactacccccagcccgagaaccccgacagcggcggcaacatctaccccagacccaagcccagaccccagccccagcccggcaacagcggcaacagcggcggcagctacttcaacgacgtggacagagacgacggcagatacccccccagacccagacccagaccccccgccggcggcggcggcggcggctacagcagctacggcaacagcgacaacacccacggcggcgaccaccacagcacctacggcaaccccgagggcaacatggtggccaagatcgtgagccccatcgtgagcgtggtggtggtgaccctgctgggcgccgccgccagctacttcaagctgaacaacagaagaaactgcttcagaacccacgagcccgagaacgtgtag

SEQ ID NO: 105412 - DNA, 129 bp, synthetic construct
  misc_feature 1..129: note = Description of Artificial Sequence: Synthetic coding sequence
  source 1..129: mol_type = other DNA
atggtggccaagatcgtgagccccatcgtgagcgtggtggtggtgaccctgctgggcgccgccgccagctacttcaagctgaacaacagaagaaactgcttcagaacccacgagcccgagaacgtgtag

SEQ ID NO: 105413 - DNA, 10650 bp, synthetic construct
  misc_feature 1..10650: note = Description of Artificial Sequence: Synthetic coding sequence
  source 1..10650: mol_type = other DNA
atgttccccatgcagaagggcagcctgaacctgctgagacagaagtgggagagctgcgactaccagagaagcgagtgccaccccagagacagccactgcaccatcttccagccccaggagagcaagctgctggcccccgagggcgaggtggtgagcgccccccagagcctggaccccaccagcctgccctacagcaccggcgaggagatgtggagcagcaagcccgaggagaaggacagcgtggacaagagcaacaacaccagagagtacggcagacccgaggtgctgaaggaggacagcctgagcagcagaagaagaatcgagagattcagcatcgccctggacgagctgagaagcgtgttcgaggcccccaagagcggcaacaagcccgccgagtacggcggcaaggaggtggagatcgagagaagcctgtgcagccccgccttcaagagccaccccggcagccagctggaggacagcgtgaaggacagcgacaagaagggcaaggagaccagcttcgacaagatgagccccgagagcggccacagcagaatcttcgaggccaccgccggccccaacaagcccgagagcggcttcgccgaggacagcgccgccagaggcgagggcgtgagcgacctgcacgaggtggtgagcctgaaggagagaatggccagataccaggccgccgtgagcagaggcgactgcagaagcttcagcgccaacatgatggaggagagcgagatgtgcgccgtgcccggcggcctggccaaggtgaagaagcagttcgaggacgagatcaccagcagcagaaacaccttcgcccagtaccagtaccagcaccagaacagaagcgagcaggaggccatccacagcagccaggtgggcaccagcagaagcagccaggagatggccagaaacgagcaggagggcagcaaggtgcagaagatcgacgtgcacggcaccgagatggtgagccacctggagaagcacaccgaggaggtgaaccaggccagccagttccaccagtacgtgcaggagaccgtgatcgacacccccgaggacgaggagatccccaaggtgagcaccaagctgctgaaggagcagttcgagaagagcgcccaggagaagatcctgtacagcgacaaggagatgaccacccccgccaagcagatcaagaccgagagcgagtacgaggagaccttcaagcccagcagcgtggtgagcaccagcagcaccagctgcgtgagcaccagccagagaaaggagaccagcaccaccagatacagcgaccacagcgtgaccagcagcaccctggcccagatcaacgccaccagcagcggcatgaccgaggagttccccccccccccccccgacgtgctgcagaccagcgtggacgtgaccgccttcagccagagccccgagctgcccagcccccccagaagactgcccgtgcccaaggacgtgtacagcaagcagagaaacctgtacgagctgaacagactgtacaagcacatccaccccgagctgagaaagaacctggagaaggactacatcagcgaggtgagcgagatcgtgagcagccagatgaacagcggcagcagcgtgagcgccgacgtgcagcaggccagatacgtgttcgagaacaccaacgacagcagccagaaggacctgaacagcgagagagagtacctggagtgggacgagatcctgaagggcgaggtgcagagcatcagatggatcttcgagaaccagcccctggacagcatcaacaacggcagccccgacgagggcgacatcagcagaggcatcgccgaccaggagatcatcgccggcggcgacgtgaagtacaccacctggatgttcgagacccagcccatcgacaccctgggcgcctacagcagcgacaccgtggagaacgccgagaagatccccgagctggccagaggcgacgtgtgcaccgccagatggatgttcgagaccagacccctggacagcatgaacaagatgcaccagagccaggaggagagcgccgtgaccatcagcaaggacatcaccggcggcgacgtgaagaccgtgagatacatgttcgagacccagcacctggaccagctgggccagctgcacagcgtggacgaggtgcacctgctgcagctgagaagcgagctgaaggagatcaagggcaacgtgaagagaagcatcaagtgcttcgagacccagcccctgtacgtgatcagagacggcagcggccagatgctggagatcaagaccgtgcacagagaggacgtggagaagggcgacgtgagaaccgccagatggatgttcgagacccagcccctggacaccatcaacaaggacatcaccgagatcaaggtggtgagaggcatcagcatggaggagaacgtgaagggcggcgtgagcaaggccaagtggctgttcgagacccagcccctggagaagatcaaggagagcgaggaggtgatcatcgagaaggagaagatcatcggcaccgacgtgagcagaaagtgctggatgttcgagacccagcccctggacatcctgaaggaggtgcccgacgccgacagcctgcagagagaggagatcatcggcggcgacgtgcagaccaccaagcacctgttcgagaccctgcccatcgaggccctgaaggacagccccgacatcggcaagctgcagaagatcaccgccagcgaggaggagaagggcgacgtgagacaccagaagtggatcttcgagacccagcccctggaggacatcagaaaggacaagaaggagtacaccagaaccgtgaagctggaggaggtggacagaggcgacgtgaagaactacacccacatcttcgagagcaacaacctgatcaagttcgacgccagccacaagatcgaggtggagggcgtgaccagaggcgccgtggagctgaacaagagcctgttcgagaccacccccctgtacgccatccaggaccccctgggcaagtaccaccaggtgaagaccgtgcagcaggaggagatcgtgagaggcgacgtgagaagctgcagatggctgttcgagaccagacccatcgaccagttcgacgagagcatccacaagttccagatcatcagaggcatcagcgcccaggagatccagaccggcaacgtgaagagcgccaagtggctgttcgagacccagcccctggacagcatcaagtacttcagcgacgtggaggagaccgagagcaagaccgagcagaccagagacatcgtgaagggcgacgtgaagacctgcaagtggctgttcgagacccagcccatggagagcctgtacgagaaggtgagcctgatgaccagcagcgaggagatccacaagggcgacgtgaagacctgcacctggctgttcgagacccagcccctggacaccatcaaggacgacagcgagaccgccgtgaagctgcagaccgtgaagcaggaggagatccagggcggcgacgtgagaaccgcctgcttcctgttcgagaccgagaacctggacagcatccagggcgaggaggtgaaggagatcaagcccgtggagatggacatccaggccggcgacgtgagcagcatgagatacaagttcgagaaccagagcctggacagcatcagcagcagcagcgaggaggtgctgaagaagatcaagaccctgaagaccgaggacatccagaagggcaacgtgctgaactgcagatggctgttcgagaaccagcccatcgacaagatcaaggagagccaggagggcgacgagtgcgtgaagaccgtgaccgacatccagggcggcgacgtgagaaagggctgcttcatcttcgagaccttcagcctggacgagatcaaggaggagagcgactacatcagcaccaagaagaccatcaccgaggaggtgatccagggcgacgtgaagagctacagaatgctgttcgagacccagcccctgtacgccatccaggacagagagggcagctaccacgaggtgaccaccgtgaagaaggaggaggtgatccacggcgacgtgagaggcaccagatggctgttcgagaccaagcccctggacagcatcaacaagagcgagaccgtgtacgtgatcaagagcgtgacccaggaggacatccagaagggcgacgtgagcagcgtgagatacagattcgagacccagcccctggaccagatcagcgaggagagccacaacatcatgcccagcatcgaccacatccagggcggcaacgtgaagaccagcagacagttcttcgagagcgagaacttcgacaagaacaactacatcagaaccgtgagcgtgaacgagatccagaagggcaacgtgaagaccagcacctggctgttcgagacccacaccatggacgagctgagaggcgagggcctggagtacgagaacatcaagaccgtgacccaggaggacgtgcagaagggcgacgtgaagcaggccgtgtggctgttcgagaacagaaccttcgacagcatcatggaggcccacaagggcatcaccaagatgaccaaggaggagatcccccccagcgacgtgaagaccaccacctggctgttcgagaccacccccctgcacgagttcaacgagaccagagtggagaagatcgagatcatcggcaagagcatcaaggagaccctggaggacctgtacagccagaaggtgatccaggcccccggcatcatcatcgaggccgacgagatcggcgacgtgagaatggccaagtacaagctgatgaaccaggccagccccgagatccagaaggaggagatcatcagagccgacctgagaaacatcatggtgaacctgctgagcaagagagactgcaccgagagagagatcctgatcagcgaggaggagaagggcaacgtgaacctgaccaagacccagctgctgaacagaagcaccgagttccacgccgagaaggaggagatcgtgaagggcgacgtgcagcaggccatcaagaacctgttcagcgaggagagaagcgtgaagaagggcatcctgatccaggaggacgagaagggcgacatcaacatgaccatctactgcctgctgcacgagaacgacggcgacaccatcgagagagaggaggtgatcggcggcgacgtgaagagaaccatccacaacctgctgagcagcaccagcaacaacaagatcagcgagagagccaagatcgacgccagcgagagaggcaacgtgcagttcttcaccacctgcatcgaggccggcgccctggactacctgaagcagctgcacaccgagagcaacgagaccctgaccgccaagaagcaggagggcgagaaggagatcatcggcggcgacgtggagggcaccaagctgctgctgaagaagagacagagcctggtggagagaaccgtgagcgagaccgacatcatccccggcgacgtgcacaacaccgtgaaggtgttcatgaccgagccccagagcaccttcggcaagatccccaaggaggagatcatcaagggcgacctgaccagcaccctgaacagcctgagccaggccgtgaaccagaagaccgtgaccaagaccgaggagatcatcaagggcaacatgctggccaccctgaagagcctgaaggagagcagccacagatggaaggagagcaagcagcccgacgccatccccggcgacatcgagaaggccatcgagtgcctggagaaggccaccaacaccaagaccgagatcctgaagaaggagctgctgaaggacgacctggagaccagcctgagaagcctgaaggaggcccagagaagcttcaaggaggtgcacaaggagggcgtgatcaagaaggacgccaaggccgtgatggccggcagcagcggcgagcagaagaccgacatccaccaggtggccgtgcagagaaacaagaacagcctgctgcagcccaagcccggccccttcgagcccgccgccaagtggcagggcggcgccgacaccctgagccagaccatgggcaagagctgccacggcaacctggtggaggagagaaccgaggtgaacctgcccaaggcccccaagggcaccgtgaagatcgtgatcgacagagagcagaacaacgacgccctggagaagagcctgagaagactgagcaacagccaccacaagagcaacgtgctggagagcggcgacaagaccggcgtgtggaccgacaccaccggcgagcagcacctgagagacgagtacatgagcagacagctgaccagcaccgtgagcgtgaagaacaacctgaccaccaaggagagcgacagagccgtgagagagctgaagaaggacgacgtgttcaacagcatccagagcgccggcaagaccgtgggcaagcagcagacctacgagctgagaaacgaccaccagaagatggagggcttccacatcaagagccccaagaagaccaagaacatcaagatcctgaccgacacccagagcagcaagcccagccccacccagcaccccgtgagcatgcccgtgggcggcacctacgacctgagcggcgacttccagaagcagaccctgctgaagcaggagaccaagtacagcaacaaggacatcaagaagaagaacatcaacctgcagcccatgtggcagctgctgcccgtggagcaggacaccagcaacgtgaccgagatgaaggtgagcgagaagagccacaacaccttcaaggccaccaacaagaagagagagaccgacgtgcacctgaagagccaggacttcctgatgaagaccaacaccagcaccggcctgaagatggccatggagagaagcctgaaccccatcaacttcaaccccgagaacaacgtgaaggagagcgagtgccccctgcccccccccagcccccccccccccccccccagcaacgccagcagcgagatcgagttccccctgcccccccccccccccctgatgatgttccccgagaagaacggcttcctgcccagcctgagcaccgagaagatcaaggccgagttcgagagcttccccggcctgcccctgccccccccccccgtggacgagaagagcgagagagagagcagcagcatgttcctgccccccccccccccccccacccccagccagaagcccgcccacctgctgagcagcagcgcccccgagaagcacagcggcgacttcatgcagcagtacagccagaaggaggccagcaacagccagaacagccaggccaagatcatcaccggcaagaccggcgtgctgcccccccccaccctgcccaagcccaagctgcccaagcacatcaaggacaacaagaacgacttcagccccaaggtggagctggccaccagcctgagcgacatggagtgcaagatcaccaccagcaaggaccagaagaaggtgatggtgatgaccagcagcgagcacaccgagaccaagcagaacgtgatcagcaagagcctggacgagagaaagcagctgagcatcgacagcgccaactgcctgagccacaccgtgcccggcaccagcgcccccagaaagaagcagatcgcccccctgatcaagagccacagcttccccgagagcagcggccagcagaaccccaagccctacatgagaaagttcaagacccccctgatgatcgccgaggagaagtacagacagcagaaggaggagatcgagaagcagaagcaggagagcagctactacaacatcgtgaagacccagagccagaaccagcacatcaccgaggtggagaaggagatgcccctgcagaagaccaacgaggaggtgagcctgagcggcatcgacagcgagtgcaccgtggtgcagcccagccccggcagccagagcaacgccagaatcctgggcgtgtgcagcgacaaccagctgagcaccaccagccccgagaccgtggccgccaagagactgcaccacgtgctggccgccagcgaggacaaggacaagatgaagaaggaggtgctgcagagcagcagagacatcatgcagagcaagagcgcctgcgagatcaagcagagccaccaggagtgcagcacccagcagacccagcagaagaagtacctggagcagctgcacctgccccagagcaagcccatcagccccaacttcaaggtgaagaccatcaagctgcccaccctggaccacaccctgaacgagaccgaccacagctacgagagccacaagcagcagagcgagatcgacgtgcagaccttcaccaagaagcagtacctgaagaccaagaagaccgaggccagcaccgagtgcagccacaagcagagcctggccgagagacactaccagctgcccaagaaggagaagagagtgaccgtgcagctgcccaccgagagcatccagaagaaccaggaggacaagctgaagatggtgcccagaaagcagagagagttcagcggcagcgacagaggcaagctgcccggcagcgaggagaagaaccagggccccagcatgatcggcagaaaggaggagagactgatcaccgagagaaagcacgagcacctgaagaacaagagcgcccccaaggtggtgaagcagaaggtgatcgacgcccacctggacagccagacccagaacttccagcagacccagatccagaccgccgagagcaaggccgagcacaagaagctgccccagccctacaacagcctgcaggaggagaagtgcctggaggtgaagggcatccaggagaagcaggtgttcagcaacaccaaggacagcaagcaggagatcacccagaacaagagcttcttcagcagcgtgaaggagagccagagagacgacggcaagggcgccctgaacatcgtggagttcctgagaaagagagaggagctgcagcagatcctgagcagagtgaagcagttcgaggccgagcccaacaagagcggcctgaagaccttccagaccctgctgaacaccatccccggctggctgatcagcgaggacaagagagagtacgccgtgcacatcgccatggagaacaacctggagaaggtgaaggaggagatcacccacatcaagacccaggccgaggacatgctggtgagctacgagaacatcatccagaccgccatgatgagcagcaagaccggcaagcccggcaacaagcccaccagcctggacgagaccagcagcaaggtgagcaacgtgcacgtgagcaacaacaagaacagcgagcagaaggagaacaagatcgccaaggagaagaccgtgcagcaccaggtggccgcccaccacgaggccaccgtgagaagccacgtgaagacccaccaggagatcaagctggacgacagcaacatccccccccccagcctgaagaccagaccccccagccccaccttcatcaccatcgagagcaccgccagaagaaccgagaaccccaccaagaacgagctgagccagagccccaagaaggacagctacgtggagcccccccccagaagacccatgagccagaagagcgagatccacagagccaacaccagccccagcccccccagaagcagaagcgagcagctggtgagactgaaggacaccaccgccaagctgagcaagggcgccatcccctgccccgccgccacccccgtgcccatcgtggagaagagaagcgagatcatcatgagccccgccaccctgagaagacagatcaagatcgagaccagaggcagagacagcccccccaccatcaccatccccgtgaacatcaaccacgccgccagcggcagcttcagagagagcgtggacgcccaggaggagatcagaaaggtggagaagagagccacctacgtgcacaaggacggcctgaacagcaccgaccacatggtgcccgacaccgagagctacgacgccgtggagatcatcagaaaggtggccgtgccccccagactgagcgagcacacccagagatacgaggccgccaacagaaccgtgcagatggccgagaacttcgtgaacgaccccgagaacgagatcaacagatggttcagagagttcgagcacggccccgtgagcgaggccaagagcaacagaagagtgtacgccaagggcgagaccaaccacaacatccagcaggagagcagaaccttctgcaaggaggagttcggcctgaccagcctgggcaacaccagcttcaccgacttcagctgcaagcaccccagagagctgagagagaagatccccgtgaagcagcccagaatctgcagcgagaccagaagcctgagcgagcacttcagcggcatggacgccttcgagagccagatcgtggagagcaagatgaagaccagcagcagccacagcagcgaggccggcaagagcggctgcgacttcaagcacgccccccccacctacgaggacgtgatcgccggccacatcctggacatcagcgacagccccaaggaggtgagaaagaacttccagaagacctggcaggagagcggcagagtgttcaagggcctgggctacgccaccgccgacgccagcgccaccgagatgagaaccaccttccaggaggagagcgccttcatcagcgaggccgccgcccccagacagggcaacatgtacaccctgagcaaggacagcctgagcaacggcgtgcccagcggcagacaggccgagttcagctag

SEQ ID NO: 105414 - DNA, 2817 bp, synthetic construct
  misc_feature 1..2817: note = Description of Artificial Sequence: Synthetic coding sequence
  source 1..2817: mol_type = other DNA
atgttccccatgcagaagggcagcctgaacctgctgagacagaagtgggagagctgcgactaccagagaagcgagtgccaccccagagacagccactgcaccatcttccagccccaggagagcaagctgctggcccccgagggcgaggtggtgagcgccccccagagcctggaccccaccagcctgccctacagcaccggcgaggagatgtggagcagcaagcccgaggagaaggacagcgtggacaagagcaacaacaccagagagtacggcagacccgaggtgctgaaggaggacagcctgagcagcagaagaagaatcgagagattcagcatcgccctggacgagctgagaagcgtgttcgaggcccccaagagcggcaacaagcccgccgagtacggcggcaaggaggtggagatcgagagaagcctgtgcagccccgccttcaagagccaccccggcagccagctggaggacagcgtgaaggacagcgacaagaagggcaaggagaccagcttcgacaagatgagccccgagagcggccacagcagaatcttcgaggccaccgccggccccaacaagcccgagagcggcttcgccgaggacagcgccgccagaggcgagggcgtgagcgacctgcacgaggtggtgagcctgaaggagagaatggccagataccaggccgccgtgagcagaggcgactgcagaagcttcagcgccaacatgatggaggagagcgagatgtgcgccgtgcccggcggcctggccaaggtgaagaagcagttcgaggacgagatcaccagcagcagaaacaccttcgcccagtaccagtaccagcaccagaacagaagcgagcaggaggccatccacagcagccaggtgggcaccagcagaagcagccaggagatggccagaaacgagcaggagggcagcaaggtgcagaagatcgacgtgcacggcaccgagatggtgagccacctggagaagcacaccgaggaggtgaaccaggccagccagttccaccagtacgtgcaggagaccgtgatcgacacccccgaggacgaggagatccccaaggtgagcaccaagctgctgaaggagcagttcgagaagagcgcccaggagaagatcctgtacagcgacaaggagatgaccacccccgccaagcagatcaagaagctgctgctgcaggacaaggagatctgcatcctgtgccagaagaccgtgtaccccatggagtgcctggtggccgacaagcagaacttccacaagagctgcttcagatgccaccactgcaacagcaagctgagcctgggcaactacgccagcctgcacggccagatctactgcaagccccacttcaagcagctgttcaagagcaagggcaactacgacgagggcttcggccacaagcagcacaaggacagatggaactgcaagaaccagagcagaagcgtggacttcatccccaacgaggagcccaacatgtgcaagaacatcgccgagaacaccctggtgcccggcgacagaaacgagcacctggacgccggcaacagcgagggccagagaaacgacctgagaaagctgggcgagagaggcaagctgaaggtgatctggccccccagcaaggagatccccaagaagaccctgcccttcgaggaggagctgaagatgagcaagcccaagtggccccccgagatgaccaccctgctgagccccgagttcaagagcgagagcctgctggaggacgtgagaacccccgagaacaagggccagagacaggaccacttccccttcctgcagccctacctgcagagcacccacgtgtgccagaaggaggacgtgatcggcatcaaggagatgaagatgcccgagggcagaaaggacgagaagaaggagggcagaaagaacgtgcaggacagacccagcgaggccgaggacaccaagagcaacagaaagagcgccatggacctgaacgacaacaacaacgtgatcgtgcagagcgccgagaaggagaagaacgagaagaccaaccagaccaacggcgccgaggtgctgcaggtgaccaacaccgacgacgagatgatgcccgagaaccacaaggagaacctgaacaagaacaacaacaacaactacgtggccgtgagctacctgaacaactgcagacagaagaccagcatcctggagttcctggacctgctgcccctgagcagcgaggccaacgacaccgccaacgagtacgagatcgagaagctggagaacaccagcagaatcagcgagctgctgggcatcttcgagagcgagaagacctacagcagaaacgtgctggccatggccctgaagaagcagaccgacagagccgccgccggcagccccgtgcagcccgcccccaagcccagcctgagcagaggcctgatggtgaagggcggcagcagcatcatcagccccgacaccaacctgctgaacatcaagggcagccacagcaagagcaagaacctgcacttcttcttcagcaacaccgtgaagatcaccgccttcagcaagaagaacgagaacatcttcaactgcgacctgatcgacagcgtggaccagatcaagaacatgccctgcctggacctgagagagttcggcaaggacgtgaagccctggcacgtggagaccaccgaggccgccagaaacaacgagaacaccggcttcgacgccctgagccacgagtgcaccgccaagcccctgttccccagagtggaggtgcagagcgagcagctgaccgtggaggagcagatcaagagaaacagatgctacagcgacaccgagtag

SEQ ID NO: 105415 - DNA, 10650 bp, synthetic construct; identical to SEQ ID NO: 105413
  misc_feature 1..10650: note = Description of Artificial Sequence: Synthetic coding sequence
  source 1..10650: mol_type = other DNA

SEQ ID NO: 105416 - DNA, 9984 bp, synthetic construct
  misc_feature 1..9984: note = Description of Artificial Sequence: Synthetic coding sequence
  source 1..9984: mol_type = other DNA
atggccagataccaggccgccgtgagcagaggcgactgcagaagcttcagcgccaacatgatggaggagagcgagatgtgcgccgtgcccggcggcctggccaaggtgaagaagcagttcgaggacgagatcaccagcagcagaaacaccttcgcccagtaccagtaccagcaccagaacagaagcgagcaggaggccatccacagcagccaggtgggcaccagcagaagcagccaggagatggccagaaacgagcaggagggcagcaaggtgcagaagatcgacgtgcacggcaccgagatggtgagccacctggagaagcacaccgaggaggtgaaccaggccagccagttccaccagtacgtgcaggagaccgtgatcgacacccccgaggacgaggagatccccaaggtgagcaccaagctgctgaaggagcagttcgagaagagcgcccaggagaagatcctgtacagcgacaaggagatgaccacccccgccaagcagatcaagaccgagagcgagtacgaggagaccttcaagcccagcagcgtggtgagcaccagcagcaccagctgcgtgagcaccagccagagaaaggagaccagcaccaccagatacagcgaccacagcgtgaccagcagcaccctggcccagatcaacgccaccagcagcggcatgaccgaggagttccccccccccccccccgacgtgctgcagaccagcgtggacgtgaccgccttcagccagagccccgagctgcccagcccccccagaagactgcccgtgcccaaggacgtgtacagcaagcagagaaacctgtacgagctgaacagactgtacaagcacatccaccccgagctgagaaagaacctggagaaggactacatcagcgaggtgagcgagatcgtgagcagccagatgaacagcggcagcagcgtgagcgccgacgtgcagcaggccagatacgtgttcgagaacaccaacgacagcagccagaaggacctgaacagcgagagagagtacctggagtgggacgagatcctgaagggcgaggtgcagagcatcagatggatcttcgagaaccagcccctggacagcatcaacaacggcagccccgacgagggcgacatcagcagaggcatcgccgaccaggagatcatcgccggcggcgacgtgaagtacaccacctggatgttcgagacccagcccatcgacaccctgggcgcctacagcagcgacaccgtggagaacgccgagaagatccccgagctggccagaggcgacgtgtgcaccgccagatggatgttcgagaccagacccctggacagcatgaacaagatgcaccagagccaggaggagagcgccgtgaccatcagcaaggacatcaccggcggcgacgtgaagaccgtgagatacatgttcgagacccagcacctggaccagctgggccagctgcacagcgtggacgaggtgcacctgctgcagctgagaagcgagctgaaggagatcaagggcaacgtgaagagaagcatcaagtgcttcgagacccagcccctgtacgtgatcagagacggcagcggccagatgctggagatcaagaccgtgcacagagaggacgtggagaagggcgacgtgagaaccgccagatggatgttcgagacccagcccctggacaccatcaacaaggacatcaccgagatcaaggtggtgagaggcatcagcatggaggagaacgtgaagggcggcgtgagcaaggccaagtggctgttcgagacccagcccctggagaagatcaaggagagcgaggaggtgatcatcgagaaggagaagatcatcggcaccgacgtgagcagaaagtgctggatgttcgagacccagcccctggacatcctgaaggaggtgcccgacgccgacagcctgcagagagaggagatcatcggcggcgacgtgcagaccaccaagcacctgttcgagaccctgcccatcgaggccctgaaggacagccccgacatcggcaagctgcagaagatcaccgccagcgaggaggagaagggcgacgtgagacaccagaagtggatcttcgagacccagcccctggaggacatcagaaaggacaagaaggagtacaccagaaccgtgaagctggaggaggtggacagaggcgacgtgaagaactacacccacatcttcgagagcaacaacctgatcaagttcgacgccagccacaagatcgaggtggagggcgtgaccagaggcgccgtggagctgaacaagagcctgttcgagaccacccccctgtacgccatccaggaccccctgggcaagtaccaccaggtgaagaccgtgcagcaggaggagatcgtgagaggcgacgtgagaagctgcagatggctgttcgagaccagacccatcgaccagttcgacgagagcatccacaagttccagatcatcagaggcatcagcgcccaggagatccagaccggcaacgtgaagagcgccaagtggctgttcgagacccagcccctggacagcatcaagtacttcagcgacgtggaggagaccgagagcaagaccgagcagaccagagacatcgtgaagggcgacgtgaagacctgcaagtggctgttcgagacccagcccatggagagcctgtacgagaaggtgagcctgatgaccagcagcgaggagatccacaagggcgacgtgaagacctgcacctggctgttcgagacccagcccctggacaccatcaaggacgacagcgagaccgccgtgaagctgcagaccgtgaagcaggaggagatccagggcggcgacgtgagaaccgcctgcttcctgttcgagaccgagaacctggacagcatccagggcgaggaggtgaaggagatcaagcccgtggagatggacatccaggccggcgacgtgagcagcatgagatacaagttcgagaaccagagcctggacagcatcagcagcagcagcgaggaggtgctgaagaagatcaagaccctgaagaccgaggacatccagaagggcaacgtgctgaactgcagatggctgttcgagaaccagcccatcgacaagatcaaggagagccaggagggcgacgagtgcgtgaagaccgtgaccgacatccagggcggcgacgtgagaaagggctgcttcatcttcgagaccttcagcctggacgagatcaaggaggagagcgactacatcagcaccaagaagaccatcaccgaggaggtgatccagggcgacgtgaagagctacagaatgctgttcgagacccagcccctgtacgccatccaggacagagagggcagctaccacgaggtgaccaccgtgaagaaggaggaggtgatccacggcgacgtgagaggcaccagatggctgttcgagaccaagcccctggacagcatcaacaagagcgagaccgtgtacgtgatcaagagcgtgacccaggaggacatccagaagggcgacgtgagcagcgtgagatacagattcgagacccagcccctggaccagatcagcgaggagagccacaacatcatgcccagcatcgaccacatccagggcggcaacgtgaagaccagcagacagttcttcgagagcgagaacttcgacaagaacaactacatcagaaccgtgagcgtgaacgagatccagaagggcaacgtgaagaccagcacctggctgttcgagacccacaccatggacgagctgagaggcgagggcctggagtacgagaacatcaagaccgtgacccaggaggacgtgcagaagggcgacgtgaagcaggccgtgtggctgttcgagaacagaaccttcgacagcatcatggaggcccacaagggcatcaccaagatgaccaaggaggagatcccccccagcgacgtgaagaccaccacctggctgttcgagaccacccccctgcacgagttcaacgagaccagagtggagaagatcgagatcatcggcaagagcatcaaggagaccctggaggacctgtacagccagaaggtgatccaggcccccggcatcatcatcgaggccgacgagatcggcgacgtgagaatggccaagtacaagctgatgaaccaggccagccccgagatccagaaggaggagatcatcagagccgacctgagaaacatcatggtgaacctgctgagcaagagagactgcaccgagagagagatcctgatcagcgaggaggagaagggcaacgtgaacctgaccaagacccagctgctgaacagaagcaccgagttccacgccgagaaggaggagatcgtgaagggcgacgtgcagcaggccatcaagaacctgttcagcgaggagagaagcgtgaagaagggcatcctgatccaggaggacgagaagggcgacatcaacatgaccatctactgcctgctgcacgagaacgacggcgacaccatcgagagagaggaggtgatcggcggcgacgtgaagagaaccatccacaacctgctgagcagcaccagcaacaacaagatcagcgagagagccaagatcgacgccagcgagagaggcaacgtgcagttcttcaccacctgcatcgaggccggcgccctggactacctgaagcagctgcacaccgagagcaacgagaccctgaccgccaagaagcaggagggcgagaaggagatcatcggcggcgacgtggagggcaccaagctgctgctgaagaagagacagagcctggtggagagaaccgtgagcgagaccgacatcatccccggcgacgtgcacaacaccgtgaaggtgttcatgaccgagccccagagcaccttcggcaagatccccaaggaggagatcatcaagggcgacctgaccagcaccctgaacagcctgagccaggccgtgaaccagaagaccgtgaccaagaccgaggagatcatcaagggcaacatgctggccaccctgaagagcctgaaggagagcagccacagatggaaggagagcaagcagcccgacgccatccccggcgacatcgagaaggccatcgagtgcctggagaaggccaccaacaccaagaccgagatcctgaagaaggagctgctgaaggacgacctggagaccagcctgagaagcctgaaggaggcccagagaagcttcaaggaggtgcacaaggagggcgtgatcaagaaggacgccaaggccgtgatggccggcagcagcggcgagcagaagaccgacatccaccaggtggccgtgcagagaaacaagaacagcctgctgcagcccaagcccggccccttcgagcccgccgccaagtggcagggcggcgccgacaccctgagccagaccatgggcaagagctgccacggcaacctggtggaggagagaaccgaggtgaacctgcccaaggcccccaagggcaccgtgaagatcgtgatcgacagagagcagaacaacgacgccctggagaagagcctgagaagactgagcaacagccaccacaagagcaacgtgctggagagcggcgacaagaccggcgtgtggaccgacaccaccggcgagcagcacctgagagacgagtacatgagcagacagctgaccagcaccgtgagcgtgaagaacaacctgaccaccaaggagagcgacagagccgtgagagagctgaagaaggacgacgtgttcaacagcatccagagcgccggcaagaccgtgggcaagcagcagacctacgagctgagaaacgaccaccagaagatggagggcttccacatcaagagccccaagaagaccaagaacatcaagatcctgaccgacacccagagcagcaagcccagccccacccagcaccccgtgagcatgcccgtgggcggcacctacgacctgagcggcgacttccagaagcagaccctgctgaagcaggagaccaagtacagcaacaaggacatcaagaagaagaacatcaacctgcagcccatgtggcagctgctgcccgtggagcaggacaccagcaacgtgaccgagatgaaggtgagcgagaagagccacaacaccttcaaggccaccaacaagaagagagagaccgacgtgcacctgaagagccaggacttcctgatgaagaccaacaccagcaccggcctgaagatggccatggagagaagcctgaaccccatcaacttcaaccccgagaacaacgtgaaggagagcgagtgccccctgcccccccccagcccccccccccccccccccagcaacgccagcagcgagatcgagttccccctgcccccccccccccccctgatgatgttccccgagaagaacggcttcctgcccagcctgagcaccgagaagatcaaggccgagttcgagagcttccccggcctgcccctgccccccccccccgtggacgagaagagcgagagagagagcagcagcatgttcctgccccccccccccccccccacccccagccagaagcccgcccacctgctgagcagcagcgcccccgagaagcacagcggcgacttcatgcagcagtacagccagaaggaggccagcaacagccagaacagccaggccaagatcatcaccggcaagaccggcgtgctgcccccccccaccctgcccaagcccaagctgcccaagcacatcaaggacaacaagaacgacttcagccccaaggtggagctggccaccagcctgagcgacatggagtgcaagatcaccaccagcaaggaccagaagaaggtgatggtgatgaccagcagcgagcacaccgagaccaagcagaacgtgatcagcaagagcctggacgagagaaagcagctgagcatcgacagcgccaactgcctgagccacaccgtgcccggcaccagcgcccccagaaagaagcagatcgcccccctgatcaagagccacagcttccccgagagcagcggccagcagaaccccaagccctacatgagaaagttcaagacccccctgatgatcgccgaggagaagtacagacagcagaaggaggagatcgagaagcagaagcaggagagcagctactacaacatcgtgaagacccagagccagaaccagcacatcaccgaggtggagaaggagatgcccctgcagaagaccaacgaggaggtgagcctgagcggcatcgacagcgagtgcaccgtggtgcagcccagccccggcagccagagcaacgccagaatcctgggcgtgtgcagcgacaaccagctgagcaccaccagccccgagaccgtggccgccaagagactgcaccacgtgctggccgccagcgaggacaaggacaagatgaagaaggaggtgctgcagagcagcagagacatcatgcagagcaagagcgcctgcgagatcaagcagagccaccaggagtgcagcacccagcagacccagcagaagaagtacctggagcagctgcacctgccccagagcaagcccatcagccccaacttcaaggtgaagaccatcaagctgcccaccctggaccacaccctgaacgagaccgaccacagctacgagagccacaagcagcagagcgagatcgacgtgcagaccttcaccaagaagcagtacctgaagaccaagaagaccgaggccagcaccgagtgcagccacaagcagagcctggccgagagacactaccagctgcccaagaaggagaagagagtgaccgtgcagctgcccaccgagagcatccagaagaaccaggaggacaagctgaagatggtgcccagaaagcagagagagttcagcggcagcgacagaggcaagctgcccggcagcgaggagaagaaccagggccccagcatgatcggcagaaaggaggagagactgatcaccgagagaaagcacgagcacctgaagaacaagagcgcccccaaggtggtgaagcagaaggtgatcgacgcccacctggacagccagacccagaacttccagcagacccagatccagaccgccgagagcaaggccgagcacaagaagctgccccagccctacaacagcctgcaggaggagaagtgcctggaggtgaagggcatccaggagaagcaggtgttcagcaacaccaaggacagcaagcaggagatcacccagaacaagagcttcttcagcagcgtgaaggagagccagagagacgacggcaagggcgccctgaacatcgtggagttcctgagaaagagagaggagctgcagcagatcctgagcagagtgaagcagttcgaggccgagcccaacaagagcggcctgaagaccttccagaccctgctgaacaccatccccggctggctgatcagcgaggacaagagagagtacgccgtgcacatcgccatggagaacaacctggagaaggtgaaggaggagatcacccacatcaagacccaggccgaggacatgctggtgagctacgagaacatcatccagaccgccatgatgagcagcaagaccggcaagcccggcaacaagcccaccagcctggacgagaccagcagcaaggtgagcaacgtgcacgtgagcaacaacaagaacagcgagcagaaggagaacaagatcgccaaggagaagaccgtgcagcaccaggtggccgcccaccacgaggccaccgtgagaagccacgtgaagacccaccaggagatcaagctggacgacagcaacatccccccccccagcctgaagaccagaccccccagccccaccttcatcaccatcgagagcaccgccagaagaaccgagaaccccaccaagaacgagctgagccagagccccaagaaggacagctacgtggagcccccccccagaagacccatgagccagaagagcgagatccacagagccaacaccagccccagcccccccagaagcagaagcgagcagctggtgagactgaaggacaccaccgccaagctgagcaagggcgccatcccctgccccgccgccacccccgtgcccatcgtggagaagagaagcgagatcatcatgagccccgccaccctgagaagacagatcaagatcgagaccagaggcagagacagcccccccaccatcaccatccccgtgaacatcaaccacgccgccagcggcagcttcagagagagcgtggacgcccaggaggagatcagaaaggtggagaagagagccacctacgtgcacaaggacggcctgaacagcaccgaccacatggtgcccgacaccgagagctacgacgccgtggagatcatcagaaaggtggccgtgccccccagactgagcgagcacacccagagatacgaggccgccaacagaaccgtgcagatggccgagaacttcgtgaacgaccccgagaacgagatcaacagatggttcagagagttcgagcacggccccgtgagcgaggccaagagcaacagaagagtgtacgccaagggcgagaccaaccacaacatccagcaggagagcagaaccttctgcaaggaggagttcggcctgaccagcctgggcaacaccagcttcaccgacttcagctgcaagcaccccagagagctgagagagaagatccccgtgaagcagcccagaatctgcagcgagaccagaagcctgagcgagcacttcagcggcatggacgccttcgagagccagatcgtggagagcaagatgaagaccagcagcagccacagcagcgaggccggcaagagcggctgcgacttcaagcacgccccccccacctacgaggacgtgatcgccggccacatcctggacatcagcgacagccccaaggaggtgagaaagaacttccagaagacctggcaggagagcggcagagtgttcaagggcctgggctacgccaccgccgacgccagcgccaccgagatgagaaccaccttccaggaggagagcgccttcatcagcgaggccgccgcccccagacagggcaacatgtacaccctgagcaaggacagcctgagcaacggcgtgcccagcggcagacaggccgagttcagctag

SEQ ID NO: 105417 - DNA, 2151 bp, synthetic construct
  misc_feature 1..2151: note = Description of Artificial Sequence: Synthetic coding sequence
  source 1..2151: mol_type = other DNA
atggccagataccaggccgccgtgagcagaggcgactgcagaagcttcagcgccaacatgatggaggagagcgagatgtgcgccgtgcccggcggcctggccaaggtgaagaagcagttcgaggacgagatcaccagcagcagaaacaccttcgcccagtaccagtaccagcaccagaacagaagcgagcaggaggccatccacagcagccaggtgggcaccagcagaagcagccaggagatggccagaaacgagcaggagggcagcaaggtgcagaagatcgacgtgcacggcaccgagatggtgagccacctggagaagcacaccgaggaggtgaaccaggccagccagttccaccagtacgtgcaggagaccgtgatcgacacccccgaggacgaggagatccccaaggtgagcaccaagctgctgaaggagcagttcgagaagagcgcccaggagaagatcctgtacagcgacaaggagatgaccacccccgccaagcagatcaagaagctgctgctgcaggacaaggagatctgcatcctgtgccagaagaccgtgtaccccatggagtgcctggtggccgacaagcagaacttccacaagagctgcttcagatgccaccactgcaacagcaagctgagcctgggcaactacgccagcctgcacggccagatctactgcaagccccacttcaagcagctgttcaagagcaagggcaactacgacgagggcttcggccacaagcagcacaaggacagatggaactgcaagaaccagagcagaagcgtggacttcatccccaacgaggagcccaacatgtgcaagaacatcgccgagaacaccctggtgcccggcgacagaaacgagcacctggacgccggcaacagcgagggccagagaaacgacctgagaaagctgggcgagagaggcaagctgaaggtgatctggccccccagcaaggagatccccaagaagaccctgcccttcgaggaggagctgaagatgagcaagcccaagtggccccccgagatgaccaccctgctgagccccgagttcaagagcgagagcctgctggaggacgtgagaacccccgagaacaagggccagagacaggaccacttccccttcctgcagccctacctgcagagcacccacgtgtgccagaaggaggacgtgatcggcatcaaggagatgaagatgcccgagggcagaaaggacgagaagaaggagggcagaaagaacgtgcaggacagacccagcgaggccgaggacaccaagagcaacagaaagagcgccatggacctgaacgacaacaacaacgtgatcgtgcagagcgccgagaaggagaagaacgagaagaccaaccagaccaacggcgccgaggtgctgcaggtgaccaacaccgacgacgagatgatgcccgagaaccacaaggagaacctgaacaagaacaacaacaacaactacgtggccgtgagctacctgaacaactgcagacagaagaccagcatcctggagttcctggacctgctgcccctgagcagcgaggccaacgacaccgccaacgagtacgagatcgagaagctggagaacaccagcagaatcagcgagctgctgggcatcttcgagagcgagaagacctacagcagaaacgtgctggccatggccctgaagaagcagaccgacagagccgccgccggcagccccgtgcagcccgcccccaagcccagcctgagcagaggcctgatggtgaagggcggcagcagcatcatcagccccgacaccaacctgctgaacatcaagggcagccacagcaagagcaagaacctgcacttcttcttcagcaacaccgtgaagatcaccgccttcagcaagaagaacgagaacatcttcaactgcgacctgatcgacagcgtggaccagatcaagaacatgccctgcctggacctgagagagttcggcaaggacgtgaagccctggcacgtggagaccaccgaggccgccagaaacaacgagaacaccggcttcgacgccctgagccacgagtgcaccgccaagcccctgttccccagagtggaggtgcagagcgagcagctgaccgtggaggagcagatcaagagaaacagatgctacagcgacaccgagtag

SEQ ID NO: 105418 - DNA, 2817 bp, synthetic construct; identical to SEQ ID NO: 105414
  misc_feature 1..2817: note = Description of Artificial Sequence: Synthetic coding sequence
  source 1..2817: mol_type = other DNA

SEQ ID NO: 105419 - DNA, 2892 bp, synthetic construct
  misc_feature 1..2892: note = Description of Artificial Sequence: Synthetic coding sequence
  source 1..2892: mol_type = other DNA
atgcccctgcagaagaccaacgaggaggtgagcctgagcggcatcgacagcgagtgcaccgtggtgcagcccagccccggcagccagagcaacgccagaatcctgggcgtgtgcagcgacaaccagctgagcaccaccagccccgagaccgtggccgccaagagactgcaccacgtgctggccgccagcgaggacaaggacaagatgaagaaggaggtgctgcagagcagcagagacatcatgcagagcaagagcgcctgcgagatcaagcagagccaccaggagtgcagcacccagcagacccagcagaagaagtacctggagcagctgcacctgccccagagcaagcccatcagccccaacttcaaggtgaagaccatcaagctgcccaccctggaccacaccctgaacgagaccgaccacagctacgagagccacaagcagcagagcgagatcgacgtgcagaccttcaccaagaagcagtacctgaagaccaagaagaccgaggccagcaccgagtgcagccacaagcagagcctggccgagagacactaccagctgcccaagaaggagaagagagtgaccgtgcagctgcccaccgagagcatccagaagaaccaggaggacaagctgaagatggtgcccagaaagcagagagagttcagcggcagcgacagaggcaagctgcccggcagcgaggagaagaaccagggccccagcatgatcggcagaaaggaggagagactgatcaccgagagaaagcacgagcacctgaagaacaagagcgcccccaaggtggtgaagcagaaggtgatcgacgcccacctggacagccagacccagaacttccagcagacccagatccagaccgccgagagcaaggccgagcacaagaagctgccccagccctacaacagcctgcaggaggagaagtgcctggaggtgaagggcatccaggagaagcaggtgttcagcaacaccaaggacagcaagcaggagatcacccagaacaagagcttcttcagcagcgtgaaggagagccagagagacgacggcaagggcgccctgaacatcgtggagttcctgagaaagagagaggagctgcagcagatcctgagcagagtgaagcagttcgaggccgagcccaacaagagcggcctgaagaccttccagaccctgctgaacaccatccccggctggctgatcagcgaggacaagagagagtacgccgtgcacatcgccatggagaacaacctggagaaggtgaaggaggagatcacccacatcaagacccaggccgaggacatgctggtgagctacgagaacatcatccagaccgccatgatgagcagcaagaccggcaagcccggcaacaagcccaccagcctggacgagaccagcagcaaggtgagcaacgtgcacgtgagcaacaacaagaacagcgagcagaaggagaacaagatcgccaaggagaagaccgtgcagcaccaggtggccgcccaccacgaggccaccgtgagaagccacgtgaagacccaccaggagatcaagctggacgacagcaacatccccccccccagcctgaagaccagaccccccagccccaccttcatcaccatcgagagcaccgccagaagaaccgagaaccccaccaagaacgagctgagccagagccccaagaaggacagctacgtggagcccccccccagaagacccatgagccagaagagcgagatccacagagccaacaccagccccagcccccccagaagcagaagcgagcagctggtgagactgaaggacaccaccgccaagctgagcaagggcgccatcccctgccccgccgccacccccgtgcccatcgtggagaagagaagcgagatcatcatgagccccgccaccctgagaagacagatcaagatcgagaccagaggcagagacagcccccccaccatcaccatccccgtgaacatcaaccacgccgccagcggcagcttcagagagagcgtggacgcccaggaggagatcagaaaggtggagaagagagccacctacgtgcacaaggacggcctgaacagcaccgaccacatggtgcccgacaccgagagctacgacgccgtggagatcatcagaaaggtggccgtgccccccagactgagcgagcacacccagagatacgaggccgccaacagaaccgtgcagatggccgagaacttcgtgaacgaccccgagaacgagatcaacagatggttcagagagttcgagcacggccccgtgagcgaggccaagagcaacagaagagtgtacgccaagggcgagaccaaccacaacatccagcaggagagcagaaccttctgcaaggaggagttcggcctgaccagcctgggcaacaccagcttcaccgacttcagctgcaagcaccccagagagctgagagagaagatccccgtgaagcagcccagaatctgcagcgagaccagaagcctgagcgagcacttcagcggcatggacgccttcgagagccagatcgtggagagcaagatgaagaccagcagcagccacagcagcgaggccggcaagagcggctgcgacttcaagcacgccccccccacctacgaggacgtgatcgccggccacatcctggacatcagcgacagccccaaggaggtgagaaagaacttccagaagacctggcaggagagcggcagagtgttcaagggcctgggctacgccaccgccgacgccagcgccaccgagatgagaaccaccttccaggaggagagcgccttcatcagcgaggccgccgcccccagacagggcaacatgtacaccctgagcaaggacagcctgagcaacggcgtgcccagcggcagacaggccgagttcagctag

SEQ ID NO: 105420 - DNA, 2916 bp, synthetic construct
  misc_feature 1..2916: note = Description of Artificial Sequence: Synthetic coding sequence
  source 1..2916: mol_type = other DNA
atgttccccatgcagaagggcagcctgaacctgctgagacagaagtgggagagctgcgactaccagagaagcgagtgccaccccagagacagccactgcaccatcttccagccccaggagagcaagctgctggcccccgagggcgaggtggtgagcgccccccagagcctggaccccaccagcctgccctacagcaccggcgaggagatgtggagcagcaagcccgaggagaaggacagcgtggacaagagcaacaacaccagagagtacggcagacccgaggtgctgaaggaggacagcctgagcagcagaagaagaatcgagagattcagcatcgccctggacgagctgagaagcgtgttcgaggcccccaagagcggcaacaagcccgccgagtacggcggcaaggaggtggagatcgagagaagcctgtgcagccccgccttcaagagccaccccggcagccagctggaggacagcgtgaaggacagcgacaagaagggcaaggagaccagcttcgacaagatgagccccgagagcggccacagcagaatcttcgaggccgtgttcagcaccgaccaggcccagatcctgagactgcacctgcaccccaagctgaccaagacccccaagaacagcctgaagagcagcacctacatcagcaccgccggccccaacaagcccgagagcggcttcgccgaggacagcgccgccagaggcgagggcgtgagcgacctgcacgaggtggtgagcctgaaggagagaatggccagataccaggccgccgtgagcagaggcgactgcagaagcttcagcgccaacatgatggaggagagcgagatgtgcgccgtgcccggcggcctggccaaggtgaagaagcagttcgaggacgagatcaccagcagcagaaacaccttcgcccagtaccagtaccagcaccagaacagaagcgagcaggaggccatccacagcagccaggtgggcaccagcagaagcagccaggagatggccagaaacgagcaggagggcagcaaggtgcagaagatcgacgtgcacggcaccgagatggtgagccacctggagaagcacaccgaggaggtgaaccaggccagccagttccaccagtacgtgcaggagaccgtgatcgacacccccgaggacgaggagatccccaaggtgagcaccaagctgctgaaggagcagttcgagaagagcgcccaggagaagatcctgtacagcgacaaggagatgaccacccccgccaagcagatcaagaagctgctgctgcaggacaaggagatctgcatcctgtgccagaagaccgtgtaccccatggagtgcctggtggccgacaagcagaacttccacaagagctgcttcagatgccaccactgcaacagcaagctgagcctgggcaactacgccagcctgcacggccagatctactgcaagccccacttcaagcagctgttcaagagcaagggcaactacgacgagggcttcggccacaagcagcacaaggacagatggaactgcaagaaccagagcagaagcgtggacttcatccccaacgaggagcccaacatgtgcaagaacatcgccgagaacaccctggtgcccggcgacagaaacgagcacctggacgccggcaacagcgagggccagagaaacgacctgagaaagctgggcgagagaggcaagctgaaggtgatctggccccccagcaaggagatccccaagaagaccctgcccttcgaggaggagctgaagatgagcaagcccaagtggccccccgagatgaccaccctgctgagccccgagttcaagagcgagagcctgctggaggacgtgagaacccccgagaacaagggccagagacaggaccacttccccttcctgcagccctacctgcagagcacccacgtgtgccagaaggaggacgtgatcggcatcaaggagatgaagatgcccgagggcagaaaggacgagaagaaggagggcagaaagaacgtgcaggacagacccagcgaggccgaggacaccaagagcaacagaaagagcgccatggacctgaacgacaacaacaacgtgatcgtgcagagcgccgagaaggagaagaacgagaagaccaaccagaccaacggcgccgaggtgctgcaggtgaccaacaccgacgacgagatgatgcccgagaaccacaaggagaacctgaacaagaacaacaacaacaactacgtggccgtgagctacctgaacaactgcagacagaagaccagcatcctggagttcctggacctgctgcccctgagcagcgaggccaacgacaccgccaacgagtacgagatcgagaagctggagaacaccagcagaatcagcgagctgctgggcatcttcgagagcgagaagacctacagcagaaacgtgctggccatggccctgaagaagcagaccgacagagccgccgccggcagccccgtgcagcccgcccccaagcccagcctgagcagaggcctgatggtgaagggcggcagcagcatcatcagccccgacaccaacctgctgaacatcaagggcagccacagcaagagcaagaacctgcacttcttcttcagcaacaccgtgaagatcaccgccttcagcaagaagaacgagaacatcttcaactgcgacctgatcgacagcgtggaccagatcaagaacatgccctgcctggacctgagagagttcggcaaggacgtgaagccctggcacgtggagaccaccgaggccgccagaaacaacgagaacaccggcttcgacgccctgagccacgagtgcaccgccaagcccctgttccccagagtggaggtgcagagcgagcagctgaccgtggaggagcagatcaagagaaacagatgctacagcgacaccgagtag

SEQ ID NO: 105421 - DNA, 2916 bp, synthetic construct; identical to SEQ ID NO: 105420
  misc_feature 1..2916: note = Description of Artificial Sequence: Synthetic coding sequence
  source 1..2916: mol_type = other DNA

SEQ ID NO: 105422 - DNA, 1380 bp, synthetic construct
  misc_feature 1..1380: note = Description of Artificial Sequence: Synthetic coding sequence
  source 1..1380: mol_type = other DNA
atggagaccgtgttcgaggagatggacgaggagagcaccggcggcgtgagcagcagcaaggaggagatcgtgctgggccagagactgcacctgagcttccccttcagcatcatcttcagcaccgtgctgtactgcggcgaggtggccttcggcctgtacatgttcgagatctacagaaaggccaacgacaccttctggatgagcttcaccatcagcttcatcatcgtgggcgccatcctggaccagatcatcctgatgttcttcaacaaggacctgagaagaaacaaggccgccctgctgttctggcacatcctgctgctgggccccatcgtgagatgcctgcacaccatcagaaactaccacaagtggctgaagaacctgaagcaggagaaggaggagacccaggtgagcatcaccaagagaaacaccatgctggagagagagatcgccttcagcatcagagacaacttcatgcagcagaaggccttcaagtacatgagcgtgatccaggccttcctgggcagcgtgccccagctgatcctgcagatgtacatcagcctgaccatcagagagtggcccctgaacagagccctgctgatgaccttcagcctgctgagcgtgacctacggcgccatcagatgcaacatcctggccatccagatcagcaacgacgacaccaccatcaagctgccccccatcgagttcttctgcgtggtgatgtggagattcctggaggtgatcagcagagtggtgaccctggccttcttcatcgccagcctgaagctgaagagcctgcccgtgctgctgatcatctacttcgtgagcctgctggccccctggctggagttctggaagagcggcgcccacctgcccggcaacaaggagaacaacagcaacatggtgggcaccgtgctgatgctgttcctgatcaccctgctgtacgccgccatcaacttcagctgctggagcgccgtgaagctgcagctgagcgacgacaagatcatcgacggcagacagagatggggccacagaatcctgcactacagcttccagttcctggagaacgtgatcatgatcctggtgttcagattcttcggcggcaagaccctgctgaactgctgcgacagcctgatcgccgtgcagctgatcatcagctacctgctggccaccggcttcatgctgctgttctaccagtacctgtacccctggcagagcggcaaggtgctgcccggcagaaccgagaaccagcccgaggccccctactactacgtgaacatcgagaagaccgagaagaacaagaacaagcagctgagaaactactgccacagctgcaacagagtgggctacttcagcatcagaaagagcatgacctgcagctag

SEQ ID NO: 105423 - DNA, 1389 bp, synthetic construct
  misc_feature 1..1389: note = Description of Artificial Sequence: Synthetic coding sequence
  source 1..1389: mol_type = other DNA
atgaacaccagaccccagcacagcgagagaaccagcaccatggacagagtgtacgagatccccgaggagcccaacgtggaccccgtgagcagcctggaggaggacgtgatcagaggcgccaaccccagattcaccttccccttcagcatcctgttcagcaccttcctgtactgcggcgaggccgccagcgccctgtacatggtgagaatctacagaaagaacagcgagacctactggatgacctacaccttcagcttcttcatgttcagcagcatcatggtgcagctgaccctgatcttcgtgcacagagacctggccaaggacaagcccctgagcctgttcatgcacctgatcctgctgggccccgtgatcagatgcctggaggccatgatcaagtacctgaccctgtggaagaaggaggagcaggaggagccctacgtgagcctgaccagaaagaagatgctgatcgacggcgaggaggtgctgatcgagtgggaggtgggccacagcatcagaaccctggccatgcacagaaacgcctacaagagaatgagccagatccaggccttcctgggcagcgtgccccagctgacctaccagctgtacgtgagcctgatcagcgccgaggtgcccctgggcagagtggtgctgatggtgttcagcctggtgagcgtgacctacggcgccaccctgtgcaacatgctggccatccagatcaagtacgacgactacaagatcagactgggccccctggaggtgctgtgcatcaccatctggagaaccctggagatcaccagcagactgctgatcctggtgctgttcagcgccaccctgaagctgaaggccgtgcccttcctggtgctgaacttcctgatcatcctgttcgagccctggatcaagttctggagaagcggcgcccagatgcccaacaacatcgagaagaacttcagcagagtgggcaccctggtggtgctgatcagcgtgaccatcctgtacgccggcatcaacttcagctgctggagcgccctgcagctgagactggccgacagagacctggtggacaagggccagaactggggccacatgggcctgcactacagcgtgagactggtggagaacgtgatcatggtgctggtgttcaagttcttcggcgtgaaggtgctgctgaactactgccacagcctgatcgccctgcagctgatcatcgcctacctgatcagcatcggcttcatgctgctgttcttccagtacctgcaccccctgagaagcctgttcacccacaacgtggtggactacctgcactgcgtgtgctgccaccagcaccccagaaccagagtggagaacagcgagccccccttcgagaccgaggccagacagagcgtggtgtag

SEQ ID NO: 105424 - DNA, 1350 bp, synthetic construct
  misc_feature 1..1350: note = Description of Artificial Sequence: Synthetic coding sequence
  source 1..1350: mol_type = other DNA
atggacagagtgtacgagatccccgaggagcccaacgtggaccccgtgagcagcctggaggaggacgtgatcagaggcgccaaccccagattcaccttccccttcagcatcctgttcagcaccttcctgtactgcggcgaggccgccagcgccctgtacatggtgagaatctacagaaagaacagcgagacctactggatgacctacaccttcagcttcttcatgttcagcagcatcatggtgcagctgaccctgatcttcgtgcacagagacctggccaaggacaagcccctgagcctgttcatgcacctgatcctgctgggccccgtgatcagatgcctggaggccatgatcaagtacctgaccctgtggaagaaggaggagcaggaggagccctacgtgagcctgaccagaaagaagatgctgatcgacggcgaggaggtgctgatcgagtgggaggtgggccacagcatcagaaccctggccatgcacagaaacgcctacaagagaatgagccagatccaggccttcctgggcagcgtgccccagctgacctaccagctgtacgtgagcctgatcagcgccgaggtgcccctgggcagagtggtgctgatggtgttcagcctggtgagcgtgacctacggcgccaccctgtgcaacatgctggccatccagatcaagtacgacgactacaagatcagactgggccccctggaggtgctgtgcatcaccatctggagaaccctggagatcaccagcagactgctgatcctggtgctgttcagcgccaccctgaagctgaaggccgtgcccttcctggtgctgaacttcctgatcatcctgttcgagccctggatcaagttctggagaagcggcgcccagatgcccaacaacatcgagaagaacttcagcagagtgggcaccctggtggtgctgatcagcgtgaccatcctgtacgccggcatcaacttcagctgctggagcgccctgcagctgagactggccgacagagacctggtggacaagggccagaactggggccacatgggcctgcactacagcgtgagactggtggagaacgtgatcatggtgctggtgttcaagttcttcggcgtgaaggtgctgctgaactactgccacagcctgatcgccctgcagctgatcatcgcctacctgatcagcatcggcttcatgctgctgttcttccagtacctgcaccccctgagaagcctgttcacccacaacgtggtggactacctgcactgcgtgtgctgccaccagcaccccagaaccagagtggagaacagcgagccccccttcgagaccgaggccagacagagcgtggtgtag

SEQ ID NO: 105425 - DNA, 1335 bp, synthetic construct
  misc_feature 1..1335: note = Description of Artificial Sequence: Synthetic coding sequence
  source 1..1335: mol_type = other DNA
atgaagttccccgccagcgtgctggccagcgtgttcctgttcgtggccgagaccaccgccgccctgagcctgagcagcacctacagaagcggcggcgacagaatgtggcaggccctgaccctgctgttcagcctgctgccctgcgccctggtgcagctgaccctgctgttcgtgcacagagacctgagcagagacagacccctggtgctgctgctgcacctgctgcagctgggccccctgttcagatgcttcgaggtgttctgcatctacttccagagcggcaacaacgaggagccctacgtgagcatcaccaagaagagacagatgcccaagaacggcctgagcgaggagatcgagaaggaggtgggccaggccgagggcaagctgatcacccacagaagcgccttcagcagagccagcgtgatccaggccttcctgggcagcgccccccagctgaccctgcagctgtacatcagcgtgatgcagcaggacgtgaccgtgggcagaagcctgctgatgaccatcagcctgctgagcatcgtgtacggcgccctgagatgcaacatcctggccatcaagatcaagtacgacgagtacgaggtgaaggtgaagcccctggcctacgtgtgcatcttcctgtggagaagcttcgagatcgccaccagagtggtggtgctggtgctgttcaccagcgtgctgaagacctgggtggtggtgatcatcctgatcaacttcttcagcttcttcctgtacccctggatcctgttctggtgcagcggcagccccttccccgagaacatcgagaaggccctgagcagagtgggcaccaccatcgtgctgtgcttcctgaccctgctgtacaccggcatcaacatgttctgctggagcgccgtgcagctgaagatcgacagccccgacctgatcagcaagagccacaactggtaccagctgctggtgtactacatgatcagattcatcgagaacgccatcctgctgctgctgtggtacctgttcaagaccgacatctacatgtacgtgtgcgcccccctgctggtgctgcagctgctgatcggctactgcaccgccatcctgttcatgctggtgttctaccagttcttccacccctgcaagaagctgttcagcagcagcgtgagcgagggcttccagagatggctgagatgcttctgctgggcctgcagacagcagaagccctgcgagcccatcggcaaggaggacctgcagagcagcagagacagagacgagacccccagcagcagcaagaccagccccgagcccggccagttcctgaacgccgaggacctgtgcagcgcctag

SEQ ID NO: 105426 - DNA, 1929 bp, synthetic construct
  misc_feature 1..1929: note = Description of Artificial Sequence: Synthetic coding sequence
  source 1..1929: mol_type = other DNA
atggccgccagcagaaagccccccagagtgagagtgaaccaccaggacttccagctgagaaacctgagaatcatcgagcccaacgaggtgacccacagcggcgacaccggcgtggagaccgacggcagaatgccccccaaggtgaccagcgagctgctgagacagctgagacaggccatgagaaacagcgagtacgtgaccgagcccatccaggcctacatcatccccagcggcgacgcccaccagagcgagtacatcgccccctgcgactgcagaagagccttcgtgagcggcttcgacggcagcgccggcaccgccatcatcaccgaggagcacgccgccatgtggaccgacggcagatacttcctgcaggccgccaagcagatggacagcaactggaccctgatgaagatgggcctgaaggacacccccacccaggaggactggctggtgagcgtgctgcccgagggcagcagagtgggcgtggaccccctgatcatccccaccgactactggaagaagatggccaaggtgctgagaagcgccggccaccacctgatccccgtgaaggagaacctggtggacaagatctggaccgacagacccgagagaccctgcaagcccctgctgaccctgggcctggactacaccggcatcagctggaaggacaaggtggccgacctgagactgaagatggccgagagaaacgtgatgtggttcgtggtgaccgccctggacgagatcgcctggctgttcaacctgagaggcagcgacgtggagcacaaccccgtgttcttcagctacgccatcatcggcctggagaccatcatgctgttcatcgacggcgacagaatcgacgcccccagcgtgaaggagcacctgctgctggacctgggcctggaggccgagtacagaatccaggtgcacccctacaagagcatcctgagcgagctgaaggccctgtgcgccgacctgagccccagagagaaggtgtgggtgagcgacaaggccagctacgccgtgagcgagaccatccccaaggaccacagatgctgcatgccctacacccccatctgcatcgccaaggccgtgaagaacagcgccgagagcgagggcatgagaagagcccacatcaaggacgccgtggccctgtgcgagctgttcaactggctggagaaggaggtgcccaagggcggcgtgaccgagatcagcgccgccgacaaggccgaggagttcagaagacagcaggccgacttcgtggacctgagcttccccaccatcagcagcaccggccccaacggcgccatcatccactacgccgacggcaccaccgacgtgaccagaaccatgcacttcggcacccccaccgcctacgagaaggagtgcttcacctacgtgctgaagggccacatcgccgtgagcgccgccgtgttccccaccggcaccaagggccacctgctggacagcttcgccagaagcgccctgtgggacagcggcctggactacctgcacggcaccggccacggcgtgggcagcttcctgaacgtgcacgagggcccctgcggcatcagctacaagaccttcagcgacgagcccctggaggccggcatgatcgtgaccgacgagcccggctactacgaggacggcgccttcggcatcagaatcgagaacgtggtgctggtggtgcccgtgaagaccaagtacaacttcaacaacagaggcagcctgaccttcgagcccctgaccctggtgcccatccagaccaagatgatcgacgtggacagcctgaccgacaaggagtgcgactggctgaacaactaccacctgacctgcagagacgtgatcggcaaggagctgcagaagcagggcagacaggaggccctggagtggctgatcagagagacccagcccatcagcaagcagcactag

SEQ ID NO: 105427 - DNA, 1872 bp, synthetic construct
  misc_feature 1..1872: note = Description of Artificial Sequence: Synthetic coding sequence
  source 1..1872: mol_type = other DNA
atgccccccaaggtgaccagcgagctgctgagacagctgagacaggccatgagaaacagcgagtacgtgaccgagcccatccaggcctacatcatccccagcggcgacgcccaccagagcgagtacatcgccccctgcgactgcagaagagccttcgtgagcggcttcgacggcagcgccggcaccgccatcatcaccgaggagcacgccgccatgtggaccgacggcagatacttcctgcaggccgccaagcagatggacagcaactggaccctgatgaagatgggcctgaaggacacccccacccaggaggactggctggtgagcgtgctgcccgagggcagcagagtgggcgtggaccccctgatcatccccaccgactactggaagaagatggccaaggtgctgagaagcgccggccaccacctgatccccgtgaaggagaacctggtggacaagatctggaccgacagacccgagagaccctgcaagcccctgctgaccctgggcctggactacaccggcatcagctggaaggacaaggtggccgacctgagactgaagatggccgagagaaacgtgatgtggttcgtggtgaccgccctggacgagatcgcctggctgttcaacctgagaggcagcgacgtggagcacaaccccgtgttcttcagctacgccatcatcggcctggagaccatcatgctgttcatcgacggcgacagaatcgacgcccccagcgtgaaggagcacctgctgctggacctgggcctggaggccgagtacagaatccaggtgcacccctacaagagcatcctgagcgagctgaaggccctgtgcgccgacctgagccccagagagaaggtgtgggtgagcgacaaggccagctacgccgtgagcgagaccatccccaaggaccacagatgctgcatgccctacacccccatctgcatcgccaaggccgtgaagaacagcgccgagagcgagggcatgagaagagcccacatcaaggacgccgtggccctgtgcgagctgttcaactggctggagaaggaggtgcccaagggcggcgtgaccgagatcagcgccgccgacaaggccgaggagttcagaagacagcaggccgacttcgtggacctgagcttccccaccatcagcagcaccggccccaacggcgccatcatccactacgcccccgtgcccgagaccaacagaaccctgagcctggacgaggtgtacctgatcgacagcggcgcccagtacaaggacggcaccaccgacgtgaccagaaccatgcacttcggcacccccaccgcctacgagaaggagtgcttcacctacgtgctgaagggccacatcgccgtgagcgccgccgtgttccccaccggcaccaagggccacctgctggacagcttcgccagaagcgccctgtgggacagcggcctggactacctgcacggcaccggccacggcgtgggcagcttcctgaacgtgcacgagggcccctgcggcatcagctacaagaccttcagcgacgagcccctggaggccggcatgatcgtgaccgacgagcccggctactacgaggacggcgccttcggcatcagaatcgagaacgtggtgctggtggtgcccgtgaagaccaagtacaacttcaacaacagaggcagcctgaccttcgagcccctgaccctggtgcccatccagaccaagatgatcgacgtggacagcctgaccgacaaggagtgcgactggctgaacaactaccacctgacctgcagagacgtgatcggcaaggagctgcagaagcagggcagacaggaggccctggagtggctgatcagagagacccagcccatcagcaagcagcactag

SEQ ID NO: 105428 - DNA, 1659 bp, synthetic construct
  misc_feature 1..1659: note = Description of Artificial Sequence: Synthetic coding sequence
  source 1..1659: mol_type = other DNA
atgtggaccgacggcagatacttcctgcaggccgccaagcagatggacagcaactggaccctgatgaagatgggcctgaaggacacccccacccaggaggactggctggtgagcgtgctgcccgagggcagcagagtgggcgtggaccccctgatcatccccaccgactactggaagaagatggccaaggtgctgagaagcgccggccaccacctgatccccgtgaaggagaacctggtggacaagatctggaccgacagacccgagagaccctgcaagcccctgctgaccctgggcctggactacaccggcatcagctggaaggacaaggtggccgacctgagactgaagatggccgagagaaacgtgatgtggttcgtggtgaccgccctggacgagatcgcctggctgttcaacctgagaggcagcgacgtggagcacaaccccgtgttcttcagctacgccatcatcggcctggagaccatcatgctgttcatcgacggcgacagaatcgacgcccccagcgtgaaggagcacctgctgctggacctgggcctggaggccgagtacagaatccaggtgcacccctacaagagcatcctgagcgagctgaaggccctgtgcgccgacctgagccccagagagaaggtgtgggtgagcgacaaggccagctacgccgtgagcgagaccatccccaaggaccacagatgctgcatgccctacacccccatctgcatcgccaaggccgtgaagaacagcgccgagagcgagggcatgagaagagcccacatcaaggacgccgtggccctgtgcgagctgttcaactggctggagaaggaggtgcccaagggcggcgtgaccgagatcagcgccgccgacaaggccgaggagttcagaagacagcaggccgacttcgtggacctgagcttccccaccatcagcagcaccggccccaacggcgccatcatccactacgcccccgtgcccgagaccaacagaaccctgagcctggacgaggtgtacctgatcgacagcggcgcccagtacaaggacggcaccaccgacgtgaccagaaccatgcacttcggcacccccaccgcctacgagaaggagtgcttcacctacgtgctgaagggccacatcgccgtgagcgccgccgtgttccccaccggcaccaagggccacctgctggacagcttcgccagaagcgccctgtgggacagcggcctggactacctgcacggcaccggccacggcgtgggcagcttcctgaacgtgcacgagggcccctgcggcatcagctacaagaccttcagcgacgagcccctggaggccggcatgatcgtgaccgacgagcccggctactacgaggacggcgccttcggcatcagaatcgagaacgtggtgctggtggtgcccgtgaagaccaagtacaacttcaacaacagaggcagcctgaccttcgagcccctgaccctggtgcccatccagaccaagatgatcgacgtggacagcctgaccgacaaggagtgcgactggctgaacaactaccacctgacctgcagagacgtgatcggcaaggagctgcagaagcagggcagacaggaggccctggagtggctgatcagagagacccagcccatcagcaagcagcactag

SEQ ID NO: 105429 - DNA, 912 bp, synthetic construct
  misc_feature 1..912: note = Description of Artificial Sequence: Synthetic coding sequence
  source 1..912: mol_type = other DNA
atgccccccaaggtgaccagcgagctgctgagacagctgagacaggccatgagaaacagcgagtacgtgaccgagcccatccaggcctacatcatccccagcggcgacgcccaccagagcgagtacatcgccccctgcgactgcagaagagccttcgtgagcggcttcgacggcagcgccggcaccgccatcatcaccgaggagcacgccgccatgtggaccgacggcagatacttcctgcaggccgccaagcagatggacagcaactggaccctgatgaagatgggcctgaaggacacccccacccaggaggactggctggtgagcgtgctgcccgagggcagcagagtgggcgtggaccccctgatcatccccaccgactactggaagaagatggccaaggtgctgagaagcgccggccaccacctgatccccgtgaaggagaacctggtggacaagatctggaccgacagacccgagagaccctgcaagcccctgctgaccctgggcctggactacaccggcatcagctggaaggacaaggtggccgacctgagactgaagatggccgagagaaacgtgatgtggttcgtggtgaccgccctggacgagatcgcctggctgttcaacctgagaggcagcgacgtggagcacaaccccgtgttcttcagctacgccatcatcggcctggagaccatcatgctgttcatcgacggcgacagaatcgacgcccccagcgtgaaggagcacctgctgctggacctgggcctggaggccgagtacagaatccaggtgcacccctacaagagcatcctgagcgagctgaaggccctgtgcgccgacctgagccccagagagaaggtgtgggtgagcgacaaggccagctacgccgtgagcgagaccatcccctag

SEQ ID NO: 105430 - DNA, 2001 bp, synthetic construct
  misc_feature 1..2001: note = Description of Artificial Sequence: Synthetic coding sequence
  source 1..2001: mol_type = other DNA
atggccgccagcagaaagccccccagagtgagagtgaaccaccaggacttccagctgagaaacctgagaatcatcgagcccaacgaggtgacccacagcggcgacaccggcgtggagaccgacggcagaatgccccccaaggtgaccagcgagctgctgagacagctgagacaggccatgagaaacagcgagtacgtgaccgagcccatccaggcctacatcatccccagcggcgacgcccaccagagcgagtacatcgccccctgcgactgcagaagagccttcgtgagcggcttcgacggcagcgccggcaccgccatcatcaccgaggagcacgccgccatgtggaccgacggcagatacttcctgcaggccgccaagcagatggacagcaactggaccctgatgaagatgggcctgaaggacacccccacccaggaggactggctggtgagcgtgctgcccgagggcagcagagtgggcgtggaccccctgatcatccccaccgactactggaagaagatggccaaggtgctgagaagcgccggccaccacctgatccccgtgaaggagaacctggtggacaagatctggaccgacagacccgagagaccctgcaagcccctgctgaccctgggcctggactacaccggcatcagctggaaggacaaggtggccgacctgagactgaagatggccgagagaaacgtgatgtggttcgtggtgaccgccctggacgagatcgcctggctgttcaacctgagaggcagcgacgtggagcacaaccccgtgttcttcagctacgccatcatcggcctggagaccatcatgctgttcatcgacggcgacagaatcgacgcccccagcgtgaaggagcacctgctgctggacctgggcctggaggccgagtacagaatccaggtgcacccctacaagagcatcctgagcgagctgaaggccctgtgcgccgacctgagccccagagagaaggtgtgggtgagcgacaaggccagctacgccgtgagcgagaccatccccaaggaccacagatgctgcatgccctacacccccatctgcatcgccaaggccgtgaagaacagcgccgagagcgagggcatgagaagagcccacatcaaggacgccgtggccctgtgcgagctgttcaactggctggagaaggaggtgcccaagggcggcgtgaccgagatcagcgccgccgacaaggccgaggagttcagaagacagcaggccgacttcgtggacctgagcttccccaccatcagcagcaccggccccaacggcgccatcatccactacgcccccgtgcccgagaccaacagaaccctgagcctggacgaggtgtacctgatcgacagcggcgcccagtacaaggacggcaccaccgacgtgaccagaaccatgcacttcggcacccccaccgcctacgagaaggagtgcttcacctacgtgctgaagggccacatcgccgtgagcgccgccgtgttccccaccggcaccaagggccacctgctggacagcttcgccagaagcgccctgtgggacagcggcctggactacctgcacggcaccggccacggcgtgggcagcttcctgaacgtgcacgagggcccctgcggcatcagctacaagaccttcagcgacgagcccctggaggccggcatgatcgtgaccgacgagcccggctactacgaggacggcgccttcggcatcagaatcgagaacgtggtgctggtggtgcccgtgaagaccaagtacaacttcaacaacagaggcagcctgaccttcgagcccctgaccctggtgcccatccagaccaagatgatcgacgtggacagcctgaccgacaaggagtgcgactggctgaacaactaccacctgacctgcagagacgtgatcggcaaggagctgcagaagcagggcagacaggaggccctggagtggctgatcagagagacccagcccatcagcaagcagcactag

SEQ ID NO: 105431 - DNA, 552 bp, synthetic construct
  misc_feature 1..552: note = Description of Artificial Sequence: Synthetic coding sequence
  source 1..552: mol_type = other DNA
atggccagagcccactggggctgctgcccctggctggtgctgctgtgcgcctgcgcctggggccacaccaagcccgtggacctgggcggccaggacgtgagaaactgcagcaccaaccccccctacctgcccgtgaccgtggtgaacaccaccatgagcctgaccgccctgagacagcagatgcagacccagaacctgagcgcctacatcatccccggcaccgacgcccacatgaacgagtacatcggccagcacgacgagagaagagcctggatcaccggcttcaccggcagcgccggcaccgccgtggtgaccatgaagaaggccgccgtgtggaccgacagcagatactggacccaggccgagagacagatggactgcaactgggagctgcacaaggaggtgggcaccacccccatcgtgacctggctgctgaccgagatccccgccggcggcagagtgggcttcgaccccttcctgctgagcatcggcatgctgttcctgcagagcctgaacctgagcatgctgaccagagtgacccagctgccctag

SEQ ID NO: 105432 - DNA, 2025 bp, synthetic construct
  misc_feature 1..2025: note = Description of Artificial Sequence: Synthetic coding sequence
  source 1..2025: mol_type = other DNA
atggccagagcccactggggctgctgcccctggctggtgctgctgtgcgcctgcgcctggggccacaccaagcccgtggacctgggcggccaggacgtgagaaactgcagcaccaaccccccctacctgcccgtgaccgtggtgaacaccaccatgagcctgaccgccctgagacagcagatgcagacccagaacctgagcgcctacatcatccccggcaccgacgcccacatgaacgagtacatcggccagcacgacgagagaagagcctggatcaccggcttcaccggcagcgccggcaccgccgtggtgaccatgaagaaggccgccgtgtggaccgacagcagatactggacccaggccgagagacagatggactgcaactgggagctgcacaaggaggtgggcaccacccccatcgtgacctggctgctgaccgagatccccgccggcggcagagtgggcttcgaccccttcctgctgagcatcgacacctgggagagctacgacctggccctgcagggcagcaacagacagctggtgagcatcaccaccaacctggtggacctggtgtggggcagcgagagaccccccgtgcccaaccagcccatctacgccctgcaggaggccttcaccggcagcacctggcaggagaaggtgagcggcgtgagaagccagatgcagaagcaccagaaggtgcccaccgccgtgctgctgagcgccctggaggagaccgcctggctgttcaacctgagagccagcgacatcccctacaaccccttcttctacagctacaccctgctgaccgacagcagcatcagactgttcgccaacaagagcagattcagcagcgagaccctgagctacctgaacagcagctgcaccggccccatgtgcgtgcagatcgaggactacagccaggtgagagacagcatccaggcctacagcctgggcgacgtgagaatctggatcggcaccagctacaccatgtacggcatctacgagatgatccccaaggagaagctggtgaccgacacctacagccccgtgatgatgaccaaggccgtgaagaacagcaaggagcaggccctgctgaaggccagccacgtgagagacgccgtggccgtgatcagatacctggtgtggctggagaagaacgtgcccaagggcaccgtggacgagttcagcggcgccgagatcgtggacaagttcagaggcgaggagcagttcagcagcggccccagcttcgagaccatcagcgccagcggcctgaacgccgccctggcccactacagccccaccaaggagctgaacagaaagctgagcagcgacgagatgtacctgctggacagcggcggccagtactgggacggcaccaccgacatcaccagaaccgtgcactggggcacccccagcgccttccagaaggaggcctacaccagagtgctgatcggcaacatcgacctgagcagactgatcttccccgccgccaccagcggcagaatggtggaggccttcgccagaagagccctgtgggacgccggcctgaactacggccacggcaccggccacggcatcggcaacttcctgtgcgtgcacgagtggcccgtgggcttccagagcaacaacatcgccatggccaagggcatgttcaccagcatcgagcccggctactacaaggacggcgagttcggcatcagactggaggacgtggccctggtggtggaggccaagaccaagtaccccggcagctacctgaccttcgaggtggtgagcttcgtgccctacgacagaaacctgatcgacgtgagcctgctgagccccgagcacctgcagtacctgaacagatactaccagaccatcagagagaaggtgggccccgagctgcagagaagacagctgctggaggagttcgagtggctgcagcagcacaccgagcccctggccgccagagcccccgacaccgccagctgggccagcgtgctggtggtgagcaccctggccatcctgggctggagcgtgtag

SEQ ID NO: 105433 - DNA, 1524 bp, synthetic construct
  misc_feature 1..1524: note = Description of Artificial Sequence: Synthetic coding sequence
  source 1..1524: mol_type = other DNA
atgccctggctgctgagcgcccccaagctggtgcccgccgtggccaacgtgagaggcctgagcggctgcatgctgtgcagccagagaagatacagcctgcagcccgtgcccgagagaagaatccccaacagatacctgggccagcccagccccttcacccacccccacctgctgagacccggcgaggtgacccccggcctgagccaggtggagtacgccctgagaagacacaagctgatgagcctgatccagaaggaggcccagggccagagcggcaccgaccagaccgtggtggtgctgagcaaccccacctactacatgagcaacgacatcccctacaccttccaccaggacaacaacttcctgtacctgtgcggcttccaggagcccgacagcatcctggtgctgcagagcctgcccggcaagcagctgcccagccacaaggccatcctgttcgtgcccagaagagaccccagcagagagctgtgggacggccccagaagcggcaccgacggcgccatcgccctgaccggcgtggacgaggcctacaccctggaggagttccagcacctgctgcccaagatgaaggccgagaccaacatggtgtggtacgactggatgagacccagccacgcccagctgcacagcgactacatgcagcccctgaccgaggccaaggccaagagcaagaacaaggtgagaggcgtgcagcagctgatccagagactgagactgatcaagagccccgccgagatcgagagaatgcagatcgccggcaagctgaccagccaggccttcatcgagaccatgttcaccagcaaggcccccgtggaggaggccttcctgtacgccaagttcgagttcgagtgcagagccagaggcgccgacatcctggcctacccccccgtggtggccggcggcaacagaagcaacaccctgcactacgtgaagaacaaccagctgatcaaggacggcgagatggtgctgctggacggcggctgcgagagcagctgctacgtgagcgacatcaccagaacctggcccgtgaacggcagattcaccgccccccaggccgagctgtacgaggccgtgctggagatccagagagactgcctggccctgtgcttccccggcaccagcctggagaacatctacagcatgatgctgaccctgatcggccagaagctgaaggacctgggcatcatgaagaacatcaaggagaacaacgccttcaaggccgccagaaagtactgcccccaccacgtgggccactacctgggcatggacgtgcacgacacccccgacatgcccagaagcctgcccctgcagcccggcatggtgatcaccatcgagcccggcatctacatccccgaggacgacaaggacgcccccgagaagttcagaggcctgggcgtgagaatcgaggacgacgtggtggtgacccaggacagccccctgatcctgagcgccgactgccccaaggagatgaacgacatcgagcagatctgcagccaggccagctag

SEQ ID NO: 105434 - DNA, 837 bp, synthetic construct
  misc_feature 1..837: note = Description of Artificial Sequence: Synthetic coding sequence
  source 1..837: mol_type = other DNA
atgccctggctgctgagcgcccccaagctggtgcccgccgtggccaacgtgagaggcctgagcggctgcatgctgtgcagccagagaagatacagcctgcagcccgtgcccgagagaagaatccccaacagatacctgggccagcccagccccttcacccacccccacctgctgagacccggcgaggtgacccccggcctgagccaggtggagtacgccctgagaagacacaagctgatgagcctgatccagaaggaggcccagggccagagcggcaccgaccagaccgtggtggtgctgagcaaccccacctactacatgagcaacgacatcccctacaccttccaccaggacaacaacttcctgtacctgtgcggcttccaggagcccgacagcatcctggtgctgcagagcctgcccggcaagcagctgcccagccacaaggccatcctgttcgtgcccagaagagaccccagcagagagctgtgggacggccccagaagcggcaccgacggcgccatcgccctgaccggcgtggacgaggcctacaccctggaggagttccagcacctgctgcccaagatgaaggccgagaccaacatggtgtggtacgactggatgagacccagccacgcccagctgcacagcgactacatgcagcccctgaccgaggccaaggccaagagcaagaacaaggtgagaggcgtgcagcagctgatccagagactgagactgatcaagagccccgccgagatcgagagaatgcagatcgccggcaagctgaccagccagagacagggcttcagcgtgctgagcagactggtgagcaacagctag

SEQ ID NO: 105435 - DNA, 867 bp, synthetic construct
  misc_feature 1..867: note = Description of Artificial Sequence: Synthetic coding sequence
  source 1..867: mol_type = other DNA
atgccctggctgctgagcgcccccaagctggtgcccgccgtggccaacgtgagaggcctgagcggctgcatgctgtgcagccagagaagatacagcctgcagcccgtgcccgagagaagaatccccaacagatacctgggccagcccagccccttcacccacccccacctgctgagacccggcgaggtgacccccggcctgagccaggtggagtacgccctgagaagacacaagctgatgagcctgatccagaaggaggcccagggccagagcggcaccgaccagaccgtggtggtgctgagcaaccccacctactacatgagcaacgacatcccctacaccttccaccaggacaacaacttcctgtacctgtgcggcttccaggagcccgacagcatcctggtgctgcagagcctgcccggcaagcagctgcccagccacaaggccatcctgttcgtgcccagaagagaccccagcagagagctgtgggacggccccagaagcggcaccgacggcgccatcgccctgaccggcgtggacgaggcctacaccctggaggagttccagcacctgctgcccaagatgaaggccgagaccaacatggtgtggtacgactggatgagacccagccacgcccagctgcacagcgactacatgcagcccctgaccgaggccaaggccaagagcaagaacaaggtgagaggcgtgcagcagctgatccagagactgagactgatcaagagccccgccgagatcgagagaatgcagatcgccggcaagctgaccagccagaagagcgtgctgctggccagacacggcggcagcagactgtacagccaccacttcggcagacccagactgagctag

SEQ ID NO: 105436 - DNA, 1455 bp, synthetic construct
  misc_feature 1..1455: note = Description of Artificial Sequence: Synthetic coding sequence
  source 1..1455: mol_type = other DNA
atgctgtgcagccagagaagatacagcctgcagcccgtgcccgagagaagaatccccaacagatacctgggccagcccagccccttcacccacccccacctgctgagacccggcgaggtgacccccggcctgagccaggtggagtacgccctgagaagacacaagctgatgagcctgatccagaaggaggcccagggccagagcggcaccgaccagaccgtggtggtgctgagcaaccccacctactacatgagcaacgacatcccctacaccttccaccaggacaacaacttcctgtacctgtgcggcttccaggagcccgacagcatcctggtgctgcagagcctgcccggcaagcagctgcccagccacaaggccatcctgttcgtgcccagaagagaccccagcagagagctgtgggacggccccagaagcggcaccgacggcgccatcgccctgaccggcgtggacgaggcctacaccctggaggagttccagcacctgctgcccaagatgaaggccgagaccaacatggtgtggtacgactggatgagacccagccacgcccagctgcacagcgactacatgcagcccctgaccgaggccaaggccaagagcaagaacaaggtgagaggcgtgcagcagctgatccagagactgagactgatcaagagccccgccgagatcgagagaatgcagatcgccggcaagctgaccagccaggccttcatcgagaccatgttcaccagcaaggcccccgtggaggaggccttcctgtacgccaagttcgagttcgagtgcagagccagaggcgccgacatcctggcctacccccccgtggtggccggcggcaacagaagcaacaccctgcactacgtgaagaacaaccagctgatcaaggacggcgagatggtgctgctggacggcggctgcgagagcagctgctacgtgagcgacatcaccagaacctggcccgtgaacggcagattcaccgccccccaggccgagctgtacgaggccgtgctggagatccagagagactgcctggccctgtgcttccccggcaccagcctggagaacatctacagcatgatgctgaccctgatcggccagaagctgaaggacctgggcatcatgaagaacatcaaggagaacaacgccttcaaggccgccagaaagtactgcccccaccacgtgggccactacctgggcatggacgtgcacgacacccccgacatgcccagaagcctgcccctgcagcccggcatggtgatcaccatcgagcccggcatctacatccccgaggacgacaaggacgcccccgagaagttcagaggcctgggcgtgagaatcgaggacgacgtggtggtgacccaggacagccccctgatcctgagcgccgactgccccaaggagatgaacgacatcgagcagatctgcagccaggccagctag

SEQ ID NO: 105437 - DNA, 2379 bp, synthetic construct
  misc_feature 1..2379: note = Description of Artificial Sequence: Synthetic coding sequence
  source 1..2379: mol_type = other DNA
atggccttcagcggcatctacaagctggacgacggcaagccctacctgaacaactgcttccccgccagaaacctgctgagagtgcccgaggagggccagggccactggctggtggtgcagaagggcaacctgaagaagaagcccaagggcctggtgggcgcccaggccgagagaagagagagcctgaaggccaccagcttcgagttcaagggcaagaaggagagcagaagagagaaccaggtggacctgcccggccacatcctggaccaggccttcctgctgaagcaccactgcgtgagaaagcccagcgacctgtgcaccatcaacgccaaggagaacgacttcaagcacttccacagcgtgatctacatcaacgccagcgagaacctgctgcccctggaggccttccacaccttccccgccctgaaggagctggacctggccttcaacggcatcaagaccatctacgtgaagtacggcgacttcaagctgctggagttcctggacctgagcttcaacagcctgaccgtggaggccatctgcgacctgggcatcctgccccacctgagagtgctgctgctgaccggcaacggcctgaccagcctgccccccaacctggccgtggccgagcaggaggccagcgtgaccagcctgaccagcaagagatacatcctgagattccccgccctggagaccctgatgctggacgacaacagactgagcaaccccagctgcttcgccagcctggccggcctgagaagactgaagaagctgagcctggacgagaacagaatcatcagaatcccctacctgcagcaggtgcagctgtacgacgagagcgtggactggaacggcggcagaggcagcccccacaaggagccccagttcatgctgcagagcaagcccagaatgctggaggacagcgacgagcagctggactacaccgtgctgcccatgaagaaggacgtggacagaaccgaggtggtgttcagcagctaccccggcttcagcaccagcgagaccaccaagatctgcagcctgccccccatcttcgagatcctgcccgtgaagagcctgaaggccagaaaccagaccctggccccccccttccccgagctgagatacctgagcctggcctacaacaagatcgccaaggaggacgccgtgctgcccgtggccctgttccccagcctgtgcgagttcgtgttccacaacaaccccctggtggcccacaccagaggcgtgccccccctgctgaagagcttcctgcaggagagactgggcatccacctgatcagaagaaagatcgtgaagcccaagcaccacgtgctgatgagcagaaaggagagctggaaggtgaagagcgagatccccaaggtgcccaagcagcccctggtgctgcaccaccccagaatgaccaccaccaagagccccagcaaggacatgctggagcccgaggccgagctggccgaggacctgcccaccaccaagagcaccagcgtggagagcgagatgcccaccgagaacctggagggccacagccccagctgcagaaccttcgtgcccctgccccccatctgcagcaacagcaccgtgcacagcgaggagaccctgagccacctgagcgacaccaccgtgagactgagccccgagagacccagcgacgaggacagcaagagcaccgagagcatcttcctgacccaggtgagcgagctgcccagcagcgtgatccacaaggacgacctggagctgaaggagaaggaccagaagaagccccccaccgcccccagagaggtgaagggcaccagaagaaagctgcccaccgccttcctgcccagcaagtaccacggctacgaggagctgctgaccgccaagcccgaccccgccttcatcgagcccaagggcatccagaagaacgcccaggccctgcagcagatgctgaagcaccccctgctgtgccacagcagcaagcccaagctggacaccctgcagaagccctacgtgcacaaggagaagagagcccagagaatccccatccccccccccaagaagaccagagcccagctgctggacgacatcttcatcagactgagagaccccagaaacatcaccgaggcccccctgggcgccgtgctgcaccagtggaccgagagaagactggtgaaccacaagcagtacctggaggccaagagactgctgaaggagttccaggccagatacagacagctggtgagcggcagcctgagaaccgtgttcggcaccacccccctgcccatggcctgccccgccctgagcgagagccagcccaagttcggccacttcctggagttcatggacgagttctgccaggagcccaccgccagcgacagccagggctag

SEQ ID NO: 105438 - DNA, 2337 bp, synthetic construct
  misc_feature 1..2337: note = Description of Artificial Sequence: Synthetic coding sequence
  source 1..2337: mol_type = other DNA
atggccttcagcggcatctacaagctggacgacggcaagccctacctgaacaactgcttccccgccagaaacctgctgagagtgcccgaggagggccagggccactggctggtggtgcagaagggcaacctgaagaagaagcccaagggcctggtgggcgcccaggccgagagaagagagagcctgaaggccaccagcttcgagttcaagggcaagaaggagagcagaagagagaaccaggtggacctgcccggccacatcctggaccaggccttcctgctgaagcaccactgcgtgagaaagcccagcgacctgtgcaccatcaacgccaaggagaacgacttcaagcacttccacagcgtgatctacatcaacgccagcgagaacctgctgcccctggaggccttccacaccttccccgccctgaaggagctggacctggccttcaacggcatcaagaccatctacgtgaagtacggcgacttcaagctgctggagttcctggacctgagcttcaacagcctgaccgtggaggccatctgcgacctgggcatcctgccccacctgagagtgctgctgctgaccggcaacggcctgaccagcctgccccccaacctggccgtggccgagcaggaggccagcgtgaccagcctgaccagcaagagatacatcctgagattccccgccctggagaccctgatgctggacgacaacagactgagcaaccccagctgcttcgccagcctggccggcctgagaagactgaagaagctgagcctggacgagaacagaatcatcagaatcccctacctgcagcaggtgcagctgtacgacgagagcgtggactggaacggcggcagaggcagcccccacaaggagccccagttcatgctgcagagcaagcccagaatgctggaggacagcgacgagcagctggactacaccgtgctgcccatgaagaaggacgtggacagaaccaccaccaagatctgcagcctgccccccatcttcgagatcctgcccgtgaagagcctgaaggccagaaaccagaccctggccccccccttccccgagctgagatacctgagcctggcctacaacaagatcgccaaggaggacgccgtgctgcccgtggccctgttccccagcctgtgcgagttcgtgttccacaacaaccccctggtggcccacaccagaggcgtgccccccctgctgaagagcttcctgcaggagagactgggcatccacctgatcagaagaaagatcgtgaagcccaagcaccacgtgctgatgagcagaaaggagagctggaaggtgaagagcgagatccccaaggtgcccaagcagcccctggtgctgcaccaccccagaatgaccaccaccaagagccccagcaaggacatgctggagcccgaggccgagctggccgaggacctgcccaccaccaagagcaccagcgtggagagcgagatgcccaccgagaacctggagggccacagccccagctgcagaaccttcgtgcccctgccccccatctgcagcaacagcaccgtgcacagcgaggagaccctgagccacctgagcgacaccaccgtgagactgagccccgagagacccagcgacgaggacagcaagagcaccgagagcatcttcctgacccaggtgagcgagctgcccagcagcgtgatccacaaggacgacctggagctgaaggagaaggaccagaagaagccccccaccgcccccagagaggtgaagggcaccagaagaaagctgcccaccgccttcctgcccagcaagtaccacggctacgaggagctgctgaccgccaagcccgaccccgccttcatcgagcccaagggcatccagaagaacgcccaggccctgcagcagatgctgaagcaccccctgctgtgccacagcagcaagcccaagctggacaccctgcagaagccctacgtgcacaaggagaagagagcccagagaatccccatccccccccccaagaagaccagagcccagctgctggacgacatcttcatcagactgagagaccccagaaacatcaccgaggcccccctgggcgccgtgctgcaccagtggaccgagagaagactggtgaaccacaagcagtacctggaggccaagagactgctgaaggagttccaggccagatacagacagctggtgagcggcagcctgagaaccgtgttcggcaccacccccctgcccatggcctgccccgccctgagcgagagccagcccaagttcggccacttcctggagttcatggacgagttctgccaggagcccaccgccagcgacagccagggctag

SEQ ID NO: 105439 - DNA, 2211 bp, synthetic construct
  misc_feature 1..2211: note = Description of Artificial Sequence: Synthetic coding sequence
  source 1..2211: mol_type = other DNA
atggccttcagcggcatctacaagctggacgacggcaagccctacctgaacaactgcttccccgccagaaacctgctgagagtgcccgaggagggccagggccactggctggtggtgcagaagggcaacctgaagaagaagcccaagggcctggtgggcgcccaggccgagagaagagagagcctgaaggccaccagcttcgagttcaagggcaagaaggagagcagaagagagaaccaggtggacctgcccggccacatcctggaccaggccttcctgctgaagcaccactgcgtgagaaagcccagcgacctgtgcaccatcaacgccaaggagaacgacttcaagcacttccacagcgtgatctacatcaacgccagcgagaacctgctgcccctggaggccttccacaccttccccgccctgaaggagctggacctggccttcaacggcatcaagaccatctacgtgaagtacggcgacttcaagctgctggagttcctggacctgagcttcaacagcctgaccgtggaggccatctgcgacctgggcatcctgccccacctgagagtgctgctgctgaccggcaacggcctgaccagcctgccccccaacctggccgtggccgagcaggaggccagcgtgaccagcctgaccagcaagagatacatcctgagattccccgccctggagaccctgatgctggacgacaacagactgagcaaccccagctgcttcgccagcctggccggcctgagaagactgaagaagctgagcctggacgagaacagaatcatcagaatcccctacctgcagcaggtgcagctgtacgacgagagcgtggactggaacggcggcagaggcagcccccacaaggagccccagttcatgctgcagagcaagcccagaatgctggaggacagcgacgagcagctggactacaccgtgctgcccatgaagaaggacgtggacagaaccatcgccaaggaggacgccgtgctgcccgtggccctgttccccagcctgtgcgagttcgtgttccacaacaaccccctggtggcccacaccagaggcgtgccccccctgctgaagagcttcctgcaggagagactgggcatccacctgatcagaagaaagatcgtgaagcccaagcaccacgtgctgatgagcagaaaggagagctggaaggtgaagagcgagatccccaaggtgcccaagcagcccctggtgctgcaccaccccagaatgaccaccaccaagagccccagcaaggacatgctggagcccgaggccgagctggccgaggacctgcccaccaccaagagcaccagcgtggagagcgagatgcccaccgagaacctggagggccacagccccagctgcagaaccttcgtgcccctgccccccatctgcagcaacagcaccgtgcacagcgaggagaccctgagccacctgagcgacaccaccgtgagactgagccccgagagacccagcgacgaggacagcaagagcaccgagagcatcttcctgacccaggtgagcgagctgcccagcagcgtgatccacaaggacgacctggagctgaaggagaaggaccagaagaagccccccaccgcccccagagaggtgaagggcaccagaagaaagctgcccaccgccttcctgcccagcaagtaccacggctacgaggagctgctgaccgccaagcccgaccccgccttcatcgagcccaagggcatccagaagaacgcccaggccctgcagcagatgctgaagcaccccctgctgtgccacagcagcaagcccaagctggacaccctgcagaagccctacgtgcacaaggagaagagagcccagagaatccccatccccccccccaagaagaccagagcccagctgctggacgacatcttcatcagactgagagaccccagaaacatcaccgaggcccccctgggcgccgtgctgcaccagtggaccgagagaagactggtgaaccacaagcagtacctggaggccaagagactgctgaaggagttccaggccagatacagacagctggtgagcggcagcctgagaaccgtgttcggcaccacccccctgcccatggcctgccccgccctgagcgagagccagcccaagttcggccacttcctggagttcatggacgagttctgccaggagcccaccgccagcgacagccagggctag

SEQ ID NO: 105440 - DNA, 891 bp, synthetic construct
  misc_feature 1..891: note = Description of Artificial Sequence: Synthetic coding sequence
  source 1..891: mol_type = other DNA
atggccttcagcggcatctacaagctggacgacggcaagccctacctgaacaactgcttccccgccagaaacctgctgagagtgcccgaggagggccagggccactggctggtggtgcagaagggcaacctgaagaagaagcccaagggcctggtgggcgcccaggccgagagaagagagagcctgaaggccaccagcttcgagttcaagggcaagaaggagagcagaagagagaaccaggtggacctgcccggccacatcctggaccaggccttcctgctgaagcaccactgcgtgagaaagcccagcgacctgtgcaccatcaacgtgagcggcctgaagttcagcaaggccaaggagaacgacttcaagcacttccacagcgtgatctacatcaacgccagcgagaacctgctgcccctggaggccttccacaccttccccgccctgaaggagctggacctggccttcaacggcatcaagaccatctacgtgaagtacggcgacttcaagctgctggagttcctggacctgagcttcaacagcctgaccgtggaggccatctgcgacctgggcatcctgccccacctgagagtgctgctgctgaccggcaacggcctgaccagcctgccccccaacctggccgtggccgagcaggaggccagcgtgaccagcctgaccagcaagagatacatcctgagattccccgccctggagaccctgatgctggacgacaacagactgagcaaccccagctgcttcgccagcctggccggcctgagaagactgaagaagctgagcctggacgagaacagaatcatcagaatcccctacctgcagcaggtgcagctgtacgacgagagcgtggactggaacggcggcagaggctag

SEQ ID NO: 105441 - DNA, 1797 bp, synthetic construct
  misc_feature 1..1797: note = Description of Artificial Sequence: Synthetic coding sequence
  source 1..1797: mol_type = other DNA
atggccttcagcggcatctacaagctggacgacggcaagccctacctgaacaactgcttccccgccagaaacctgctgagagtgcccgaggagggccagggccactggctggtggtgcagaagggcaacctgaagaagaagcccaagggcctggtgggcgcccaggccgagagaagagagagcctgaaggccaccagcttcgagttcaagggcaagaaggagagcagaagagagaaccaggtggacctgcccggccacatcctggaccaggccttcctgctgaagcaccactgcgtgagaaagcccagcgacctgtgcaccatcaacgccaaggagaacgacttcaagcacttccacagcgtgatctacatcaacgccagcgagaacctgctgcccctggaggccttccacaccttccccgccctgaaggagctggacctggccttcaacggcatcaagaccatctacgtgaagtacggcgacttcaagctgctggagttcctggacctgagcttcaacagcctgaccgtggaggccatctgcgacctgggcatcctgccccacctgagagtgctgctgctgaccggcaacggcctgaccagcctgccccccaacctggccgtggccgagcaggaggccagcgtgaccagcctgaccagcaagagatacatcctgagattccccgccctggagaccctgatgctggacgacaacagactgagcaaccccagctgcttcgccagcctggccggcctgagaagactgaagaagctgagcctggacgagaacagaatcatcagaatcccctacctgcagcaggtgcagctgtacgacgagagcgtggactggaacggcggcagaggcagcccccacaaggagccccagttcatgctgcagagcaagcccagaatgctggaggacagcgacgagcagctggactacaccgtgctgcccatgaagaaggacgtggacagaaccggcgtgccccccctgctgaagagcttcctgcaggagagactgggcatccacctgatcagaagaaagatcgtgaagcccaagcaccacgtgctgatgagcagaaaggagagctggaaggtgaagagcgagatccccaaggtgcccaagcagcccctggtgctgcaccaccccagaatgaccaccaccaagagccccagcaaggacatgctggagcccgaggccgagctggccgaggacctgcccaccaccaagagcaccagcgtggagagcgagatgcccaccgagaacctggagggccacagccccagctgcagaaccttcgtgcccctgccccccatctgcagcaacagcaccgtgcacagcgaggagaccctgagccacctgagcgacaccaccgtgagactgagccccgagagacccagcgacgaggacagcaagagcaccgagagcatcttcctgacccaggtgagcgagctgcccagcagcgtgatccacaaggacgacctggagctgaaggagaaggaccagaagaagccccccaccgcccccagagaggtgaagggcaccagaagaaagctgcccaccgccttcctgcccagcaagtaccacggctacgaggagctgctgaccgccaagcccgaccccgccttcatcgagcccaagggcatccagaagaacgcccaggccctgcagcagatgctgaagcaccccctgctgtgccacagcagcaagcccaagctggacaccctgcagaagccctacgtgcacaaggagaagagagtgctgagctgcaccagcggccagaacggcggctggtag

SEQ ID NO: 105442 - DNA, 1554 bp, synthetic construct
  misc_feature 1..1554: note = Description of Artificial Sequence: Synthetic coding sequence
  source 1..1554: mol_type = other DNA
atgctggacgacaacagactgagcaaccccagctgcttcgccagcctggccggcctgagaagactgaagaagctgagcctggacgagaacagaatcatcagaatcccctacctgcagcaggtgcagctgtacgacgagagcgtggactggaacggcggcagaggcagcccccacaaggagccccagttcatgctgcagagcaagcccagaatgctggaggacagcgacgagcagctggactacaccgtgctgcccatgaagaaggacgtggacagaaccgaggtggtgttcagcagctaccccggcttcagcaccagcgagatcgccaaggaggacgccgtgctgcccgtggccctgttccccagcctgtgcgagttcgtgttccacaacaaccccctggtggcccacaccagaggcgtgccccccctgctgaagagcttcctgcaggagagactgggcatccacctgatcagaagaaagatcgtgaagcccaagcaccacgtgctgatgagcagaaaggagagctggaaggtgaagagcgagatccccaaggtgcccaagcagcccctggtgctgcaccaccccagaatgaccaccaccaagagccccagcaaggacatgctggagcccgaggccgagctggccgaggacctgcccaccaccaagagcaccagcgtggagagcgagatgcccaccgagaacctggagggccacagccccagctgcagaaccttcgtgcccctgccccccatctgcagcaacagcaccgtgcacagcgaggagaccctgagccacctgagcgacaccaccgtgagactgagccccgagagacccagcgacgaggacagcaagagcaccgagagcatcttcctgacccaggtgagcgagctgcccagcagcgtgatccacaaggacgacctggagctgaaggagaaggaccagaagaagccccccaccgcccccagagaggtgaagggcaccagaagaaagctgcccaccgccttcctgcccagcaagtaccacggctacgaggagctgctgaccgccaagcccgaccccgccttcatcgagcccaagggcatccagaagaacgcccaggccctgcagcagatgctgaagcaccccctgctgtgccacagcagcaagcccaagctggacaccctgcagaagccctacgtgcacaaggagaagagagcccagagaatccccatccccccccccaagaagaccagagcccagctgctggacgacatcttcatcagactgagagaccccagaaacatcaccgaggcccccctgggcgccgtgctgcaccagtggaccgagagaagactggtgaaccacaagcagtacctggaggccaagagactgctgaaggagttccaggccagatacagacagctggtgagcggcagcctgagaaccgtgttcggcaccacccccctgcccatggcctgccccgccctgagcgagagccagcccaagttcggccacttcctggagttcatggacgagttctgccaggagcccaccgccagcgacagccagggctag

SEQ ID NO: 105443 - DNA, 984 bp, synthetic construct
  misc_feature 1..984: note = Description of Artificial Sequence: Synthetic coding sequence
  source 1..984: mol_type = other DNA
atgttccccagcagaagaaaggccgcccagctgccctgggaggacggcagaagcggcctgctgagcggcggcctgcccagaaagtgcagcgtgttccacctgttcgtggcctgcctgagcctgggcttcttcagcctgctgtggctgcagctgagctgcagcggcgacgtggccagagccgtgagaggccagggccaggagaccagcggcccccccagagcctgcccccccgagcccccccccgagcactgggaggaggacgccagctggggcccccacagactggccgtgctggtgcccttcagagagagattcgaggagctgctggtgttcgtgccccacatgagaagattcctgagcagaaagaagatcagacaccacatctacgtgctgaaccaggtggaccacttcagattcaacagagccgccctgatcaacgtgggcttcctggagagcagcaacagcaccgactacatcgccatgcacgacgtggacctgctgcccctgaacgaggagctggactacggcttccccgaggccggccccttccacgtggccagccccgagctgcaccccctgtaccactacaagacctacgtgggcggcatcctgctgctgagcaagcagcactacagactgtgcaacggcatgagcaacagattctggggctggggcagagaggacgacgagttctacagaagaatcaagggcgccggcctgcagctgttcagacccagcggcatcaccaccggctacaagaccttcagacacctgcacgaccccgcctggagaaagagagaccagaagagaatcgccgcccagaagcaggagcagttcaaggtggacagagagggcggcctgaacaccgtgaagtaccacgtggccagcagaaccgccctgagcgtgggcggcgccccctgcaccgtgctgaacatcatgctggactgcgacaagaccgccaccccctggtgcaccttcagctag

SEQ ID NO: 105444 - DNA, 642 bp, synthetic construct
  misc_feature 1..642: note = Description of Artificial Sequence: Synthetic coding sequence
  source 1..642: mol_type = other DNA
atgagaagattcctgagcagaaagaagatcagacaccacatctacgtgctgaaccaggtggaccacttcagattcaacagagccgccctgatcaacgtgggcttcctggagagcagcaacagcaccgactacatcgccatgcacgacgtggacctgctgcccctgaacgaggagctggactacggcttccccgaggccggccccttccacgtggccagccccgagctgcaccccctgtaccactacaagacctacgtgggcggcatcctgctgctgagcaagcagcactacagactgtgcaacggcatgagcaacagattctggggctggggcagagaggacgacgagttctacagaagaatcaagggcgccggcctgcagctgttcagacccagcggcatcaccaccggctacaagaccttcagacacctgcacgaccccgcctggagaaagagagaccagaagagaatcgccgcccagaagcaggagcagttcaaggtggacagagagggcggcctgaacaccgtgaagtaccacgtggccagcagaaccgccctgagcgtgggcggcgccccctgcaccgtgctgaacatcatgctggactgcgacaagaccgccaccccctggtgcaccttcagctag

SEQ ID NO: 105445 - DNA, 2880 bp, synthetic construct
  misc_feature 1..2880: note = Description of Artificial Sequence: Synthetic coding sequence
  source 1..2880: mol_type = other DNA
atggtggccgccccctgcgccagaagactggccagaagaagccacagcgccctgctggccgccctgaccgtgctgctgctgcagaccctggtggtgtggaacttcagcagcctggacagcggcgccggcgagagaagaggcggcgccgccgtgggcggcggcgagcagcccccccccgcccccgcccccagaagagagagaagagacctgcccgccgagcccgccgccgccagaggcggcggcggcggcggcggcggcggcggcggcggcagaggcccccaggccagagccagaggcggcggccccggcgagcccagaggccagcagcccgccagcagaggcgccctgcccgccagagccctggacccccaccccagccccctgatcaccctggagacccaggacggctacttcagccacagacccaaggagaaggtgagaaccgacagcaacaacgagaacagcgtgcccaaggacttcgagaacgtggacaacagcaacttcgcccccagaacccagaagcagaagcaccagcccgagctggccaagaagccccccagcagacagaaggagctgctgaagagaaagctggagcagcaggagaagggcaagggccacaccttccccggcaagggccccggcgaggtgctgccccccggcgacagagccgccgccaacagcagccacggcaaggacgtgagcagacccccccacgccagaaagaccggcggcagcagccccgagaccaagtacgaccagccccccaagtgcgacatcagcggcaaggaggccatcagcgccctgagcagagccaagagcaagcactgcagacaggagatcggcgagacctactgcagacacaagctgggcctgctgatgcccgagaaggtgaccagattctgccccctggagggcaaggccaacaagaacgtgcagtgggacgaggacagcgtggagtacatgcccgccaaccccgtgagaatcgccttcgtgctggtggtgcacggcagagccagcagacagctgcagagaatgttcaaggccatctaccacaaggaccacttctactacatccacgtggacaagagaagcaactacctgcacagacaggtgctgcaggtgagcagacagtacagcaacgtgagagtgaccccctggagaatggccaccatctggggcggcgccagcctgctgagcacctacctgcagagcatgagagacctgctggagatgaccgactggccctgggacttcttcatcaacctgagcgccgccgactaccccatcagaaccaacgaccagctggtggccttcctgagcagatacagagacatgaacttcctgaagagccacggcagagacaacgccagattcatcagaaagcagggcctggacagactgttcctggagtgcgacgcccacatgtggagactgggcgacagaagaatccccgagggcatcgccgtggacggcggcagcgactggttcctgctgaacagaagattcgtggagtacgtgaccttcagcaccgacgacctggtgaccaagatgaagcagttctacagctacaccctgctgcccgccgagagcttcttccacaccgtgctggagaacagcccccactgcgacaccatggtggacaacaacctgagaatcaccaactggaacagaaagctgggctgcaagtgccagtacaagcacatcgtggactggtgcggctgcagccccaacgacttcaagccccaggacttccacagattccagcagaccgccagacccaccttcttcgccagaaagttcgaggccgtggtgaaccaggagatcatcggccagctggactactacctgtacggcaactaccccgccggcacccccggcctgagaagctactgggagaacgtgtacgacgagcccgacggcatccacagcctgagcgacgtgaccctgaccctgtaccacagcttcgccagactgggcctgagaagagccgagaccagcctgcacaccgacggcgagaacagctgcagatactaccccatgggccaccccgccagcgtgcacctgtacttcctggccgacagattccagggcttcctgatcaagcaccacgccaccaacctggccgtgagcaagctggagaccctggagacctgggtgatgcccaagaaggtgttcaagatcgccagcccccccagcgacttcggcagactgcagttcagcgaggtgggcaccgactgggacgccaaggagagactgttcagaaacttcggcggcctgctgggccccatggacgagcccgtgggcatgcagaagtggggcaagggccccaacgtgaccgtgaccgtgatctgggtggaccccgtgaacgtgatcgccgccacctacgacatcctgatcgagagcaccgccgagttcacccactacaagccccccctgaacctgcccctgagacccggcgtgtggaccgtgaagatcctgcaccactgggtgcccgtggccgagaccaagttcctggtggcccccctgaccttcagcaacagacagcccatcaagcccgaggaggccctgaagctgcacaacggccccctgagaaacgcctacatggagcagagcttccagagcctgaaccccgtgctgagcctgcccatcaaccccgcccaggtggagcaggccagaagaaacgccgccagcaccggcaccgccctggagggctggctggacagcctggtgggcggcatgtggaccgccatggacatctgcgccaccggccccaccgcctgccccgtgatgcagacctgcagccagaccgcctggagcagcttcagccccgaccccaagagcgagctgggcgccgtgaagcccgacggcagactgagatag

SEQ ID NO: 105446 - DNA, 2598 bp, synthetic construct
  misc_feature 1..2598: note = Description of Artificial Sequence: Synthetic coding sequence
  source 1..2598: mol_type = other DNA
atggtggccagcgccagagtgcagaagctggtgagaagatacaagctggccatcgccaccgccctggccatcctgctgctgcagggcctggtggtgtggagcttcagcggcctggaggaggacgaggccggcgagaagggcagacagagaaagcccagacccctggaccccggcgagggcagcaaggacaccgacagcagcgccggcagaagaggcagcaccggcagaagacacggcagatggagaggcagagccgagagccccggcgtgcccgtggccaaggtggtgagagccgtgaccagcagacagagagccagcagaagagtgccccccgcccccccccccgaggcccccggcagacagaacctgagcggcgccgccgccggcgaggccctggtgggcgccgccggcttccccccccacggcgacaccggcagcgtggagggcgccccccagcccaccgacaacggcttcacccccaagtgcgagatcgtgggcaaggacgccctgagcgccctggccagagccagcaccaagcagtgccagcaggagatcgccaacgtggtgtgcctgcaccaggccggcagcctgatgcccaaggccgtgcccagacactgccagctgaccggcaagatgagccccggcatccagtgggacgagagccaggcccagcagcccatggacggcccccccgtgagaatcgcctacatgctggtggtgcacggcagagccatcagacagctgaagagactgctgaaggccgtgtaccacgagcagcacttcttctacatccacgtggacaagagaagcgactacctgcacagagaggtggtggagctggcccagggctacgacaacgtgagagtgaccccctggagaatggtgaccatctggggcggcgccagcctgctgagaatgtacctgagaagcatgagagacctgctggaggtgcccggctgggcctgggacttcttcatcaacctgagcgccaccgactaccccaccagaaccaacgaggagctggtggccttcctgagcaagaacagagacaagaacttcctgaagagccacggcagagacaacagcagattcatcaagaagcagggcctggacagactgttccacgagtgcgacagccacatgtggagactgggcgagagacagatccccgccggcatcgtggtggacggcggcagcgactggttcgtgctgaccagaagcttcgtggagtacgtggtgtacaccgacgaccccctggtggcccagctgagacagttctacacctacaccctgctgcccgccgagagcttcttccacaccgtgctggagaacagcctggcctgcgagaccctggtggacaacaacctgagagtgaccaactggaacagaaagctgggctgcaagtgccagtacaagcacatcgtggactggtgcggctgcagccccaacgacttcaagccccaggacttcctgagactgcagcaggtgagcagacccaccttcttcgccagaaagttcgagagcaccgtgaaccaggaggtgctggagatcctggacttccacctgtacggcagctacccccccggcacccccgccctgaaggcctactgggagaacacctacgacgccgccgacggccccagcggcctgagcgacgtgatgctgaccgcctacaccgccttcgccagactgagcctgcaccacgccgccaccgccgccccccccatgggcacccccctgtgcagattcgagcccagaggcctgcccagcagcgtgcacctgtacttctacgacgaccacttccagggctacctggtgacccaggccgtgcagcccagcgcccagggccccgccgagaccctggagatgtggctgatgccccagggcagcctgaagctgctgggcagaagcgaccaggccagcagactgcagagcctggaggtgggcaccgactgggaccccaaggagagactgttcagaaacttcggcggcctgctgggccccctggacgagcccgtggccgtgcagagatgggccagaggccccaacctgaccgccaccgtggtgtggatcgaccccacctacgtggtggccaccagctacgacatcaccgtggacaccgagaccgaggtgacccagtacaagccccccctgagcagacccctgagacccggcccctggaccgtgagactgctgcagttctgggagcccctgggcgagaccagattcctggtgctgcccctgaccttcaacagaaagctgcccctgagaaaggacgacgccagctggctgcacgccggccccccccacaacgagtacatggagcagagcttccagggcctgagcagcatcctgaacctgccccagcccgagctggccgaggaggccgcccagagacacacccagctgaccggccccgccctggaggcctggaccgacagagagctgagcagcttctggagcgtggccggcctgtgcgccatcggccccagcccctgccccagcctggagccctgcagactgaccagctggagcagcctgagccccgaccccaagagcgagctgggccccgtgaaggccgacggcagactgagatag

SEQ ID NO: 105447 - DNA, 2031 bp, synthetic construct
  misc_feature 1..2031: note = Description of Artificial Sequence: Synthetic coding sequence
  source 1..2031: mol_type = other DNA
atggtggccagcgccagagtgcagaagctggtgagaagatacaagctggccatcgccaccgccctggccatcctgctgctgcagggcctggtggtgtggagcttcagcggcctggaggaggacgaggccggcgagaagggcagacagagaaagcccagacccctggaccccggcgagggcagcaaggacaccgacagcagcgccggcagaagaggcagcaccggcagaagacacggcagatggagaggcagagccgagagccccggcgtgcccgtggccaaggtggtgagagccgtgaccagcagacagagagccagcagaagagtgccccccgcccccccccccgaggcccccggcagacagaacctgagcggcgccgccgccggcgaggccctggtgggcgccgccggcttccccccccacggcgacaccggcagcgtggagggcgccccccagcccaccgacaacggcttcacccccaagtgcgagatcgtgggcaaggacgccctgagcgccctggccagagccagcaccaagcagtgccagcaggagatcgccaacgtggtgtgcctgcaccaggccggcagcctgatgcccaaggccgtgcccagacactgccagctgaccggcaagatgagccccggcatccagtgggacgagagccaggcccagcagcccatggacggcccccccgtgagaatcgcctacatgctggtggtgcacggcagagccatcagacagctgaagagactgctgaaggccgtgtaccacgagcagcacttcttctacatccacgtggacaagagaagcgactacctgcacagagaggtggtggagctggcccagggctacgacaacgtgagagtgaccccctggagaatggtgaccatctggggcggcgccagcctgctgagaatgtacctgagaagcatgagagacctgctggaggtgcccggctgggcctgggacttcttcatcaacctgagcgccaccgactaccccaccagaaccaacgaggagctggtggccttcctgagcaagaacagagacaagaacttcctgaagagccacggcagagacaacagcagattcatcaagaagcagggcctggacagactgttccacgagtgcgacagccacatgtggagactgggcgagagacagatccccgccggcatcgtggtggacggcggcagcgactggttcgtgctgaccagaagcttcgtggagtacgtggtgtacaccgacgaccccctggtggcccagctgagacagttctacacctacaccctgctgcccgccgagagcttcttccacaccgtgctggagaacagcctggcctgcgagaccctggtggacaacaacctgagagtgaccaactggaacagaaagctgggctgcaagtgccagtacaagcacatcgtggactggtgcggctgcagccccaacgacttcaagccccaggacttcctgagactgcagcaggtgagcagacccaccttcttcgccagaaagttcgagagcaccgtgaaccaggaggtgctggagatcctggacttccacctgtacggcagctacccccccggcacccccgccctgaaggcctactgggagaacacctacgacgccgccgacggccccagcggcctgagcgacgtgatgctgaccgcctacaccgccttcgccagactgagcctgcaccacgccgccaccgccgccccccccatgggcacccccctgtgcagattcgagcccagaggcctgcccagcagcgtgcacctgtacttctacgacgaccacttccagggctacctggtgacccaggccgtgcagcccagcgcccagggccccgccgagaccctggagatgtggctgatgccccagggcagcctgaagctgctgggcagaagcgaccaggccagcagactgcagagcctggagaacagaggcctgagcatgctgcccagactggtgagcaacagctggccccaggccgtgctgcccctgcagccccccaaggccctgggctag

SEQ ID NO: 105448 - DNA, 1503 bp, synthetic construct
  misc_feature 1..1503: note = Description of Artificial Sequence: Synthetic coding sequence
  source 1..1503: mol_type = other DNA
atgatcatcagccacttccccaagtgcgtggccgtgttcgccctgctggccctgagcgtgggcgccctggacaccttcatcgccgccgtgtacgagcacgccgtgatcctgcccaacagaaccgagacccccgtgagcaaggaggaggccctgctgctgatgaacaagaacatcgacgtgctggagaaggccgtgaagctggccgccaagcagggcgcccacatcatcgtgacccccgaggacggcatctacggctggatcttcaccagagagagcatctacccctacctggaggacatccccgaccccggcgtgaactggatcccctgcagagacccctggagattcggcaacacccccgtgcagcagagactgagctgcctggccaaggacaacagcatctacgtggtggccaacatcggcgacaagaagccctgcaacgccagcgacagccagtgcccccccgacggcagataccagtacaacaccgacgtggtgttcgacagccagggcaagctgctggccagataccacaagtacaacctgttcgcccccgagatccagttcgacttccccaaggacagcgagctggtgaccttcgacacccccttcggcaagttcggcatcttcacctgcttcgacatcttcagccacgaccccgccgtggtggtggtggacgagagcatcgacagcatcctgtaccccaccgcctggtacaacaccctgcccctgctgagcgccgtgcccttccacagcgcctgggccaaggccatgggcgtgaacctgctggccgccaacacccacaacaccagcatgcacatgaccggcagcggcatctacgcccccgaggccgtgaaggtgtaccactacgacatggagaccgagagcggccagctgctgctgagcgagctgaagagcagacccagaagagagcccacctaccccgccgccgtggactggcacgcctacgccagcagcgtgaagcccttcagcagcgagcagagcgacttcctgggcatgatctacttcgacgagttcaccttcaccaagctgaagagaaacaccggcaactacaccgcctgccagaaggacctgtgctgccacctgacctacaagatgagcgagaagagaaccgacgagatctacgccctgggcgccttcgacggcctgcacaccgtggagggccagtactacctgcagatctgcgccctgctgaagtgccagaccaccgacctggagacctgcggcgagcccgtgggcagcgccttcaccaagttcgaggacttcagcctgagcggcaccttcggcaccagatacgtgttcccccagatcatcctgagcggcagccagctggcccccgagagacactacgagatcagcagagacggcagactgagaagcagaagcggcgcccccctgcccgtgctggtgatggccctgtacggcagagtgttcgagaaggacccccccagactgggccagggcagcggcaagttccagtag

SEQ ID NO: 105449 - DNA, 1200 bp, synthetic construct
  misc_feature 1..1200: note = Description of Artificial Sequence: Synthetic coding sequence
  source 1..1200: mol_type = other DNA
atggacagcagcaccaccgcccagtgcagacagctggaggccgccgtgggcggcgcccaggccctgagctgcctgaccggcagcagagcctacgagagattcaccggcaaccagatcgccaagatctaccagcagaaccccgaggcctacagccacaccgagagaatcagcctggtgagcagcttcgccgccagcctgttcctgggcagctacagccccatcgactacagcgacggcagcggcatgaacctgctgcagatccaggacaaggtgtggagccaggcctgcctgggcgcctgcgccccccacctggaggagaagctgagcccccccgtgcccagctgcagcgtggtgggcgccatcagcagctactacgtgcagagatacggcttcccccccggctgcaaggtggtggccttcaccggcgacaaccccgccagcctggccggcatgagactggaggagggcgacatcgccgtgagcctgggcaccagcgacaccctgttcctgtggctgcaggagcccatgcccgccctggagggccacatcttctgcaaccccgtggacagccagcactacatggccctgctgtgcttcaagaacggcagcctgatgagagagaagatcagaaacgagagcgtgagcagaagctggagcgacttcagcaaggccctgcagagcaccgagatgggcaacggcggcaacctgggcttctacttcgacgtgatggagatcacccccgagatcatcggcagacacagattcaacaccgagaaccacaaggtggccgccttccccggcgacgtggaggtgagagccctgatcgagggccagttcatggccaagagaatccacgccgagggcctgggctacagagtgatgagcaagaccaagatcctggccaccggcggcgccagccacaacagagagatcctgcaggtgctggccgacgtgttcgacgcccccgtgtacgtgatcgacaccgccaacagcgcctgcgtgggcagcgcctacagagccttccacggcctggccggcggcaccgacgtgcccttcagcgaggtggtgaagctggcccccaaccccagactggccgccacccccagccccggcgccagccaggtgtacgaggccctgctgccccagtacgccaagctggagcagagaatcctgagccagaccagaggcccccccgagtag

SEQ ID NO: 105450 - DNA, 4269 bp, synthetic construct
  misc_feature 1..4269: note = Description of Artificial Sequence: Synthetic coding sequence
  source 1..4269: mol_type = other DNA
atgagcggcatcaagagaaccatcaaggagaccgaccccgactacgaggacgtgagcgtggccctgcccaacaagagacacaaggccatcgagaacagcgccagagacgccgccgtgcagaagatcgagaccatcatcaaggagcagttcgccctggagatgaagaacaaggagcacgagatcgaggtgatcgaccagagactgatcgaggccagaagaatgatggacaagctgagagcctgcatcgtggccaactactacgccagcgccggcctgctgaaggtgagcgagggcagcaagacctgcgacaccatggtgttcaaccaccccgccatcaagaagttcctggagagccccagcagaagcagcagccccgccaaccagagagccgagacccccagcgccaaccacagcgagagcgacagcctgagccagcacaacgacttcctgagcgacaaggacaacaacagcaacatggacatcgaggagagactgagcaacaacatggagcagagacccagcagaaacaccggcagagacaccagcagaatcaccggcagccacaagaccgagcagagaaacgccgacctgaccgacgagaccagcagactgttcgtgaagaagaccatcgtggtgggcaacgtgagcaagtacatcccccccgacaagagagaggagaacgaccagagcacccacaagtggatggtgtacgtgagaggcagcagaagagagcccagcatcaaccacttcgtgaagaaggtgtggttcttcctgcaccccagctacaagcccaacgacctggtggaggtgagagagccccccttccacctgaccagaagaggctggggcgagttccccgtgagagtgcaggtgcacttcaaggacagccagaacaagagaatcgacatcatccacaacctgaagctggacagaacctacaccggcctgcagaccctgggcgccgagaccgtggtggacgtggagctgcacagacacagcctgggcgaggactgcatctacccccagagcagcgagagcgacatcagcgacgccccccccagcctgcccctgaccatccccgcccccgtgaaggccagcagccccatcaagcagagccacgagcccgtgcccgacaccagcgtggagaagggcttccccgccagcaccgaggccgagagacacacccccttctacgccctgcccagcagcctggagagaacccccaccaagatgaccaccagccagaaggtgaccttctgcagccacggcaacagcgccttccagcccatcgccagcagctgcaagatcgtgccccagagccaggtgcccaaccccgagagccccggcaagagcttccagcccatcaccatgagctgcaagatcgtgagcggcagccccatcagcacccccagccccagccccctgcccagaacccccaccagcacccccgtgcacgtgaagcagggcaccgccggcagcgtgatcaacaacccctacgtgatcatggacaagcagcccggccaggtgatcggcgccaccacccccagcaccggcagccccaccaacaagatcagcaccgccagccaggtgagccagggcaccggcagccccgtgcccaagatccacggcagcagcttcgtgaccagcaccgtgaagcaggaggacagcctgttcgccagcatgccccccctgtgccccatcggcagccaccccaaggtgcagagccccaagcccatcaccggcggcctgggcgccttcaccaaggtgatcatcaagcaggagcccggcgaggccccccacgtgcccgccaccggcgccgccagccagagccccctgccccagtacgtgaccgtgaagggcggccacatgatcgccgtgagcccccagaagcaggtgatcacccccggcgagggcatcgcccagagcgccaaggtgcagcccagcaaggtggtgggcgtgcccgtgggcagcgccctgcccagcaccgtgaagcaggccgtggccatcagcggcggccagatcctggtggccaaggccagcagcagcgtgagcaaggccgtgggccccaagcaggtggtgacccagggcgtggccaaggccatcgtgagcggcggcggcggcaccatcgtggcccagcccgtgcagaccctgaccaaggcccaggtgaccgccgccggcccccagaagagcggcagccagggcagcgtgatggccaccctgcagctgcccgccaccaacctggccaacctggccaacctgccccccggcaccaagctgtacctgaccaccaacagcaagaaccccagcggcaagggcaagctgctgctgatcccccagggcgccatcctgagagccaccaacaacgccaacctgcagagcggcagcgccgccagcggcggcagcggcgccggcggcggcggcggcggcggcggcggcggcggcagcggcagcggcggcggcggcagcaccggcggcggcggcggcaccgccggcggcggcacccagagcaccgccggccccggcggcatcagccagcacctgacctacaccagctacatcctgaagcagaccccccagggcaccttcctggtgggccagcccagcccccagaccagcggcaagcagctgaccaccggcagcgtggtgcagggcaccctgggcgtgagcaccagcagcgcccagggccagcagaccctgaaggtgatcagcggccagaagaccaccctgttcacccaggccgcccacggcggccaggccagcctgatgaagatcagcgacagcaccctgaagaccgtgcccgccaccagccagctgagcaagcccggcaccaccatgctgagagtggccggcggcgtgatcaccaccgccaccagccccgccgtggccctgagcgccaacggccccgcccagcagagcgagggcatggcccccgtgagcagcagcaccgtgagcagcgtgaccaagaccagcggccagcagcaggtgtgcgtgagccaggccaccgtgggcacctgcaaggccgccacccccaccgtggtgagcgccaccagcctggtgcccacccccaaccccatcagcggcaaggccaccgtgagcggcctgctgaagatccacagcagccagagcagcccccagcaggccgtgctgaccatccccagccagctgaagcccctgagcgtgaacaccagcggcggcgtgcagaccatcctgatgcccgtgaacaaggtggtgcagagcttcagcaccagcaagccccccgccatcctgcccgtggccgcccccacccccgtggtgcccagcagcgcccccgccgccgtggccaaggtgaagaccgagcccgagacccccggccccagctgcctgagccaggagggccagaccgccgtgaagaccgaggagagcagcgagctgggcaactacgtgatcaagatcgaccacctggagaccatccagcagctgctgaccgccgtggtgaagaagatccccctgatcaccgccaagagcgaggacgccagctgcttcagcgccaagagcgtggagcagtactacggctggaacatcggcaagagaagagccgccgagtggcagagagccatgaccatgagaaaggtgctgcaggagatcctggagaagaaccccagattccaccacctgacccccctgaagaccaagcacatcgcccactggtgcagatgccacggctacaccccccccgaccccgagagcctgagaaacgacggcgacagcatcgaggacgtgctgacccagatcgacagcgagcccgagtgccccagcagcttcagcagcgccgacaacctgtgcagaaagctggaggacctgcagcagttccagaagagagagcccgagaacgaggaggaggtggacatcctgagcctgagcgagcccgtgaagatcaacatcaagaaggagcaggaggagaagcaggaggaggtgaagttctacctgccccccacccccggcagcgagttcatcggcgacgtgacccagaagatcggcatcaccctgcagcccgtggccctgcacagaaacgtgtacgccagcgtggtggaggacatgatcctgaaggccaccgagcagctggtgaacgacatcctgagacaggccctggccgtgggctaccagaccgccagccacaacagaatccccaaggagatcaccgtgagcaacatccaccaggccatctgcaacatccccttcctggacttcctgaccaacaagcacatgggcatcctgaacgaggaccagtag

SEQ ID NO: 105451 - DNA, 4269 bp, synthetic construct; identical to SEQ ID NO: 105450
  misc_feature 1..4269: note = Description of Artificial Sequence: Synthetic coding sequence
  source 1..4269: mol_type = other DNA

SEQ ID NO: 105452 - DNA, 684 bp, synthetic construct
  misc_feature 1..684: note = Description of Artificial Sequence: Synthetic coding sequence
  source 1..684: mol_type = other DNA
atgttcaagagaatggccgagttcggccccgacagcggcggcagagtgaagggcgtgaccatcgtgaagcccatcgtgtacggcaacgtggccagatacttcggcaagaagagagaggaggacggccacacccaccagtggaccgtgtacgtgaagccctacagaaacgaggacatgagcgcctacgtgaagaagatccagttcaagctgcacgagagctacggcaaccccctgagagtggtgaccaagcccccctacgagatcaccgagaccggctggggcgagttcgagatcatcatcaagatcttcttcatcgaccccaacgagagacccgtgaccctgtaccacctgctgaagctgttccagagcgacaccaacgccatgctgggcaagaagaccgtggtgagcgagttctacgacgagatgatcttccaggaccccaccgccatgatgcagcagctgctgaccaccagcagacagctgaccctgggcgcctacaagcacgagaccgagttcgccgagctggaggtgaagaccagagagaagctggaggccgccaagaagaagaccagcttcgagatcgccgagctgaaggagagactgaaggccagcagagagaccatcaactgcctgaagaacgagatcagaaagctggaggaggacgaccaggccaaggacatctag

SEQ ID NO: 105453 - DNA, 1053 bp, synthetic construct
  misc_feature 1..1053: note = Description of Artificial Sequence: Synthetic coding sequence
  source 1..1053: mol_type = other DNA
atggccaccaccgccgcccccgccggcggcgccagaaacggcgccggccccgagtggggcggcttcgaggagaacatccagggcggcggcagcgccgtgatcgacatggagaacatggacgacaccagcggcagcagcttcgaggacatgggcgagctgcaccagagactgagagaggaggaggtggacgccgacgccgccgacgccgccgccgccgaggaggaggacggcgagttcctgggcatgaagggcttcaagggccagctgagcagacaggtggccgaccagatgtggcaggccggcaagagacaggccagcagagccttcagcctgtacgccaacatcgacatcctgagaccctacttcgacgtggagcccgcccaggtgagaagcagactgctggagagcatgatccccatcaagatggtgaacttcccccagaagatcgccggcgagctgtacggccccctgatgctggtgttcaccctggtggccatcctgctgcacggcatgaagaccagcgacaccatcatcagagagggcaccctgatgggcaccgccatcggcacctgcttcggctactggctgggcgtgagcagcttcatctacttcctggcctacctgtgcaacgcccagatcaccatgctgcagatgctggccctgctgggctacggcctgttcggccactgcatcgtgctgttcatcacctacaacatccacctgcacgccctgttctacctgttctggctgctggtgggcggcctgagcaccctgagaatggtggccgtgctggtgagcagaaccgtgggccccacccagagactgctgctgtgcggcaccctggccgccctgcacatgctgttcctgctgtacctgcacttcgcctaccacaaggtggtggagggcatcctggacaccctggagggccccaacatcccccccatccagagagtgcccagagacatccccgccatgctgcccgccgccagactgcccaccaccgtgctgaacgccaccgccaaggccgtggccgtgaccctgcagagccactag

SEQ ID NO: 105454 - DNA, 774 bp, synthetic construct
  misc_feature 1..774: note = Description of Artificial Sequence: Synthetic coding sequence
  source 1..774: mol_type = other DNA
atgagcggcttcgagaacctgaacaccgacttctaccagaccagctacagcatcgacgaccagagccagcagagctacgactacggcggcagcggcggcccctacagcaagcagtacgccggctacgactacagccagcagggcagattcgtgccccccgacatgatgcagccccagcagccctacaccggccagatctaccagcccacccaggcctacacccccgccagcccccagcccttctacggcaacaacttcgaggacgagccccccctgctggaggagctgggcatcaacttcgaccacatctggcagaagaccctgaccgtgctgcaccccctgaaggtggccgacggcagcatcatgaacgagaccgacctggccggccccatggtgttctgcctggccttcggcgccaccctgctgctggccggcaagatccagttcggctacgtgtacggcatcagcgccatcggctgcctgggcatgttctgcctgctgaacctgatgagcatgaccggcgtgagcttcggctgcgtggccagcgtgctgggctactgcctgctgcccatgatcctgctgagcagcttcgccgtgatcttcagcctgcagggcatggtgggcatcatcctgaccgccggcatcatcggctggtgcagcttcagcgccagcaagatcttcatcagcgccctggccatggagggccagcagctgctggtggcctacccctgcgccctgctgtacggcgtgttcgccctgatcagcgtgttctag

SEQ ID NO: 105455 - DNA, 798 bp, synthetic construct
  misc_feature 1..798: note = Description of Artificial Sequence: Synthetic coding sequence
  source 1..798: mol_type = other DNA
atgagcggcttcgagaacctgaacaccgacttctaccagaccagctacagcatcgacgaccagagccagcagagctacgactacggcggcagcggcggcccctacagcaagcagtacgccggctacgactacagccagcagggcagattcgtgccccccgacatgatgcagccccagcagccctacaccggccagatctaccagcccacccaggcctacacccccgccagcccccagcccttctacggcaacaacttcgaggacgagccccccctgctggaggagctgggcatcaacttcgaccacatctggcagaagaccctgaccgtgctgcaccccctgaaggtggccgacggcagcatcatgaacgagaccgacctggccggccccatggtgttctgcctggccttcggcgccaccctgctgctggccggcaagatccagttcggctacgtgtacggcatcagcgccatcggctgcctgggcatgttctgcctgctgaacctgatgagcatgaccggcgtgagcttcggctgcgtggccagcgtgctgggctactgcctgctgcccatgatcctgctgagcagcttcgccgtgatcttcagcctgcagggcatggtgggcatcatcctgaccgccggcatcatcggctggtgcagcttcagcgccagcaagatcttcatcagcgccctggccatggagggccagcagctgctggtggccctgcagcccaacatcacctacggcagcaactacttcctgttctgctgcctgccctacccccagcagcacttctag

SEQ ID NO: 105456 - DNA, 774 bp, synthetic construct; identical to SEQ ID NO: 105454
  misc_feature 1..774: note = Description of Artificial Sequence: Synthetic coding sequence
  source 1..774: mol_type = other DNA

SEQ ID NO: 105457 - DNA, 612 bp, synthetic construct
  misc_feature 1..612: note = Description of Artificial Sequence: Synthetic coding sequence
  source 1..612: mol_type = other DNA
atgatgcagccccagcagccctacaccggccagatctaccagcccacccaggcctacacccccgccagcccccagcccttctacggcaacaacttcgaggacgagccccccctgctggaggagctgggcatcaacttcgaccacatctggcagaagaccctgaccgtgctgcaccccctgaaggtggccgacggcagcatcatgaacgagaccgacctggccggccccatggtgttctgcctggccttcggcgccaccctgctgctggccggcaagatccagttcggctacgtgtacggcatcagcgccatcggctgcctgggcatgttctgcctgctgaacctgatgagcatgaccggcgtgagcttcggctgcgtggccagcgtgctgggctactgcctgctgcccatgatcctgctgagcagcttcgccgtgatcttcagcctgcagggcatggtgggcatcatcctgaccgccggcatcatcggctggtgcagcttcagcgccagcaagatcttcatcagcgccctggccatggagggccagcagctgctggtggcctacccctgcgccctgctgtacggcgtgttcgccctgatcagcgtgttctag

SEQ ID NO: 105458 - DNA, 534 bp, synthetic construct
  misc_feature 1..534: note = Description of Artificial Sequence: Synthetic coding sequence
  source 1..534: mol_type = other DNA
atgatgcagccccagcagccctacaccggccagatctaccagcccacccaggcctacacccccgccagcccccagcccttctacggcaacaacttcgaggacgagccccccctgctggaggagctgggcatcaacttcgaccacatctggcagaagaccctgaccgtgctgcaccccctgaaggtggccgacggcagcatcatgaacgagaccgacctggccggccccatggtgttctgcctggccttcggcgccaccctgctgctggccggcaagatccagttcggctacgtgtacggcatcagcgccatcggctgcctgggcatgttctgcctgctgaacctgatgagcatgaccggcgtgagcttcggctgcgtggccagcgtgctgggctactgcctgctgcccatgatcctgctgagcagcttcgccgtgatcttcagcctgcagggcatggtgggcatcatcctgaccgccggcatcatcggctggtgcagcttcagcgccagcaagatcttcatcagcgccctgtag

SEQ ID NO: 105459 - DNA, 306 bp, synthetic construct
  misc_feature 1..306: note = Description of Artificial Sequence: Synthetic coding sequence
  source 1..306: mol_type = other DNA
atgatgcagccccagcagccctacaccggccagatctaccagcccacccaggcctacacccccgccagcccccagcccttctacggcaacaacttcgaggacgagccccccctgctggaggagctgggcatcaacttcgaccacatctggcagaagaccctgaccgtgctgcaccccctgaaggtggccgacggcagcatcatgaacgagaccgacctggccggccccatggtgttctgcctggccttcggcgccaccctgctgctggccggcaagatccagttcggctacgtgtacggcatctag

SEQ ID NO: 105460 - DNA, 429 bp, synthetic construct
  misc_feature 1..429: note = Description of Artificial Sequence: Synthetic coding sequence
  source 1..429: mol_type = other DNA
atgagcggcttcgagaacctgaacaccgacttctaccagaccagctacagcatcgacgaccagagccagcagagctacgactacggcggcagcggcggcccctacagcaagcagtacgccggctacgactacagccagcagggcagattcgtgccccccgacatgatgcagccccagcagccctacaccggccagatctaccagcccacccaggcctacacccccgccagcccccagcccttctacggcaacaacttcgaggacgagccccccctgctggaggagctgggcatcaacttcgaccacatctggcagaagaccctgaccgtgctgcaccccctgaaggtggccgacggcagcatcatgaacgagaccgacctggcccagtggttcttcgccctgctgctggagccccactgctactggtag

SEQ ID NO: 105461 - DNA, 882 bp, synthetic construct
  misc_feature 1..882: note = Description of Artificial Sequence: Synthetic coding sequence
  source 1..882: mol_type = other DNA
atggcctaccacagcggctacggcgcccacggcagcaagcacagagccagagccgcccccgaccccccccccctgttcgacgacaccagcggcggctacagcagccagcccggcggctaccccgccaccggcgccgacgtggccttcagcgtgaaccacctgctgggcgaccccatggccaacgtggccatggcctacggcagcagcatcgccagccacggcaaggacatggtgcacaaggagctgcacagattcgtgagcgtgagcaagctgaagtacttcttcgccgtggacaccgcctacgtggccaagaagctgggcctgctggtgttcccctacacccaccagaactgggaggtgcagtacagcagagacgcccccctgccccccagacaggacctgaacgcccccgacctgtacatccccaccatggccttcatcacctacgtgctgctggccggcatggccctgggcatccagaagagattcagccccgaggtgctgggcctgtgcgccagcaccgccctggtgtgggtggtgatggaggtgctggccctgctgctgggcctgtacctggccaccgtgagaagcgacctgagcaccttccacctgctggcctacagcggctacaagtacgtgggcatgatcctgagcgtgctgaccggcctgctgttcggcagcgacggctactacgtggccctggcctggaccagcagcgccctgatgtacttcatcgtgagaagcctgagaaccgccgccctgggccccgacagcatgggcggccccgtgcccagacagagactgcagctgtacctgaccctgggcgccgccgccttccagcccctgatcatctactggctgaccttccacctggtgagatag

SEQ ID NO: 105462 - DNA, 360 bp, synthetic construct
  misc_feature 1..360: note = Description of Artificial Sequence: Synthetic coding sequence
  source 1..360: mol_type = other DNA
atggtgaagatgaccaagagcaagaccttccaggcctacctgcccaactgccacagaacctacagctgcatccactgcagagcccacctggccaaccacgacgagctgatcagcaagagcttccagggcagccagggcagagcctacctgttcaacagcgtggtgaacgtgggctgcggccccgccgaggagagagtgctgctgaccggcctgcacgccgtggccgacatctactgcgagaactgcaagaccaccctgggctggaagtacgagcacgccttcgagagcagccagaagtacaaggagggcaagttcatcatcgagctggcccacatgatcaaggacaacggctgggagtag

SEQ ID NO: 105463 - DNA, 360 bp, synthetic construct
  misc_feature 1..360: note = Description of Artificial Sequence: Synthetic coding sequence
  source 1..360: mol_type = other DNA
atggtgaagatgaccagaagcaagaccttccaggcctacctgcccagctgccacagaacctacagctgcatccactgcagagcccacctggccaaccacgacgagctgatcagcaagagcttccagggcagccagggcagagcctacctgttcaacagcgtggtgaacgtgggctgcggccccgccgaggagagagtgctgctgaccggcctgcacgccgtggccgacatctactgcgagaactgcaagaccaccctgggctggaagtacgagcacgccttcgagagcagccagaagtacaaggagggcaagtacatcatcgagctggcccacatgatcaaggacaacggctgggactag

SEQ ID NO: 105464 - DNA, 360 bp, synthetic construct
  misc_feature 1..360: note = Description of Artificial Sequence: Synthetic coding sequence
  source 1..360: mol_type = other DNA
atggtgagaatcagcaagcccaagaccttccaggcctacctggacgactgccacagaagatacagctgcgcccactgcagagcccacctggccaaccacgacgacctgatcagcaagagcttccagggcagccagggcagagcctacctgttcaacagcgtggtgaacgtgggctgcggccccgccgaggagagagtgctgctgaccggcctgcacgccgtggccgacatccactgcgagaactgcaagaccaccctgggctggaagtacgagcaggccttcgagagcagccagaagtacaaggagggcaagtacatcatcgagctgaaccacatgatcaaggacaacggctgggactag

SEQ ID NO: 105465 - DNA, 474 bp, synthetic construct
  misc_feature 1..474: note = Description of Artificial Sequence: Synthetic coding sequence
  source 1..474: mol_type = other DNA
atgtgcgtggcccaggtgctgaccgcccacctgctgccccccagacaggccctgggcagcctgtgcagcccctgggccgcccccagagtgggccccctgccccccgcccccgccatggtgagaatcagcaagcccaagaccttccaggcctacctggacgactgccacagaagatacagctgcgcccactgcagagcccacctggccaaccacgacgacctgatcagcaagagcttccagggcagccagggcagagcctacctgttcaacagcgtggtgaacgtgggctgcggccccgccgaggagagagtgctgctgaccggcctgcacgccgtggccgacatccactgcgagaactgcaagaccaccctgggctggaagtacgagcaggccttcgagagcagccagaagtacaaggagggcaagtacatcatcgagctgaaccacatgatcaaggacaacggctgggactag

SEQ ID NO: 105466 - DNA, 384 bp, synthetic construct
  misc_feature 1..384: note = Description of Artificial Sequence: Synthetic coding sequence
  source 1..384: mol_type = other DNA
atgcccagctgcgaccccggccccggccccgcctgcctgcccaccaagaccttcagaagctacctgcccagatgccacagaacctacagctgcgtgcactgcagagcccacctggccaagcacgacgagctgatcagcaagagcttccagggcagccacggcagagcctacctgttcaacagcgtggtgaacgtgggctgcggccccgccgagcagagactgctgctgaccggcctgcacagcgtggccgacatcttctgcgagagctgcaagaccaccctgggctggaagtacgagcaggccttcgagaccagccagaagtacaaggagggcaagtacatcatcgagatgagccacatggtgaaggacaacggctgggactag

SEQ ID NO: 105467 - DNA, 384 bp, synthetic construct; identical to SEQ ID NO: 105466
  misc_feature 1..384: note = Description of Artificial Sequence: Synthetic coding sequence
  source 1..384: mol_type = other DNA

SEQ ID NO: 105468 - DNA, 384 bp, synthetic construct; identical to SEQ ID NO: 105466
  misc_feature 1..384: note = Description of Artificial Sequence: Synthetic coding sequence
  source 1..384: mol_type = other DNA

SEQ ID NO: 105469 - DNA, 243 bp, synthetic construct
  misc_feature 1..243: note = Description of Artificial Sequence: Synthetic coding sequence
  source 1..243: mol_type = other DNA
atgcccagctgcgaccccggccccggccccgcctgcctgcccaccaagaccttcagaagctacctgcccagatgccacagaacctacagctgcgtgcactgcagagcccacctggccaagcacgacgagctgatcagcaagagcttccagggcagccacggcagagcctacctgttcaacagcgtggtgaacgtgggctgcggccccgccgagcagagactgctgctgaccggcctgcactag

SEQ ID NO: 105470 - DNA, 384 bp, synthetic construct; identical to SEQ ID NO: 105466
  misc_feature 1..384: note = Description of Artificial Sequence: Synthetic coding sequence
  source 1..384: mol_type = other DNA

SEQ ID NO: 105471 - DNA, 366 bp, synthetic construct
  misc_feature 1..366: note = Description of Artificial Sequence: Synthetic coding sequence
  source 1..366: mol_type = other DNA
atgggcagaatcttcctggaccacatcggcggcaccagactgttcagctgcgccaactgcgacaccatcctgaccaacagaagcgagctgatcagcaccagattcaccggcgccaccggcagagccttcctgttcaacaaggtggtgaacctgcagtacagcgaggtgcaggacagagtgatgctgaccggcagacacatggtgagagacgtgagctgcaagaactgcaacagcaagctgggctggatctacgagttcgccaccgaggacagccagagatacaaggagggcagagtgatcctggagagagccctggtgagagagagcgagggcttcgaggagcacgtgcccagcgacaacagctag

SEQ ID NO: 105472 - DNA, 366 bp, synthetic construct; identical to SEQ ID NO: 105471
  misc_feature 1..366: note = Description of Artificial Sequence: Synthetic coding sequence
  source 1..366: mol_type = other DNA

SEQ ID NO: 105473 - DNA, 366 bp, synthetic construct; identical to SEQ ID NO: 105471
  misc_feature 1..366: note = Description of Artificial Sequence: Synthetic coding sequence
  source 1..366: mol_type = other DNA

SEQ ID NO: 105474 - DNA, 366 bp, synthetic construct; identical to SEQ ID NO: 105471
  misc_feature 1..366: note = Description of Artificial Sequence: Synthetic coding sequence
  source 1..366: mol_type = other DNA

SEQ ID NO: 105475 - DNA, 366 bp, synthetic construct; identical to SEQ ID NO: 105471
  misc_feature 1..366: note = Description of Artificial Sequence: Synthetic coding sequence
  source 1..366: mol_type = other DNA

SEQ ID NO: 105476 - DNA, 2322 bp, synthetic construct
  misc_feature 1..2322: note = Description of Artificial Sequence: Synthetic coding sequence
  source 1..2322: mol_type = other DNA
atgttcagcctgagcagcaccgtgcagccccaggtgaccgtgcccctgagccacctgatcaacgccttccacacccccaagaacaccagcgtgagcctgagcggcgtgagcgtgagccagaaccagcacagagacgtggtgcccgagcacgaggcccccagcagcgagtgcatgttcagcgacttcctgaccaagctgaacatcgtgagcatcggcaagggcaagatcttcgagggctacagaagcatgttcatggagcccgccaagagaatgaagaagagcctggacaccaccgacaactggcacatcagacccgagcccttcagcctgagcatcccccccagcctgaacctgagagacctgggcctgagcgagctgaagatcggccagatcgaccagctggtggagaacctgctgcccggcttctgcaagggcaagaacatcagcagccactggcacaccagccacgtgagcgcccagagcttcttcgagaacaagtacggcaacctggacatcttcagcaccctgagaagcagctgcctgtacagacaccacagcagagccctgcagagcatctgcagcgacctgcagtactggcccgtgttcatccagagcagaggcttcaagaccctgaagagcagaaccagaagactgcagagcaccagcgagagactggccgagacccagaacatcgcccccagcttcgtgaagggcttcctgctgagagacagaggcagcgacgtggagagcctggacaagctgatgaagaccaagaacatccccgaggcccaccaggacgccttcaagaccggcttcgccgagggcttcctgaaggcccaggccctgacccagaagaccaacgacagcctgagaagaaccagactgatcctgttcgtgctgctgctgttcggcatctacggcctgctgaagaaccccttcctgagcgtgagattcagaaccaccaccggcctggacagcgccgtggaccccgtgcagatgaagaacgtgaccttcgagcacgtgaagggcgtggaggaggccaagcaggagctgcaggaggtggtggagttcctgaagaacccccagaagttcaccatcctgggcggcaagctgcccaagggcatcctgctggtgggcccccccggcaccggcaagaccctgctggccagagccgtggccggcgaggccgacgtgcccttctactacgccagcggcagcgagttcgacgagatgttcgtgggcgtgggcgccagcagaatcagaaacctgttcagagaggccaaggccaacgccccctgcgtgatcttcatcgacgagctggacagcgtgggcggcaagagaatcgagagccccatgcacccctacagcagacagaccatcaaccagctgctggccgagatggacggcttcaagcccaacgagggcgtgatcatcatcggcgccaccaacttccccgaggccctggacaacgccctgatcagacccggcagattcgacatgcaggtgaccgtgcccagacccgacgtgaagggcagaaccgagatcctgaagtggtacctgaacaagatcaagttcgaccagagcgtggaccccgagatcatcgccagaggcaccgtgggcttcagcggcgccgagctggagaacctggtgaaccaggccgccctgaaggccgccgtggacggcaaggagatggtgaccatgaaggagctggagttcagcaaggacaagatcctgatgggccccgagagaagaagcgtggagatcgacaacaagaacaagaccatcaccgcctaccacgagagcggccacgccatcatcgcctactacaccaaggacgccatgcccatcaacaaggccaccatcatgcccagaggccccaccctgggccacgtgagcctgctgcccgagaacgacagatggaacgagaccagagcccagctgctggcccagatggacgtgagcatgggcggcagagtggccgaggagctgatcttcggcaccgaccacatcaccaccggcgccagcagcgacttcgacaacgccaccaagatcgccaagagaatggtgaccaagttcggcatgagcgagaagctgggcgtgatgacctacagcgacaccggcaagctgagccccgagacccagagcgccatcgagcaggagatcagaatcctgctgagagacagctacgagagagccaagcacatcctgaagacccacgccaaggagcacaagaacctggccgaggccctgctgacctacgagaccctggacgccaaggagatccagatcgtgctggagggcaagaagctggaggtgagatag

SEQ ID NO: 105477 - DNA, 2223 bp, synthetic construct
  misc_feature 1..2223: note = Description of Artificial Sequence: Synthetic coding sequence
  source 1..2223: mol_type = other DNA
atgttcagcctgagcagcaccgtgcagccccaggtgaccgtgcccctgagccacctgatcaacgccttccacacccccaagaacaccagcgtgagcctgagcggcgtgagcgtgagccagaaccagcacagagacgtggtgcccgagcacgaggcccccagcagcgagtgcatgttcagcgacttcctgaccaagctgaacatcgtgagcatcggcaagggcaagatcttcgagggctacagaagcatgttcatggagcccgccaagagaatgaagaagagcctggacaccaccgacaactggcacatcagacccgagcccttcagcctgagcatcccccccagcctgaacctgagagacctgggcctgagcgagctgaagatcggccagatcgaccagctggtggagaacctgctgcccggcttctgcaagggcaagaacatcagcagccactggcacaccagccacgtgagcgcccagagcttcttcgagaacaagtacggcaacctggacatcttcagcaccctgagaagcagctgcctgtacagacaccacagcagagccctgcagagcatctgcagcgacctgcagtactggcccgtgttcatccagagcagaggcttcaagaccctgaagagcagaaccagaagactgcagagcaccagcgagagactggccgagacccagaacatcgcccccagcttcgtgaagggcttcctgctgagagacagaggcagcgacgtggagagcctggacaagctgatgaagaccaagaacatccccgaggcccaccaggacgccttcaagaccggcttcgccgagggcttcctgaaggcccaggccctgacccagaagaccaacgacagcctgagaagaaccagactgatcctgttcgtgctgctgctgttcggcatctacggcctgctgaagaaccccttcctgagcgtgagattcagaaccaccaccggcctggacagcgccgtggaccccgtgcagatgaagaacgtgaccttcgagcacgtgaagggcgtggaggaggccaagcaggagctgcaggaggtggtggagttcctgaagaacccccagaagttcaccatcctgggcggcaagctgcccaagggcatcctgctggtgggcccccccggcaccggcaagaccctgctggccagagccgtggccggcgaggccgacgtgcccttctactacgccagcggcagcgagttcgacgagatgttcgtgggcgtgggcgccagcagaatcagaaacctgttcagagaggccaaggccaacgccccctgcgtgatcttcatcgacgagctggacagcgtgggcggcaagagaatcgagagccccatgcacccctacagcagacagaccatcaaccagctgctggccgagatggacggcttcaagcccaacgagggcgtgatcatcatcggcgccaccaacttccccgaggccctggacaacgccctgatcagacccggcagattcgacatgcaggtgaccgtgcccagacccgacgtgaagggcagaaccgagatcctgaagtggtacctgaacaagatcaagttcgaccagagcgtggaccccgagatcatcgccagaggcaccgtgggcttcagcggcgccgagctggagaacctggtgaaccaggccgccctgaaggccgccgtggacggcaaggagatggtgaccatgaaggagctggagttcagcaaggacaagatcctgatgggccccgagagaagaagcgtggagatcgacaacaagaacaagaccatcaccgcctaccacgagagcggccacgccatcatcgcctactacaccaaggacgccatgcccatcaacaaggccaccatcatgcccagaggccccaccctgggccacgtgagcctgctgcccgagaacgacagatggaacgagaccagagcccagctgctggcccagatggacgtgagcatgggcggcagagtggccgaggagctgatcttcggcaccgaccacatcaccaccggcgccagcagcgacttcgacaacgccaccaagatcgccaagagaatggtgaccaagttcggcatgagcgagaagctgggcgtgatgacctacagcgacaccggcaagctgagccccgagacccagagcgccatcgagcaggagatcagaatcctgctgagagacagctacgagagagccaagcacatcctgaagacccacagctag

SEQ ID NO: 105478 - DNA, 2052 bp, synthetic construct
  misc_feature 1..2052: note = Description of Artificial Sequence: Synthetic coding sequence
  source 1..2052: mol_type = other DNA
atgttcagcctgagcagcaccgtgcagccccaggtgaccgtgcccctgagccacctgatcaacgccttccacacccccaagaacaccagcgtgagcctgagcggcgtgagcgtgagccagaaccagcacagagacgtggtgcccgagcacgaggcccccagcagcgagcccagcctgaacctgagagacctgggcctgagcgagctgaagatcggccagatcgaccagctggtggagaacctgctgcccggcttctgcaagggcaagaacatcagcagccactggcacaccagccacgtgagcgcccagagcttcttcgagaacaagtacgtgttcatccagagcagaggcttcaagaccctgaagagcagaaccagaagactgcagagcaccagcgagagactggccgagacccagaacatcgcccccagcttcgtgaagggcttcctgctgagagacagaggcagcgacgtggagagcctggacaagctgatgaagaccaagaacatccccgaggcccaccaggacgccttcaagaccggcttcgccgagggcttcctgaaggcccaggccctgacccagaagaccaacgacagcctgagaagaaccagactgatcctgttcgtgctgctgctgttcggcatctacggcctgctgaagaaccccttcctgagcgtgagattcagaaccaccaccggcctggacagcgccgtggaccccgtgcagatgaagaacgtgaccttcgagcacgtgaagggcgtggaggaggccaagcaggagctgcaggaggtggtggagttcctgaagaacccccagaagttcaccatcctgggcggcaagctgcccaagggcatcctgctggtgggcccccccggcaccggcaagaccctgctggccagagccgtggccggcgaggccgacgtgcccttctactacgccagcggcagcgagttcgacgagatgttcgtgggcgtgggcgccagcagaatcagaaacctgttcagagaggccaaggccaacgccccctgcgtgatcttcatcgacgagctggacagcgtgggcggcaagagaatcgagagccccatgcacccctacagcagacagaccatcaaccagctgctggccgagatggacggcttcaagcccaacgagggcgtgatcatcatcggcgccaccaacttccccgaggccctggacaacgccctgatcagacccggcagattcgacatgcaggtgaccgtgcccagacccgacgtgaagggcagaaccgagatcctgaagtggtacctgaacaagatcaagttcgaccagagcgtggaccccgagatcatcgccagaggcaccgtgggcttcagcggcgccgagctggagaacctggtgaaccaggccgccctgaaggccgccgtggacggcaaggagatggtgaccatgaaggagctggagttcagcaaggacaagatcctgatgggccccgagagaagaagcgtggagatcgacaacaagaacaagaccatcaccgcctaccacgagagcggccacgccatcatcgcctactacaccaaggacgccatgcccatcaacaaggccaccatcatgcccagaggccccaccctgggccacgtgagcctgctgcccgagaacgacagatggaacgagaccagagcccagctgctggcccagatggacgtgagcatgggcggcagagtggccgaggagctgatcttcggcaccgaccacatcaccaccggcgccagcagcgacttcgacaacgccaccaagatcgccaagagaatggtgaccaagttcggcatgagcgagaagctgggcgtgatgacctacagcgacaccggcaagctgagccccgagacccagagcgccatcgagcaggagatcagaatcctgctgagagacagctacgagagagccaagcacatcctgaagacccacgccaaggagcacaagaacctggccgaggccctgctgacctacgagaccctggacgccaaggagatccagatcgtgctggagggcaagaagctggaggtgagatag

SEQ ID NO: 105479 - DNA, 2151 bp, synthetic construct
  misc_feature 1..2151: note = Description of Artificial Sequence: Synthetic coding sequence
  source 1..2151: mol_type = other DNA
atgttcagcctgagcagcaccgtgcagccccaggtgaccgtgcccctgagccacctgatcaacgccttccacacccccaagaacaccagcgtgagcctgagcggcgtgagcgtgagccagaaccagcacagagacgtggtgcccgagcacgaggcccccagcagcgagcccagcctgaacctgagagacctgggcctgagcgagctgaagatcggccagatcgaccagctggtggagaacctgctgcccggcttctgcaagggcaagaacatcagcagccactggcacaccagccacgtgagcgcccagagcttcttcgagaacaagtacggcaacctggacatcttcagcaccctgagaagcagctgcctgtacagacaccacagcagagccctgcagagcatctgcagcgacctgcagtactggcccgtgttcatccagagcagaggcttcaagaccctgaagagcagaaccagaagactgcagagcaccagcgagagactggccgagacccagaacatcgcccccagcttcgtgaagggcttcctgctgagagacagaggcagcgacgtggagagcctggacaagctgatgaagaccaagaacatccccgaggcccaccaggacgccttcaagaccggcttcgccgagggcttcctgaaggcccaggccctgacccagaagaccaacgacagcctgagaagaaccagactgatcctgttcgtgctgctgctgttcggcatctacggcctgctgaagaaccccttcctgagcgtgagattcagaaccaccaccggcctggacagcgccgtggaccccgtgcagatgaagaacgtgaccttcgagcacgtgaagggcgtggaggaggccaagcaggagctgcaggaggtggtggagttcctgaagaacccccagaagttcaccatcctgggcggcaagctgcccaagggcatcctgctggtgggcccccccggcaccggcaagaccctgctggccagagccgtggccggcgaggccgacgtgcccttctactacgccagcggcagcgagttcgacgagatgttcgtgggcgtgggcgccagcagaatcagaaacctgttcagagaggccaaggccaacgccccctgcgtgatcttcatcgacgagctggacagcgtgggcggcaagagaatcgagagccccatgcacccctacagcagacagaccatcaaccagctgctggccgagatggacggcttcaagcccaacgagggcgtgatcatcatcggcgccaccaacttccccgaggccctggacaacgccctgatcagacccggcagattcgacatgcaggtgaccgtgcccagacccgacgtgaagggcagaaccgagatcctgaagtggtacctgaacaagatcaagttcgaccagagcgtggaccccgagatcatcgccagaggcaccgtgggcttcagcggcgccgagctggagaacctggtgaaccaggccgccctgaaggccgccgtggacggcaaggagatggtgaccatgaaggagctggagttcagcaaggacaagatcctgatgggccccgagagaagaagcgtggagatcgacaacaagaacaagaccatcaccgcctaccacgagagcggccacgccatcatcgcctactacaccaaggacgccatgcccatcaacaaggccaccatcatgcccagaggccccaccctgggccacgtgagcctgctgcccgagaacgacagatggaacgagaccagagcccagctgctggcccagatggacgtgagcatgggcggcagagtggccgaggagctgatcttcggcaccgaccacatcaccaccggcgccagcagcgacttcgacaacgccaccaagatcgccaagagaatggtgaccaagttcggcatgagcgagaagctgggcgtgatgacctacagcgacaccggcaagctgagccccgagacccagagcgccatcgagcaggagatcagaatcctgctgagagacagctacgagagagccaagcacatcctgaagacccacgccaaggagcacaagaacctggccgaggccctgctgacctacgagaccctggacgccaaggagatccagatcgtgctggagggcaagaagctggaggtgagatag

SEQ ID NO: 105480 - DNA, 747 bp, synthetic construct
  misc_feature 1..747: note = Description of Artificial Sequence: Synthetic coding sequence
  source 1..747: mol_type = other DNA
atgtaccaggtgaccgtgcccctgagccacctgatcaacgccttccacacccccaagaacaccagcgtgagcctgagcggcgtgagcgtgagccagaaccagcacagagacgtggtgcccgagcacgaggcccccagcagcgagcccagcctgaacctgagagacctgggcctgagcgagctgaagatcggccagatcgaccagctggtggagaacctgctgcccggcttctgcaagggcaagaacatcagcagccactggcacaccagccacgtgagcgcccagagcttcttcgagaacaagtacggcaacctggacatcttcagcaccctgagaagcagctgcctgtacagacaccacagcagagccctgcagagcatctgcagcgacctgcagtactggcccgtgttcatccagagcagaggcttcaagaccctgaagagcagaaccagaagactgcagagcaccagcgagagactggccgagacccagaacatcgcccccagcttcgtgaagggcttcctgctgagagacagaggcagcgacgtggagagcctggacaagctgatgaagaccaagaacatccccgaggcccaccaggacgccttcaagaccggcttcgccgagggcttcctgaaggcccaggccctgacccagaagaccaacgacagcctgagaagaaccagactgatcctgttcgtgctgctgctgttcggcatctacggcctgctgaagaaccccttctag

SEQ ID NO: 105481 - DNA, 762 bp, synthetic construct
  misc_feature 1..762: note = Description of Artificial Sequence: Synthetic coding sequence
  source 1..762: mol_type = other DNA
atgttcagcctgagcagcaccgtgcagccccaggtgaccgtgcccctgagccacctgatcaacgccttccacacccccaagaacaccagcgtgagcctgagcggcgtgagcgtgagccagaaccagcacagagacgtggtgcccgagcacgaggcccccagcagcgagcccagcctgaacctgagagacctgggcctgagcgagctgaagatcggccagatcgaccagctggtggagaacctgctgcccggcttctgcaagggcaagaacatcagcagccactggcacaccagccacgtgagcgcccagagcttcttcgagaacaagtacgtgttcatccagagcagaggcttcaagaccctgaagagcagaaccagaagactgcagagcaccagcgagagactggccgagacccagaacatcgcccccagcttcgtgaagggcttcctgctgagagacagaggcagcgacgtggagagcctggacaagctgatgaagaccaagaacatccccgaggcccaccaggacgccttcaagaccggcttcgccgagggcttcctgaaggcccaggccctgacccagaagaccaacgacagcctgagaagaaccagactgatcctgttcgtgctgctgctgttcggcatctacggcctgctgaagaaccccttcctgagcgtgagattcagaaccaccaccggcctggacagcgccgtggaccccgtgcagatgaagaacgtgaccttcgagcacgtgaagggctag

SEQ ID NO: 105482 - DNA, 1551 bp, synthetic construct
  misc_feature 1..1551: note = Description of Artificial Sequence: Synthetic coding sequence
  source 1..1551: mol_type = other DNA
atgaagaccaagaacatccccgaggcccaccaggacgccttcaagaccggcttcgccgagggcttcctgaaggcccaggccctgacccagaagaccaacgacagcctgagaagaaccagactgatcctgttcgtgctgctgctgttcggcatctacggcctgctgaagaaccccttcctgagcgtgagattcagaaccaccaccggcctggacagcgccgtggaccccgtgcagatgaagaacgtgaccttcgagcacgtgaagggcgtggaggaggccaagcaggagctgcaggaggtggtggagttcctgaagaacccccagaagttcaccatcctgggcggcaagctgcccaagggcatcctgctggtgggcccccccggcaccggcaagaccctgctggccagagccgtggccggcgaggccgacgtgcccttctactacgccagcggcagcgagttcgacgagatgttcgtgggcgtgggcgccagcagaatcagaaacctgttcagagaggccaaggccaacgccccctgcgtgatcttcatcgacgagctggacagcgtgggcggcaagagaatcgagagccccatgcacccctacagcagacagaccatcaaccagctgctggccgagatggacggcttcaagcccaacgagggcgtgatcatcatcggcgccaccaacttccccgaggccctggacaacgccctgatcagacccggcagattcgacatgcaggtgaccgtgcccagacccgacgtgaagggcagaaccgagatcctgaagtggtacctgaacaagatcaagttcgaccagagcgtggaccccgagatcatcgccagaggcaccgtgggcttcagcggcgccgagctggagaacctggtgaaccaggccgccctgaaggccgccgtggacggcaaggagatggtgaccatgaaggagctggagttcagcaaggacaagatcctgatgggccccgagagaagaagcgtggagatcgacaacaagaacaagaccatcaccgcctaccacgagagcggccacgccatcatcgcctactacaccaaggacgccatgcccatcaacaaggccaccatcatgcccagaggccccaccctgggccacgtgagcctgctgcccgagaacgacagatggaacgagaccagagcccagctgctggcccagatggacgtgagcatgggcggcagagtggccgaggagctgatcttcggcaccgaccacatcaccaccggcgccagcagcgacttcgacaacgccaccaagatcgccaagagaatggtgaccaagttcggcatgagcgagaagctgggcgtgatgacctacagcgacaccggcaagctgagccccgagacccagagcgccatcgagcaggagatcagaatcctgctgagagacagctacgagagagccaagcacatcctgaagacccacgccaaggagcacaagaacctggccgaggccctgctgacctacgagaccatgcccaagagattcaagctgttcctgagaggcaagagctggaagtag

SEQ ID NO: 105483 - DNA, 1047 bp, synthetic construct
  misc_feature 1..1047: note = Description of Artificial Sequence: Synthetic coding sequence
  source 1..1047: mol_type = other DNA
atgttcggccccgccaagggcagacacttcggcgtgcaccccgcccccggcttccccggcggcgtgagccagcaggccgccggcaccaaggccggccccgccggcgcctggcccgtgggcagcagaaccgacaccatgtggagactgagatgcaaggccaaggacggcacccacgtgctgcagggcctgagcagcagaaccagagtgagagagctgcagggccagatcgccgccatcaccggcatcgcccccggcggccagagaatcctggtgggctacccccccgagtgcctggacctgagcaacggcgacaccatcctggaggacctgcccatccagagcggcgacatgctgatcatcgaggaggaccagaccagacccagaagcagccccgccttcaccaagagaggcgccagcagctacgtgagagagaccctgcccgtgctgaccagaaccgtggtgcccgccgacaacagctgcctgttcaccagcgtgtactacgtggtggagggcggcgtgctgaaccccgcctgcgcccccgagatgagaagactgatcgcccagatcgtggccagcgaccccgacttctacagcgaggccatcctgggcaagaccaaccaggagtactgcgactggatcaagagagacgacacctggggcggcgccatcgagatcagcatcctgagcaagttctaccagtgcgagatctgcgtggtggacacccagaccgtgagaatcgacagattcggcgaggacgccggctacaccaagagagtgctgctgatctacgacggcatccactacgaccccctgcagagaaacttccccgaccccgacaccccccccctgaccatcttcagcagcaacgacgacatcgtgctggtgcaggccctggagctggccgacgaggccagaagaagaagacagttcaccgacgtgaacagattcaccctgagatgcatggtgtgccagaagggcctgaccggccaggccgaggccagagagcacgccaaggagaccggccacaccaacttcggcgaggtgtag

SEQ ID NO: 105484 - DNA, 915 bp, synthetic construct
  misc_feature 1..915: note = Description of Artificial Sequence: Synthetic coding sequence
  source 1..915: mol_type = other DNA
atggagaccctgcacatcatctacagcgaggccaagagcttcaccgtggagggcctgagcagcagaaccagagtgagagagctgcagggccagatcgccgccatcaccggcatcgcccccggcggccagagaatcctggtgggctacccccccgagtgcctggacctgagcaacggcgacaccatcctggaggacctgcccatccagagcggcgacatgctgatcatcgaggaggaccagaccagacccagaagcagccccgccttcaccaagagaggcgccagcagctacgtgagagagaccctgcccgtgctgaccagaaccgtggtgcccgccgacaacagctgcctgttcaccagcgtgtactacgtggtggagggcggcgtgctgaaccccgcctgcgcccccgagatgagaagactgatcgcccagatcgtggccagcgaccccgacttctacagcgaggccatcctgggcaagaccaaccaggagtactgcgactggatcaagagagacgacacctggggcggcgccatcgagatcagcatcctgagcaagttctaccagtgcgagatctgcgtggtggacacccagaccgtgagaatcgacagattcggcgaggacgccggctacaccaagagagtgctgctgatctacgacggcatccactacgaccccctgcagagaaacttccccgaccccgacaccccccccctgaccatcttcagcagcaacgacgacatcgtgctggtgcaggccctggagctggccgacgaggccagaagaagaagacagttcaccgacgtgaacagattcaccctgagatgcatggtgtgccagaagggcctgaccggccaggccgaggccagagagcacgccaaggagaccggccacaccaacttcggcgaggtgtag

SEQ ID NO: 105485 - DNA, 915 bp, synthetic construct; identical to SEQ ID NO: 105484
  misc_feature 1..915: note = Description of Artificial Sequence: Synthetic coding sequence
  source 1..915: mol_type = other DNA

SEQ ID NO: 105486 - DNA, 840 bp, synthetic construct
  misc_feature 1..840: note = Description of Artificial Sequence: Synthetic coding sequence
  source 1..840: mol_type = other DNA
atgagccccgccagaagatgcagaggcatgagagccgccgtggccgccagcgtgggcctgagcgagggccccgccggcagcagaagcggcagactgttcagaccccccagccccgcccccgccgcccccggcgccagactgctgagactgcccggcagcggcgccgtgcaggccgccagccccgagagagccggctggaccgaggccctgagagccgccgtggccgagctgagagccggcgccgtggtggccgtgcccaccgacaccctgtacggcctggcctgcgccgccagctgcagcgccgccctgagagccgtgtacagactgaagggcagaagcgaggccaagcccctggccgtgtgcctgggcagagtggccgacgtgtacagatactgcagagtgagagtgcccgagggcctgctgaaggacctgctgcccggccccgtgaccctggtgatggagagaagcgaggagctgaacaaggacctgaaccccttcacccccctggtgggcatcagaatccccgaccacgccttcatgcaggacctggcccagatgttcgagggccccctggccctgaccagcgccaacctgagcagccaggccagcagcctgaacgtggaggagttccaggacctgtggccccagctgagcctggtgatcgacggcggccagatcggcgacggccagagccccgagtgcagactgggcagcaccgtggtggacctgagcgtgcccggcaagttcggcatcatcagacccggctgcgccctggagagcaccaccgccatcctgcagcagaagtacggcctgctgcccagccacgccagctacctgtag

SEQ ID NO: 105487 - DNA, 1740 bp, synthetic construct
  misc_feature 1..1740: note = Description of Artificial Sequence: Synthetic coding sequence
  source 1..1740: mol_type = other DNA
atgagcgccagcagcctgctggagcagagacccaagggccagggcaacaaggtgcagaacggcagcgtgcaccagaaggacggcctgaacgacgacgacttcgagccctacctgagcccccaggccagacccaacaacgcctacaccgccatgagcgacagctacctgcccagctactacagccccagcatcggcttcagctacagcctgggcgaggccgcctggagcaccggcggcgacaccgccatgccctacctgaccagctacggccagctgagcaacggcgagccccacttcctgcccgacgccatgttcggccagcccggcgccctgggcagcacccccttcctgggccagcacggcttcaacttcttccccagcggcatcgacttcagcgcctggggcaacaacagcagccagggccagagcacccagagcagcggctacagcagcaactacgcctacgcccccagcagcctgggcggcgccatgatcgacggccagagcgccttcgccaacgagaccctgaacaaggcccccggcatgaacaccatcgaccagggcatggccgccctgaagctgggcagcaccgaggtggccagcaacgtgcccaaggtggtgggcagcgccgtgggcagcggcagcatcaccagcaacatcgtggccagcaacagcctgccccccgccaccatcgccccccccaagcccgccagctgggccgacatcgccagcaagcccgccaagcagcagcccaagctgaagaccaagaacggcatcgccggcagcagcctgccccccccccccatcaagcacaacatggacatcggcacctgggacaacaagggccccgtggccaaggcccccagccaggccctggtgcagaacatcggccagcccacccagggcagcccccagcccgtgggccagcaggccaacaacagcccccccgtggcccaggccagcgtgggccagcagacccagcccctgccccccccccccccccagcccgcccagctgagcgtgcagcagcaggccgcccagcccaccagatgggtggcccccagaaacagaggcagcggcttcggccacaacggcgtggacggcaacggcgtgggccagagccaggccggcagcggcagcacccccagcgagccccaccccgtgctggagaagctgagaagcatcaacaactacaaccccaaggacttcgactggaacctgaagcacggcagagtgttcatcatcaagagctacagcgaggacgacatccacagaagcatcaagtacaacatctggtgcagcaccgagcacggcaacaagagactggacgccgcctacagaagcatgaacggcaagggccccgtgtacctgctgttcagcgtgaacggcagcggccacttctgcggcgtggccgagatgaagagcgccgtggactacaacacctgcgccggcgtgtggagccaggacaagtggaagggcagattcgacgtgagatggatcttcgtgaaggacgtgcccaacagccagctgagacacatcagactggagaacaacgagaacaagcccgtgaccaacagcagagacacccaggaggtgcccctggagaaggccaagcaggtgctgaagatcatcgccagctacaagcacaccaccagcatcttcgacgacttcagccactacgagaagagacaggaggaggaggagagcgtgaagaaggagagacagggcagaggcaagtag

SEQ ID NO: 105488 - DNA, 1710 bp, synthetic construct
  misc_feature 1..1710: note = Description of Artificial Sequence: Synthetic coding sequence
  source 1..1710: mol_type = other DNA
atgagcgccagcagcctgctggagcagagacccaagggccagggcaacaaggtgcagaacggcagcgtgcaccagaaggacggcctgaacgacgacgacttcgagccctacctgagcccccaggccagacccaacaacgcctacaccgccatgagcgacagctacctgcccagctactacagccccagcatcggcttcagctacagcctgggcgaggccgcctggagcaccggcggcgacaccgccatgccctacctgaccagctacggccagctgagcaacggcgagccccacttcctgcccgacgccatgttcggccagcccggcgccctgggcagcacccccttcctgggccagcacggcttcaacttcttccccagcggcatcgacttcagcgcctggggcaacaacagcagccagggccagagcacccagagcagcggctacagcagcaactacgcctacgcccccagcagcctgggcggcgccatgatcgacggccagagcgccttcgccaacgagaccctgaacaaggcccccggcatgaacaccatcgaccagggcatggccgccctgaagctgggcagcaccgaggtggccagcaacgtgcccaaggtggtgggcagcgccgtgggcagcggcagcatcaccagcaacatcgtggccagcaacagcctgccccccgccaccatcgccccccccaagcccgccagctgggccgacatcgccagcaagcccgccaagcagcagcccaagctgaagaccaagaacggcatcgccggcagcagcctgccccccccccccatcaagcacaacatggacatcggcacctgggacaacaagggccccgtggccaaggcccccagccaggccctggtgcagaacatcggccagcccacccagggcagcccccagcccgtgggccagcaggccaacaacagcccccccgtggcccaggccagcgtgggccagcagacccagcccctgccccccccccccccccagcccgcccagctgagcgtgcagcagcaggccgcccagcccaccagatgggtggcccccagaaacagaggcagcggcttcggccacaacggcgtggacggcaacggcgtgggccagagccaggccggcagcggcagcacccccagcgagccccaccccgtgctggagaagctgagaagcatcaacaactacaaccccaaggacttcgactggaacctgaagcacggcagagtgttcatcatcaagagctacagcgaggacgacatccacagaagcatcaagtacaacatctggtgcagcaccgagcacggcaacaagagactggacgccgcctacagaagcatgaacggcaagggccccgtgtacctgctgttcagcgtgaacggcagcggccacttctgcggcgtggccgagatgaagagcgccgtggactacaacacctgcgccggcgtgtggagccaggacaagtggaagggcagattcgacgtgagatggatcttcgtgaaggacgtgcccaacagccagctgagacacatcagactggagaacaacgagaacaagcccgtgaccaacagcagagacacccaggaggtgcccctggagaaggccaagcaggtgctgaagatcatcgccagctacaagcacaccaccagcatcttcgacgacttcagccactacgagaagagacagggcagaagaaagtgctag

SEQ ID NO: 105489 - DNA, 1590 bp, synthetic construct
  misc_feature 1..1590: note = Description of Artificial Sequence: Synthetic coding sequence
  source 1..1590: mol_type = other DNA
atgagcgacagctacctgcccagctactacagccccagcatcggcttcagctacagcctgggcgaggccgcctggagcaccggcggcgacaccgccatgccctacctgaccagctacggccagctgagcaacggcgagccccacttcctgcccgacgccatgttcggccagcccggcgccctgggcagcacccccttcctgggccagcacggcttcaacttcttccccagcggcatcgacttcagcgcctggggcaacaacagcagccagggccagagcacccagagcagcggctacagcagcaactacgcctacgcccccagcagcctgggcggcgccatgatcgacggccagagcgccttcgccaacgagaccctgaacaaggcccccggcatgaacaccatcgaccagggcatggccgccctgaagctgggcagcaccgaggtggccagcaacgtgcccaaggtggtgggcagcgccgtgggcagcggcagcatcaccagcaacatcgtggccagcaacagcctgccccccgccaccatcgccccccccaagcccgccagctgggccgacatcgccagcaagcccgccaagcagcagcccaagctgaagaccaagaacggcatcgccggcagcagcctgccccccccccccatcaagcacaacatggacatcggcacctgggacaacaagggccccgtggccaaggcccccagccaggccctggtgcagaacatcggccagcccacccagggcagcccccagcccgtgggccagcaggccaacaacagcccccccgtggcccaggccagcgtgggccagcagacccagcccctgccccccccccccccccagcccgcccagctgagcgtgcagcagcaggccgcccagcccaccagatgggtggcccccagaaacagaggcagcggcttcggccacaacggcgtggacggcaacggcgtgggccagagccaggccggcagcggcagcacccccagcgagccccaccccgtgctggagaagctgagaagcatcaacaactacaaccccaaggacttcgactggaacctgaagcacggcagagtgttcatcatcaagagctacagcgaggacgacatccacagaagcatcaagtacaacatctggtgcagcaccgagcacggcaacaagagactggacgccgcctacagaagcatgaacggcaagggccccgtgtacctgctgttcagcgtgaacggcagcggccacttctgcggcgtggccgagatgaagagcgccgtggactacaacacctgcgccggcgtgtggagccaggacaagtggaagggcagattcgacgtgagatggatcttcgtgaaggacgtgcccaacagccagctgagacacatcagactggagaacaacgagaacaagcccgtgaccaacagcagagacacccaggaggtgcccctggagaaggccaagcaggtgctgaagatcatcgccagctacaagcacaccaccagcatcttcgacgacttcagccactacgagaagagacaggaggaggaggagagcgtgaagaaggagagacagggcagaggcaagtag

SEQ ID NO: 105490 - DNA, 1740 bp, synthetic construct; identical to SEQ ID NO: 105487
  misc_feature 1..1740: note = Description of Artificial Sequence: Synthetic coding sequence
  source 1..1740: mol_type = other DNA

SEQ ID NO: 105491 - DNA, 1245 bp, synthetic construct
  misc_feature 1..1245: note = Description of Artificial Sequence: Synthetic coding sequence
  source 1..1245: mol_type = other DNA
atggccagcggcgacaccctgtacatcgccaccgacggcagcgagatgcccgccgagatcgtggagctgcacgagatcgaggtggagaccatccccgtggagaccatcgagaccaccgtggtgggcgaggaggaggaggaggacgacgacgacgaggacggcggcggcggcgaccacggcggcggcggcggccacggccacgccggccaccaccaccaccaccaccaccaccaccaccacccccccatgatcgccctgcagcccctggtgaccgacgaccccacccaggtgcaccaccaccaggaggtgatcctggtgcagaccagagaggaggtggtgggcggcgacgacagcgacggcctgagagccgaggacggcttcgaggaccagatcctgatccccgtgcccgcccccgccggcggcgacgacgactacatcgagcagaccctggtgaccgtggccgccgccggcaagagcggcggcggcggcagcagcagcagcggcggcggcagagtgaagaagggcggcggcaagaagagcggcaagaagagctacctgagcggcggcgccggcgccgccggcggcggcggcgccgaccccggcaacaagaagtgggagcagaagcaggtgcagatcaagaccctggagggcgagttcagcgtgaccatgtggagcagcgacgagaagaaggacatcgaccacgagaccgtggtggaggagcagatcatcggcgagaacagcccccccgactacagcgagtacatgaccggcaagaagctgccccccggcggcatccccggcatcgacctgagcgaccccaagcagctggccgagttcgccagaatgaagcccagaaagatcaaggaggacgacgcccccagaaccatcgcctgcccccacaagggctgcaccaagatgttcagagacaacagcgccatgagaaagcacctgcacacccacggccccagagtgcacgtgtgcgccgagtgcggcaaggccttcgtggagagcagcaagctgaagagacaccagctggtgcacaccggcgagaagcccttccagtgcaccttcgagggctgcggcaagagattcagcctggacttcaacctgagaacccacgtgagaatccacaccggcgacagaccctacgtgtgccccttcgacggctgcaacaagaagttcgcccagagcaccaacctgaagagccacatcctgacccacgccaaggccaagaacaaccagtag

SEQ ID NO: 105492 - DNA, 105 bp, synthetic construct
  misc_feature 1..105: note = Description of Artificial Sequence: Synthetic coding sequence
  source 1..105: mol_type = other DNA
atggccagcggcgacaccctgtacatcgccaccgacggcagcgagatgcccgccgagatcgtggagctgcacgagatcgaggtggagaccatccccgtggagtag

SEQ ID NO: 105493 - DNA, 1221 bp, synthetic construct
  misc_feature 1..1221: note = Description of Artificial Sequence: Synthetic coding sequence
  source 1..1221: mol_type = other DNA
atggcccaggcccccgccgaccccggcagagagggccacctggagcagagaatcctgcaggtgctgaccgaggccggcagccccgtgaagctggcccagctggtgaaggagtgccaggcccccaagagagagctgaaccaggtgctgtacagaatgaagaaggagctgaaggtgagcctgaccagccccgccacctggtgcctgggcggcaccgaccccgagggcgagggccccgccgagctggccctgagcagccccgaggaggacatctacagattcctgaaggacaacggcccccagagagccctggtgatcgcccaggccctgggcatgagaaccgccaaggacgtgaacagagacctgtacagaatgaagagcagacacctgctggacatggacgagcagagcaaggcctggaccatctacagacccgaggacagcggcagaagagccaagagcgccagcatcatctaccagcacaaccccatcaacatgatctgccagaacggccccaacagctggatcagcatcgccaacagcgaggccatccagatcggccacggcaacatcatcaccagacagaccgtgagcagagaggacggcagcgccggccccagacacctgcccagcatggcccccggcgacagcagcacctggggcaccctggtggacccctggggcccccaggacatccacatggagcagagcatcctgagaagagtgcagctgggccacagcaacgagatgagactgcacggcgtgcccagcgagggccccgcccacatcccccccggcagcccccccgtgagcgccaccgccgccggccccgaggccagcttcgaggccagaatccccagccccggcacccaccccgagggcgaggccgcccagagaatccacatgaagagctgcttcctggaggacgccaccatcggcaacagcaacaagatgagcatcagccccggcgtggccggccccggcggcgtggccggcagcggcgagggcgagcccggcgaggacgccggcagaagacccgccgacacccagagcagaagccacttccccagagacatcggccagcccatcacccccagccacagcaagctgacccccaagctggagaccatgaccctgggcaacagaagccacaaggccgccgagggcagccactacgtggacgaggccagccacgagggcagctggtggggcggcggcatctag

SEQ ID NO: 105494 - DNA, 1341 bp, synthetic construct
  misc_feature 1..1341: note = Description of Artificial Sequence: Synthetic coding sequence
  source 1..1341: mol_type = other DNA
atggcccaggcccccgccgaccccggcagagagggccacctggagcagagaatcctgcaggtgctgaccgaggccggcagccccgtgaagctggcccagctggtgaaggagtgccaggcccccaagagagagctgaaccaggtgctgtacagaatgaagaaggagctgaaggtgagcctgaccagccccgccacctggtgcctgggcggcaccgaccccgagggcgagggccccgccgagctggccctgagcagccccgccgagagaccccagcagcacgccgccaccatccccgagacccccggcccccagttcagccagcagagagaggaggacatctacagattcctgaaggacaacggcccccagagagccctggtgatcgcccaggccctgggcatgagaaccgccaaggacgtgaacagagacctgtacagaatgaagagcagacacctgctggacatggacgagcagagcaaggcctggaccatctacagacccgaggacagcggcagaagagccaagagcgccagcatcatctaccagcacaaccccatcaacatgatctgccagaacggccccaacagctggatcagcatcgccaacagcgaggccatccagatcggccacggcaacatcatcaccagacagaccgtgagcagagaggacggcagcgccggccccagacacctgcccagcatggcccccggcgacagcagcacctggggcaccctggtggacccctggggcccccaggacatccacatggagcagagcatcctgagaagagtgcagctgggccacagcaacgagatgagactgcacggcgtgcccagcgagggccccgcccacatcccccccggcagcccccccgtgagcgccaccgccgccggccccgaggccagcttcgaggccagaatccccagccccggcacccaccccgagggcgaggccgcccagagaatccacatgaagagctgcttcctggaggacgccaccatcggcaacagcaacaagatgagcatcagccccggcgtggccggccccggcggcgtggccggcagcggcgagggcgagcccggcgaggacgccgtggccgccttcaccgaggtgctgaaccccagcaagagcttcatgaagttcggcatcaacttcttccagacccccgtgaacgtggacagcctgaccagcagccacgagagccagatgttcctgaccgcctgcagactggtgatcttcagcagaagattcagcacctacttcgcccagatccacctgagaaaccacagcgtgctgcacctgtgcccccacaagatctacctgctgaagaacaagaagtag

SEQ ID NO: 105495 - DNA, 1143 bp, synthetic construct
  misc_feature 1..1143: note = Description of Artificial Sequence: Synthetic coding sequence
  source 1..1143: mol_type = other DNA
atggcccaggcccccgccgaccccggcagagagggccacctggagcagagaatcctgcaggtgctgaccgaggccggcagccccgtgaagctggcccagctggtgaaggagtgccaggcccccaagagagagctgaaccaggtgctgtacagaatgaagaaggagctgaaggtgagcctgaccagccccgccacctggtgcctgggcggcaccgaccccgagggcgagggccccgccgagctggccctgagcagccccgccgagagaccccagcagcacgccgccaccatccccgagacccccggcccccagttcagccagcagagagaggaggacatctacagattcctgaaggacaacggcccccagagagccctggtgatcgcccaggccctgggcatgagaaccgccaaggacgtgaacagagacctgtacagaatgaagagcagacacctgctggacatggacgagcagagcaaggcctggaccatctacagacccgaggacagcggcagaagagccaagagcgccagcatcatctaccagcacaaccccatcaacatgatctgccagaacggccccaacagctggatcagcatcgccaacagcgaggccatccagatcggccacggcaacatcatcaccagacagaccgtgagcagagaggacggcagcgccggccccagacacctgcccagcatggcccccggcgacagcagcacctggggcaccctggtggacccctggggcccccaggacatccacatggagcagagcatcctgagaagagtgcagctgggccacagcaacgagatgagactgcacggcgtgcccagcgagggccccgcccacatcccccccggcagcccccccgtgagcgccaccgccgccggccccgaggccagcttcgaggccagaatccccagccccggcacccaccccgagggcgaggccgcccagagaatccacatgaagagctgcttcctggaggacgccaccatcggcaacagcaacaagatgagcatcagccccggcgtggccggccccggcggcgtggccggcagcggcgagggcgagcccggcgaggacgccggcagaagacccgccgacacccaggccagaagcttcgacggccaggagtag

SEQ ID NO: 105496 - DNA, 1290 bp, synthetic construct
  misc_feature 1..1290: note = Description of Artificial Sequence: Synthetic coding sequence
  source 1..1290: mol_type = other DNA
atggcccaggcccccgccgaccccggcagagagggccacctggagcagagaatcctgcaggtgctgaccgaggccggcagccccgtgaagctggcccagctggtgaaggagtgccaggcccccaagagagagctgaaccaggtgctgtacagaatgaagaaggagctgaaggtgagcctgaccagccccgccacctggtgcctgggcggcaccgaccccgagggcgagggccccgccgagctggccctgagcagccccgccgagagaccccagcagcacgccgccaccatccccgagacccccggcccccagttcagccagcagagagaggaggacatctacagattcctgaaggacaacggcccccagagagccctggtgatcgcccaggccctgggcatgagaaccgccaaggacgtgaacagagacctgtacagaatgaagagcagacacctgctggacatggacgagcagagcaaggcctggaccatctacagacccgaggacagcggcagaagagccaagagcgccagcatcatctaccagcacaaccccatcaacatgatctgccagaacggccccaacagctggatcagcatcgccaacagcgaggccatccagatcggccacggcaacatcatcaccagacagaccgtgagcagagaggacggcagcgccggccccagacacctgcccagcatggcccccggcgacagcagcacctggggcaccctggtggacccctggggcccccaggacatccacatggagcagagcatcctgagaagagtgcagctgggccacagcaacgagatgagactgcacggcgtgcccagcgagggccccgcccacatcccccccggcagcccccccgtgagcgccaccgccgccggccccgaggccagcttcgaggccagaatccccagccccggcacccaccccgagggcgaggccgcccagagaatccacatgaagagctgcttcctggaggacgccaccatcggcaacagcaacaagatgagcatcagccccggcgtggccggccccggcggcgtggccggcagcggcgagggcgagcccggcgaggacgccggcagaagacccgccgacacccagagcagaagccacttccccagagacatcggccagcccatcacccccagccacagcaagctgacccccaagctggagaccatgaccctgggcaacagaagccacaaggccgccgagggcagccactacgtggacgaggccagccacgagggcagctggtggggcggcggcatctag

SEQ ID NO: 105497 - DNA, 747 bp, synthetic construct
  misc_feature 1..747: note = Description of Artificial Sequence: Synthetic coding sequence
  source 1..747: mol_type = other DNA
atggcccaggcccccgccgaccccggcagagagggccacctggagcagagaatcctgcaggtgctgaccgaggccggcagccccgtgaagctggcccagctggtgaaggagtgccaggcccccaagagagagctgaaccaggtgctgtacagaatgaagaaggagctgaaggtgagcctgaccagccccgccacctggtgcctgggcggcaccgaccccgagggcgagggccccgccgagctggccctgagcagccccgccgagagaccccagcagcacgccgccaccatccccgagacccccggcccccagttcagccagcagagagaggaggacatctacagattcctgaaggacaacggcccccagagagccctggtgatcgcccaggccctgggcatgagaaccgccaaggacgtgaacagagacctgtacagaatgaagagcagacacctgctggacatggacgagcagagcaaggcctggaccatctacagacccgaggacagcggcagaagagccaagagcgccagcatcatctaccagcacaaccccatcaacatgatctgccagaacggccccaacagctggatcagcatcgccaacagcgaggccatccagatcggccacggcaacatcatcaccagacagaccgtgagcagagaggacggcaagagccccaagagagcccagggcggcgacctgggcggcgagccccccgaccccctgggcggcggcaagggctag

SEQ ID NO: 105498 - DNA, 1065 bp, synthetic construct
  misc_feature 1..1065: note = Description of Artificial Sequence: Synthetic coding sequence
  source 1..1065: mol_type = other DNA
atggcccaggcccccgccgaccccggcagagaggccgagagaccccagcagcacgccgccaccatccccgagacccccggcccccagttcagccagcagagagaggaggacatctacagattcctgaaggacaacggcccccagagagccctggtgatcgcccaggccctgggcatgagaaccgccaaggacgtgaacagagacctgtacagaatgaagagcagacacctgctggacatggacgagcagagcaaggcctggaccatctacagacccgaggacagcggcagaagagccaagagcgccagcatcatctaccagcacaaccccatcaacatgatctgccagaacggccccaacagctggatcagcatcgccaacagcgaggccatccagatcggccacggcaacatcatcaccagacagaccgtgagcagagaggacggcagcgccggccccagacacctgcccagcatggcccccggcgacagcagcacctggggcaccctggtggacccctggggcccccaggacatccacatggagcagagcatcctgagaagagtgcagctgggccacagcaacgagatgagactgcacggcgtgcccagcgagggccccgcccacatcccccccggcagcccccccgtgagcgccaccgccgccggccccgaggccagcttcgaggccagaatccccagccccggcacccaccccgagggcgaggccgcccagagaatccacatgaagagctgcttcctggaggacgccaccatcggcaacagcaacaagatgagcatcagccccggcgtggccggccccggcggcgtggccggcagcggcgagggcgagcccggcgaggacgccggcagaagacccgccgacacccagagcagaagccacttccccagagacatcggccagcccatcacccccagccacagcaagctgacccccaagctggagaccatgaccctgggcaacagaagccacaaggccgccgagggcagccactacgtggacgaggccagccacgagggcagctggtggggcggcggcatctag

SEQ ID NO: 105499 - DNA, 1860 bp, synthetic construct
  misc_feature 1..1860: note = Description of Artificial Sequence: Synthetic coding sequence
  source 1..1860: mol_type = other DNA
atgcccgaccccgccgcccacctgcccttcttctacggcagcatcagcagagccgaggccgaggagcacctgaagctggccggcatggccgacggcctgttcctgctgagacagtgcctgagaagcctgggcggctacgtgctgagcctggtgcacgacgtgagattccaccacttccccatcgagagacagctgaacggcacctacgccatcgccggcggcaaggcccactgcggccccgccgagctgtgcgagttctacagcagagaccccgacggcctgccctgcaacctgagaaagccctgcaacagacccagcggcctggagccccagcccggcgtgttcgactgcctgagagacgccatggtgagagactacgtgagacagacctggaagctggagggcgaggccctggagcaggccatcatcagccaggccccccaggtggagaagctgatcgccaccaccgcccacgagagaatgccctggtaccacagcagcctgaccagagaggaggccgagagaaagctgtacagcggcgcccagaccgacggcaagttcctgctgagacccagaaaggagcagggcacctacgccctgagcctgatctacggcaagaccgtgtaccactacctgatcagccaggacaaggccggcaagtactgcatccccgagggcaccaagttcgacaccctgtggcagctggtggagtacctgaagctgaaggccgacggcctgatctactgcctgaaggaggcctgccccaacagcagcgccagcaacgccagcggcgccgccgcccccaccctgcccgcccaccccagcaccctgacccacccccagagaagaatcgacaccctgaacagcgacggctacacccccgagcccgccagaatcaccagccccgacaagcccagacccatgcccatggacaccagcgtgtacgagagcccctacagcgaccccgaggagctgaaggacaagaagctgttcctgaagagagacaacctgctgatcgccgacatcgagctgggctgcggcaacttcggcagcgtgagacagggcgtgtacagaatgagaaagaagcagatcgacgtggccatcaaggtgctgaagcagggcaccgagaaggccgacaccgaggagatgatgagagaggcccagatcatgcaccagctggacaacccctacatcgtgagactgatcggcgtgtgccaggccgaggccctgatgctggtgatggagatggccggcggcggccccctgcacaagttcctggtgggcaagagagaggagatccccgtgagcaacgtggccgagctgctgcaccaggtgagcatgggcatgaagtacctggaggagaagaacttcgtgcacagagacctggccgccagaaacgtgctgctggtgaacagacactacgccaagatcagcgacttcggcctgagcaaggccctgggcgccgacgacagctactacaccgccagaagcgccggcaagtggcccctgaagtggtacgcccccgagtgcatcaacttcagaaagttcagcagcagaagcgacgtgtggagctacggcgtgaccatgtgggaggccctgagctacggccagaagccctacaagaagatgaagggccccgaggtgatggccttcatcgagcagggcaagagaatggagtgcccccccgagtgcccccccgagctgtacgccctgatgagcgactgctggatctacaagtgggaggacagacccgacttcctgaccgtggagcagagaatgagagcctgctactacagcctggccagcaaggtggagggcccccccggcagcacccagaaggccgaggccgcctgcgcctag

SEQ ID NO: 105500 - DNA, 1482 bp, synthetic construct
  misc_feature 1..1482: note = Description of Artificial Sequence: Synthetic coding sequence
  source 1..1482: mol_type = other DNA
atgagactgggccccagatggaagggcgaggccctggagcaggccatcatcagccaggccccccaggtggagaagctgatcgccaccaccgcccacgagagaatgccctggtaccacagcagcctgaccagagaggaggccgagagaaagctgtacagcggcgcccagaccgacggcaagttcctgctgagacccagaaaggagcagggcacctacgccctgagcctgatctacggcaagaccgtgtaccactacctgatcagccaggacaaggccggcaagtactgcatccccgagggcaccaagttcgacaccctgtggcagctggtggagtacctgaagctgaaggccgacggcctgatctactgcctgaaggaggcctgccccaacagcagcgccagcaacgccagcggcgccgccgcccccaccctgcccgcccaccccagcaccctgacccacccccagagaagaatcgacaccctgaacagcgacggctacacccccgagcccgccagaatcaccagccccgacaagcccagacccatgcccatggacaccagcgtgtacgagagcccctacagcgaccccgaggagctgaaggacaagaagctgttcctgaagagagacaacctgctgatcgccgacatcgagctgggctgcggcaacttcggcagcgtgagacagggcgtgtacagaatgagaaagaagcagatcgacgtggccatcaaggtgctgaagcagggcaccgagaaggccgacaccgaggagatgatgagagaggcccagatcatgcaccagctggacaacccctacatcgtgagactgatcggcgtgtgccaggccgaggccctgatgctggtgatggagatggccggcggcggccccctgcacaagttcctggtgggcaagagagaggagatccccgtgagcaacgtggccgagctgctgcaccaggtgagcatgggcatgaagtacctggaggagaagaacttcgtgcacagagacctggccgccagaaacgtgctgctggtgaacagacactacgccaagatcagcgacttcggcctgagcaaggccctgggcgccgacgacagctactacaccgccagaagcgccggcaagtggcccctgaagtggtacgcccccgagtgcatcaacttcagaaagttcagcagcagaagcgacgtgtggagctacggcgtgaccatgtgggaggccctgagctacggccagaagccctacaagaagatgaagggccccgaggtgatggccttcatcgagcagggcaagagaatggagtgcccccccgagtgcccccccgagctgtacgccctgatgagcgactgctggatctacaagtgggaggacagacccgacttcctgaccgtggagcagagaatgagagcctgctactacagcctggccagcaaggtggagggcccccccggcagcacccagaaggccgaggccgcctgcgcctag

SEQ ID NO: 105501 - DNA, 939 bp, synthetic construct
  misc_feature 1..939: note = Description of Artificial Sequence: Synthetic coding sequence
  source 1..939: mol_type = other DNA
atgcccatggacaccagcgtgtacgagagcccctacagcgaccccgaggagctgaaggacaagaagctgttcctgaagagagacaacctgctgatcgccgacatcgagctgggctgcggcaacttcggcagcgtgagacagggcgtgtacagaatgagaaagaagcagatcgacgtggccatcaaggtgctgaagcagggcaccgagaaggccgacaccgaggagatgatgagagaggcccagatcatgcaccagctggacaacccctacatcgtgagactgatcggcgtgtgccaggccgaggccctgatgctggtgatggagatggccggcggcggccccctgcacaagttcctggtgggcaagagagaggagatccccgtgagcaacgtggccgagctgctgcaccaggtgagcatgggcatgaagtacctggaggagaagaacttcgtgcacagagacctggccgccagaaacgtgctgctggtgaacagacactacgccaagatcagcgacttcggcctgagcaaggccctgggcgccgacgacagctactacaccgccagaagcgccggcaagtggcccctgaagtggtacgcccccgagtgcatcaacttcagaaagttcagcagcagaagcgacgtgtggagctacggcgtgaccatgtgggaggccctgagctacggccagaagccctacaagaagatgaagggccccgaggtgatggccttcatcgagcagggcaagagaatggagtgcccccccgagtgcccccccgagctgtacgccctgatgagcgactgctggatctacaagtgggaggacagacccgacttcctgaccgtggagcagagaatgagagcctgctactacagcctggccagcaaggtggagggcccccccggcagcacccagaaggccgaggccgcctgcgcctag

SEQ ID NO: 105502 - DNA, 1344 bp, synthetic construct
  misc_feature 1..1344: note = Description of Artificial Sequence: Synthetic coding sequence
  source 1..1344: mol_type = other DNA
atgctgctggacgccggcccccagtaccccgccatcggcgtgaccaccttcggcgccagcagacaccacagcgccggcgacgtggccgagagagacgtgggcctgggcatcaaccccttcgccgacggcatgggcgccttcaagctgaaccccagcagccacgagctggccagcgccggccagaccgccttcaccagccaggcccccggctacgccgccgccgccgccctgggccaccaccaccaccccggccacgtgggcagctacagcagcgccgccttcaacagcaccagagacttcctgttcagaaacagaggcttcggcgacgccgccgccgccgccagcgcccagcacagcctgttcgccgccagcgccggcggcttcggcggcccccacggccacaccgacgccgccggccacctgctgttccccggcctgcacgagcaggccgccggccacgccagccccaacgtggtgaacggccagatgagactgggcttcagcggcgacatgtaccccagacccgagcagtacggccaggtgaccagccccagaagcgagcactacgccgccccccagctgcacggctacggccccatgaacgtgaacatggccgcccaccacggcgccggcgccttcttcagatacatgagacagcccatcaagcaggagctgatctgcaagtggatcgagcccgagcagctggccaaccccaagaagagctgcaacaagaccttcagcaccatgcacgagctggtgacccacgtgaccgtggagcacgtgggcggccccgagcagagcaaccacatctgcttctgggaggagtgccccagagagggcaagcccttcaaggccaagtacaagctggtgaaccacatcagagtgcacaccggcgagaagcccttcccctgccccttccccggctgcggcaaggtgttcgccagaagcgagaacctgaagatccacaagagaacccacaccggcgagaagcccttcaagtgcgagttcgagggctgcgacagaagattcgccaacagcagcgacagaaagaagcacatgcacgtgcacaccagcgacaagccctacctgtgcaagatgtgcgacaagagctacacccaccccagcagcctgagaaagcacatgaaggtgcacgagagcagcagccagggcagccagcccagccccgccgccagcagcggctacgagagcagcaccccccccaccatcgtgagccccagcaccgacaaccccaccaccagcagcctgagccccagcagcagcgccgtgcaccacaccgccggccacagcgccctgagcagcaacttcaacgagtggtacgtgtag

SEQ ID NO: 105503 - DNA, 1599 bp, synthetic construct
  misc_feature 1..1599: note = Description of Artificial Sequence: Synthetic coding sequence
  source 1..1599: mol_type = other DNA
atgctgctggacgccggcccccagttccccgccatcggcgtgggcagcttcgccagacaccaccaccacagcgccgccgccgccgccgccgccgccgccgagatgcaggacagagagctgagcctggccgccgcccagaacggcttcgtggacagcgccgccgcccacatgggcgccttcaagctgaaccccggcgcccacgagctgagccccggccagagcagcgccttcaccagccagggccccggcgcctaccccggcagcgccgccgccgccgccgccgccgccgccctgggcccccacgccgcccacgtgggcagctacagcggcccccccttcaacagcaccagagacttcctgttcagaagcagaggcttcggcgacagcgcccccggcggcggccagcacggcctgttcggccccggcgccggcggcctgcaccacgcccacagcgacgcccagggccacctgctgttccccggcctgcccgagcagcacggcccccacggcagccagaacgtgctgaacggccagatgagactgggcctgcccggcgaggtgttcggcagaagcgagcagtacagacaggtggccagccccagaaccgacccctacagcgccgcccagctgcacaaccagtacggccccatgaacatgaacatgggcatgaacatggccgccgccgccgcccaccaccaccaccaccaccaccaccaccccggcgccttcttcagatacatgagacagcagtgcatcaagcaggagctgatctgcaagtggatcgaccccgagcagctgagcaaccccaagaagagctgcaacaagaccttcagcaccatgcacgagctggtgacccacgtgagcgtggagcacgtgggcggccccgagcagagcaaccacgtgtgcttctgggaggagtgccccagagagggcaagcccttcaaggccaagtacaagctggtgaaccacatcagagtgcacaccggcgagaagcccttcccctgccccttccccggctgcggcaaggtgttcgccagaagcgagaacctgaagatccacaagagaacccacaccggcgagaagcccttccagtgcgagttcgagggctgcgacagaagattcgccaacagcagcgacagaaagaagcacatgcacgtgcacaccagcgacaagccctacctgtgcaagatgtgcgacaagagctacacccaccccagcagcctgagaaagcacatgaaggtgcacgagagcagcccccagggcagcgagagcagccccgccgccagcagcggctacgagagcagcaccccccccggcctggtgagccccagcgccgagccccagagcagcagcaacctgagccccgccgccgccgccgccgccgccgccgccgccgccgccgccgccgccgtgagcgccgtgcacagaggcggcggcagcggcagcggcggcgccggcggcggcagcggcggcggcagcggcagcggcggcggcggcggcggcgccggcggcggcggcggcggcagcagcggcggcggcagcggcaccgccggcggccacagcggcctgagcagcaacttcaacgagtggtacgtgtag

SEQ ID NO: 105504 - DNA, 489 bp, synthetic construct
  misc_feature 1..489: note = Description of Artificial Sequence: Synthetic coding sequence
  source 1..489: mol_type = other DNA
ccccccccccccccccccccccccgccccccccccccccccccccctgaaccccaagaagagctgcaacaagaccttcagcaccatgcacgagctggtgacccacgtgagcgtggagcacgtgggcggccccgagcagagcaaccacgtgtgcttctgggaggagtgccccagagagggcaagcccttcaaggccaagtacaagctggtgaaccacatcagagtgcacaccggcgagaagcccttcccctgccccttccccggctgcggcaaggtgttcgccagaagcgagaacctgaagatccacaagagaacccacaccggcgagaagcccttccagtgcgagttcgagggctgcgacagaagattcgccaacagcagcgacagaaagaagcacatgcacgtgcacaccagcgacaagccctacctgtgcaagatgtgcgacaagagctacacccaccccagcagcctgagaaagcacatgaagtag

SEQ ID NO: 105505 - DNA, 783 bp, synthetic construct
  misc_feature 1..783: note = Description of Artificial Sequence: Synthetic coding sequence
  source 1..783: mol_type = other DNA
atgctgctggacgccggcccccagttccccgccatcggcgtgggcagcttcgccagacaccaccaccacagcgccgccgccgccgccgccgccgccgccgagatgcaggacagagagctgagcctggccgccgcccagaacggcttcgtggacagcgccgccgcccacatgggcgccttcaagctgaaccccggcgcccacgagctgagccccggccagagcagcgccttcaccagccagggccccggcgcctaccccggcagcgccgccgccgccgccgccgccgccgccctgggcccccacgccgcccacgtgggcagctacagcggcccccccttcaacagcaccagagacttcctgttcagaagcagaggcttcggcgacagcgcccccggcggcggccagcacggcctgttcggccccggcgccggcggcctgcaccacgcccacagcgacgcccagggccacctgctgttccccggcctgcccgagcagcacggcccccacggcagccagaacgtgctgaacggccagatgagactgggcctgcccggcgaggtgttcggcagaagcgagcagtacagacaggtggccagccccagaaccgacccctacagcgccgcccagctgcacaaccagtacggccccatgaacatgaacatgggcatgaacatggccgccgccgccgcccaccaccaccaccaccaccaccaccccgtgcccagcctgctgaccaactgcgtgcacagcggcctgctgctgagcccccccagatggttctag

SEQ ID NO: 105506 - DNA, 1404 bp, synthetic construct
  misc_feature 1..1404: note = Description of Artificial Sequence: Synthetic coding sequence
  source 1..1404: mol_type = other DNA
atgaccatgctgctggacggcggcccccagttccccggcctgggcgtgggcagcttcggcgcccccagacaccacgagatgcccaacagagagcccgccggcatgggcctgaaccccttcggcgacagcacccacgccgccgccgccgccgccgccgccgccgccttcaagctgagccccgccgccgcccacgacctgagcagcggccagagcagcgccttcaccccccagggcagcggctacgccaacgccctgggccaccaccaccaccaccaccaccaccaccaccacaccagccaggtgcccagctacggcggcgccgccagcgccgccttcaacagcaccagagagttcctgttcagacagagaagcagcggcctgagcgaggccgccagcggcggcggccagcacggcctgttcgccggcagcgccagcagcctgcacgcccccgccggcatccccgagccccccagctacctgctgttccccggcctgcacgagcagggcgccggccaccccagccccaccggccacgtggacaacaaccaggtgcacctgggcctgagaggcgagctgttcggcagagccgacccctacagacccgtggccagccccagaaccgacccctacgccgccggcgcccagttccccaactacagccccatgaacatgaacatgggcgtgaacgtggccgcccaccacggccccggcgccttcttcagatacatgagacagcccatcaagcaggagctgagctgcaagtggatcgacgaggcccagctgagcagacccaagaagagctgcgacagaaccttcagcaccatgcacgagctggtgacccacgtgaccatggagcacgtgggcggccccgagcagaacaaccacgtgtgctactgggaggagtgccccagagagggcaagagcttcaaggccaagtacaagctggtgaaccacatcagagtgcacaccggcgagaagcccttcccctgccccttccccggctgcggcaagatcttcgccagaagcgagaacctgaagatccacaagagaacccacaccggcgagaagcccttcaagtgcgagttcgagggctgcgacagaagattcgccaacagcagcgacagaaagaagcacatgcacgtgcacaccagcgacaagccctacatctgcaaggtgtgcgacaagagctacacccaccccagcagcctgagaaagcacatgaaggtgcacgagagccagggcagcgacagcagccccgccgccagcagcggctacgagagcagcaccccccccgccatcgccagcgccaacagcaaggacaccaccaagacccccagcgccgtgcagaccagcaccagccacaaccccggcctgccccccaacttcaacgagtggtacgtgtag

SEQ ID NO: 105507 - DNA, 1374 bp, synthetic construct
  misc_feature 1..1374: note = Description of Artificial Sequence: Synthetic coding sequence
  source 1..1374: mol_type = other DNA
atgaccatgctgctggacggcggcccccagttccccggcctgggcgtgggcagcttcggcgcccccagacaccacgagatgcccaacagagagcccgccggcatgggcctgaaccccttcggcgacagcacccacgccgccgccgccgccgccgccgccgccgccttcaagctgagccccgccgccgcccacgacctgagcagcggccagagcagcgccttcaccccccagggcagcggctacgccaacgccctgggccaccaccaccaccaccaccaccaccaccaccacaccagccaggtgcccagctacggcggcgccgccagcgccgccttcaacagcaccagagagttcctgttcagacagagaagcagcggcctgagcgaggccgccagcggcggcggccagcacggcctgttcgccggcagcgccagcagcctgcacgcccccgccggcatccccgagccccccagctacctgctgttccccggcctgcacgagcagggcgccggccaccccagccccaccggccacgtggacaacaaccaggtgcacctgggcctgagaggcgagctgttcggcagagccgacccctacagacccgtggccagccccagaaccgacccctacgccgccggcgcccagttccccaactacagccccatgaacatgaacatgggcgtgaacgtggccgcccaccacggccccggcgccttcttcagatacatgagacagcccatcaagcaggagctgagctgcaagtggatcgacgaggcccagctgagcagacccaagaagagctgcgacagaaccttcagcaccatgcacgagctggtgacccacgtgaccatggagcacgtgggcggccccgagcagaacaaccacgtgtgctactgggaggagtgccccagagagggcaagagcttcaaggccaagtacaagctggtgaaccacatcagagtgcacaccggcgagaagcccttcccctgccccttccccggctgcggcaagatcttcgccagaagcgagaacctgaagatccacaagagaacccacaccggcgagaagcccttcaagtgcgagttcgagggctgcgacagaagattcgccaacagcagcgacagaaagaagcacatgcacgtgcacaccagcgacaagccctacatctgcaaggtgtgcgacaagagctacacccaccccagcagcctgagaaagcacatgaagtgctgccccgcctggtaccccggccagagcctgatccccgacgaggagctggacaccgacgtgggcatgcagcagcccgccctgcacaacaccacctaccccaagtgcagagtgaacgccgagcccaccgtgcaggagatgatctactag

SEQ ID NO: 105508 - DNA, 1005 bp, synthetic construct
  misc_feature 1..1005: note = Description of Artificial Sequence: Synthetic coding sequence
  source 1..1005: mol_type = other DNA
atgagatacaagaccagcctggtgatgagaaagagactgagactgtacagaaacaccctgaaggagagcagcagcagcagcggccaccacggcccccagctgaccgccgccagcagccccagcgtgttccccggcctgcacgaggagcccccccaggccagccccagcagacccctgaacggcctgctgagactgggcctgcccggcgacatgtacgccagacccgagcccttcccccccggccccgccgccagaagcgacgccctggccgccgccgccgccctgcacggctacggcggcatgaacctgaccgtgaacctggccgccccccacggccccggcgccttcttcagatacatgagacagcccatcaagcaggagctgatctgcaagtggctggccgccgacggcaccgccacccccagcctgtgcagcaagaccttcagcaccatgcacgagctggtgacccacgtgaccgtggagcacgtgggcggccccgagcaggccaaccacatctgcttctgggaggagtgccccagacagggcaagcccttcaaggccaagtacaagctggtgaaccacatcagagtgcacaccggcgagaagcccttcccctgccccttccccggctgcggcaaggtgttcgccagaagcgagaacctgaagatccacaagagaacccacaccggcgagaagcccttcagatgcgagttcgagggctgcgagagaagattcgccaacagcagcgacagaaagaagcacagccacgtgcacaccagcgacaagccctacacctgcaaggtgagaggctgcgacaagtgctacacccaccccagcagcctgagaaagcacatgaaggtgcacggcagaagccccccccccagcagcggctacgacagcgccacccccagcgccctggtgagccccagcagcgactgcggccacaagagccaggtggccagcagcgccgccgtggccgccagaaccgccgacctgagcgagtag

SEQ ID NO: 105509 - DNA, 1119 bp, synthetic construct
  misc_feature 1..1119: note = Description of Artificial Sequence: Synthetic coding sequence
  source 1..1119: mol_type = other DNA
atgaacggcccctgccagagcctgagaaaggccgagggcctgctggagggctgcaccagcgccgtgaccgtgttcagaaagctgcccctggacagcaaggcccagagccagaagatgagatacaagaccagcctggtgatgagaaagagactgagactgtacagaaacaccctgaaggagagcagcagcagcagcggccaccacggcccccagctgaccgccgccagcagccccagcgtgttccccggcctgcacgaggagcccccccaggccagccccagcagacccctgaacggcctgctgagactgggcctgcccggcgacatgtacgccagacccgagcccttcccccccggccccgccgccagaagcgacgccctggccgccgccgccgccctgcacggctacggcggcatgaacctgaccgtgaacctggccgccccccacggccccggcgccttcttcagatacatgagacagcccatcaagcaggagctgatctgcaagtggctggccgccgacggcaccgccacccccagcctgtgcagcaagaccttcagcaccatgcacgagctggtgacccacgtgaccgtggagcacgtgggcggccccgagcaggccaaccacatctgcttctgggaggagtgccccagacagggcaagcccttcaaggccaagtacaagctggtgaaccacatcagagtgcacaccggcgagaagcccttcccctgccccttccccggctgcggcaaggtgttcgccagaagcgagaacctgaagatccacaagagaacccacaccggcgagaagcccttcagatgcgagttcgagggctgcgagagaagattcgccaacagcagcgacagaaagaagcacagccacgtgcacaccagcgacaagccctacacctgcaaggtgagaggctgcgacaagtgctacacccaccccagcagcctgagaaagcacatgaaggtgcacggcagaagccccccccccagcagcggctacgacagcgccacccccagcgccctggtgagccccagcagcgactgcggccacaagagccaggtggccagcagcgccgccgtggccgccagaaccgccgacctgagcgagtag

SEQ ID NO: 105510 - DNA, 690 bp, synthetic construct
  misc_feature 1..690: note = Description of Artificial Sequence: Synthetic coding sequence
  source 1..690: mol_type = other DNA
atgagatacaagaccagcctggtgatgagaaagagactgagactgtacagaaacaccctgaaggagagcagcagcagcagcggccaccacggcccccagctgaccgccgccagcagccccagcgtgttccccggcctgcacgaggagcccccccaggccagccccagcagacccctgaacggcctgctgagactgggcctgcccggcgacatgtacgccagacccgagcccttcccccccggccccgccgccagaagcgacgccctggccgccgccgccgccctgcacggctacggcggcatgaacctgaccgtgaacctggccgccccccacggccccggcgccttcttcagatacatgagacagcccatcaagcaggagctgatctgcaagtggctggccgccgacggcaccgccacccccagcctgtgcagcaagaccttcagcaccatgcacgagctggtgacccacgtgaccgtggagcacgtgggcggccccgagcaggccaaccacatctgcttctgggaggagtgccccagacagggcaagcccttcaaggccaagtacaagctggtgaaccacatcagagtgcacaccggcgagaagcccttcccctgccccttccccggctgcggcaaggtgttcgccagaagcgagaacctgaagatccacaagagaacccacacctag

SEQ ID NO: 105511 - DNA, 207 bp, synthetic construct
  misc_feature 1..207: note = Description of Artificial Sequence: Synthetic coding sequence
  source 1..207: mol_type = other DNA
atgagatacaagaccagcctggtgatgagaaagagactgagactgtacagaaacaccctgaaggagagcagcagcagcagcggccaccacggcccccagctgaccgccgccagcagccccagcgtgttccccggcctgcacgaggagcccccccaggccagccccagcagacccctgaacggcctgctgagactgggcctgccctag

SEQ ID NO: 105512 - DNA, 1005 bp, synthetic construct; identical to SEQ ID NO: 105508
  misc_feature 1..1005: note = Description of Artificial Sequence: Synthetic coding sequence
  source 1..1005: mol_type = other DNA

SEQ ID NO: 105513 - DNA, 1005 bp, synthetic construct; identical to SEQ ID NO: 105508
  misc_feature 1..1005: note = Description of Artificial Sequence: Synthetic coding sequence
  source 1..1005: mol_type = other DNA

SEQ ID NO: 105514 - DNA, 234 bp, synthetic construct
  misc_feature 1..234: note = Description of Artificial Sequence: Synthetic coding sequence
  source 1..234: mol_type = other DNA
atgagatacaagaccagcctggtgatgagaaagagactgagactgtacagaaacaccctgaaggagagcagcagcagcagcggccaccacggcccccagctgaccgccgccagcagccccagcgtgttccccggcctgcacgaggagcccccccaggccagccccagcagacccctgaacggcctgctgagactgggcctgcccggcgacatgtacgccagacccgagccctag

SEQ ID NO: 105515 - DNA, 1155 bp, synthetic construct
  misc_feature 1..1155: note = Description of Artificial Sequence: Synthetic coding sequence
  source 1..1155: mol_type = other DNA
atgccccccttctgcagaaacgccaagctgggcctgctgagcttcctgatctgcgccggcagaagcctgctgcccctgggcaagaacgccttctggctggagagaatcgagaacaacaacaccctgtgggagaaggcccagagccagaagatgagatacaagaccagcctggtgatgagaaagagactgagactgtacagaaacaccctgaaggagagcagcagcagcagcggccaccacggcccccagctgaccgccgccagcagccccagcgtgttccccggcctgcacgaggagcccccccaggccagccccagcagacccctgaacggcctgctgagactgggcctgcccggcgacatgtacgccagacccgagcccttcccccccggccccgccgccagaagcgacgccctggccgccgccgccgccctgcacggctacggcggcatgaacctgaccgtgaacctggccgccccccacggccccggcgccttcttcagatacatgagacagcccatcaagcaggagctgatctgcaagtggctggccgccgacggcaccgccacccccagcctgtgcagcaagaccttcagcaccatgcacgagctggtgacccacgtgaccgtggagcacgtgggcggccccgagcaggccaaccacatctgcttctgggaggagtgccccagacagggcaagcccttcaaggccaagtacaagctggtgaaccacatcagagtgcacaccggcgagaagcccttcccctgccccttccccggctgcggcaaggtgttcgccagaagcgagaacctgaagatccacaagagaacccacaccggcgagaagcccttcagatgcgagttcgagggctgcgagagaagattcgccaacagcagcgacagaaagaagcacagccacgtgcacaccagcgacaagccctacacctgcaaggtgagaggctgcgacaagtgctacacccaccccagcagcctgagaaagcacatgaaggtgcacggcagaagccccccccccagcagcggctacgacagcgccacccccagcgccctggtgagccccagcagcgactgcggccacaagagccaggtggccagcagcgccgccgtggccgccagaaccgccgacctgagcgagtag

SEQ ID NO: 105516 - DNA, 684 bp, synthetic construct
  misc_feature 1..684: note = Description of Artificial Sequence: Synthetic coding sequence
  source 1..684: mol_type = other DNA
atgggcggcaagcagagcaccgccgccagaagcagaggccccttccccggcgtgagcaccgacgacagcgccgtgcccccccccggcggcgccccccacttcggccactacagaaccggcggcggcgccatgggcctgagaagcagaagcgtgagcagcgtggccggcatgggcatggaccccagcaccgccggcggcgtgcccttcggcctgtacacccccgccagcagaggcaccggcgacagcgagagagcccccggcggcggcggcagcgccagcgacagcacctacgcccacggcaacggctaccaggagaccggcggcggccaccacagagacggcatgctgtacctgggcagcagagccagcctggccgacgccctgcccctgcacatcgcccccagatggttcagcagccacagcggcttcaagtgccccatctgcagcaagagcgtggccagcgacgagatggagatgcacttcatcatgtgcctgagcaagcccagactgagctacaacgacgacgtgctgaccaaggacgccggcgagtgcgtgatctgcctggaggagctgctgcagggcgacaccatcgccagactgccctgcctgtgcatctaccacaagagctgcatcgacagctggttcgaggtgaacagaagctgccccgagcaccccgccgactag

SEQ ID NO: 105517 - DNA, 543 bp, synthetic construct
  misc_feature 1..543: note = Description of Artificial Sequence: Synthetic coding sequence
  source 1..543: mol_type = other DNA
cagagaggcgtgcccgccgccggcacccccagcagccccagactgctggtgagcagaagcctgggcggcgccgtgggcagcgtggccagcggcgccagagccgcccagagccccttcagcatccccaacagcagcagcggcccctacggcagccaggacagcgtgcacagcagccccgaggacggcggcggcggcagagacagacccgtgggcggcagccccggcggccccagactggtgatcggcagcctgcccgcccacctgagcccccacatgttcggcggcttcaagtgccccgtgtgcagcaagttcgtgagcagcgacgagatggacctgcacctggtgatgtgcctgaccaagcccagaatcacctacaacgaggacgtgctgagcaaggacgccggcgagtgcgccatctgcctggaggagctgcagcagggcgacaccatcgccagactgccctgcctgtgcatctaccacaagggctgcatcgacgagtggttcgaggtgaacagaagctgccccgagcaccccagcgactag

SEQ ID NO: 105518 - DNA, 729 bp, synthetic construct
  misc_feature 1..729: note = Description of Artificial Sequence: Synthetic coding sequence
  source 1..729: mol_type = other DNA
atgggcgccaagcagagcggccccgccgccgccaacggcagaaccagagcctacagcggcagcgacctgcccagcagcagcagcggcggcgccaacggcaccgccggcggcggcggcggcgccagagccgccgccgccggcagattccccgcccaggtgcccagcgcccaccagcccagcgccagcggcggcgccgccgccgccgccgccgcccccgccgcccccgccgcccccagaagcagaagcctgggcggcgccgtgggcagcgtggccagcggcgccagagccgcccagagccccttcagcatccccaacagcagcagcggcccctacggcagccaggacagcgtgcacagcagccccgaggacggcggcggcggcagagacagacccgtgggcggcagccccggcggccccagactggtgatcggcagcctgcccgcccacctgagcccccacatgttcggcggcttcaagtgccccgtgtgcagcaagttcgtgagcagcgacgagatggacctgcacctggtgatgtgcctgaccaagcccagaatcacctacaacgaggacgtgctgagcaaggacgccggcgagtgcgccatctgcctggaggagctgcagcagggcgacaccatcgccagactgccctgcctgtgcatctaccacaagggctgcatcgacgagtggttcgaggtgaacagaagctgccccgagcaccccagcgactag

SEQ ID NO: 105519 - DNA, 2511 bp, synthetic construct
  misc_feature 1..2511: note = Description of Artificial Sequence: Synthetic coding sequence
  source 1..2511: mol_type = other DNA
atgcaccccctgggcctgtgcaacaacaacgacgaggaggacctgtacgagtacggctgggtgggcgtggtgaagctggagcagcccgagctggaccccaagccctgcctgaccgtgctgggcaaggccaagagagccgtgcagagaggcgccaccgccgtgatcttcgacgtgagcgagaaccccgaggccatcgaccagctgaaccagggcagcgaggaccccctgaagagacccgtggtgtacgtgaagggcgccgacgccatcaagctgatgaacatcgtgaacaagcagaaggtggccagagccagaatccagcacagaccccccagacagcccaccgagtacttcgacatgggcatcttcctggccttcttcgtggtggtgagcctggtgtgcctgatcctgctggtgaagatcaagctgaagcagagaagaagccagaacagcatgaacagactggccgtgcaggccctggagaagatggagaccagaaagttcaacagcaagagcaagggcagaagagagggcagctgcggcgccctggacaccctgagcagcagcagcaccagcgactgcgccatctgcctggagaagtacatcgacggcgaggagctgagagtgatcccctgcacccacagattccacagaaagtgcgtggacccctggctgctgcagcaccacacctgcccccactgcagacacaacatcatcgagcagaagggcaaccccagcgccgtgtgcgtggagaccagcaacctgagcagaggcagacagcagagagtgaccctgcccgtgcactaccccggcagagtgcacagaaccaacgccatccccgcctaccccaccagaaccagcatggacagccacggcaaccccgtgaccctgctgaccatggacagacacggcgagcagagcctgtacagcccccagacccccgcctacatcagaagctacccccccctgcacctggaccacagcctggccgcccacagatgcggcctggagcacagagcctacagccccgcccaccccttcagaagacccaagctgagcggcagaagcttcagcaaggccgcctgcttcagccagtacgagaccatgtaccagcactactacttccagggcctgagctaccccgagcaggagggccagagcccccccagcctggcccccagaggccccgccagagccttcccccccagcggcagcggcagcctgctgttccccaccgtggtgcacgtggccccccccagccacctggagagcggcagcaccagcagcttcagctgctaccacggccacagaagcgtgtgcagcggctacctggccgactgccccggcagcgacagcagcagcagcagcagcagcggccagtgccactgcagcagcagcgacagcgtggtggactgcaccgaggtgagcaaccagggcgtgtacggcagctgcagcaccttcagaagcagcctgagcagcgactacgaccccttcatctacagaagcagaagcccctgcagagccagcgaggccggcggcagcggcagcagcggcagaggccccgccctgtgcttcgagggcagccccccccccgaggagctgcccgccgtgcacagccacggcgccggcagaggcgagccctggcccggccccgccagccccagcggcgaccaggtgagcacctgcagcctggagatgaactacagcagcaacagcagcctggagcacagaggccccaacagcagcaccagcgaggtgggcctggaggccagccccggcgccgcccccgacctgagaagaacctggaagggcggccacgagctgcccagctgcgcctgctgctgcgagccccagcccagccccgccggccccagcgccggcgccgccggcagcagcaccctgttcctgggcccccacctgtacgagggcagcggccccgccggcggcgagccccagagcggcagcagccagggcctgtacggcctgcaccccgaccacctgcccagaaccgacggcgtgaagtacgagggcctgccctgctgcttctacgaggagaagcaggtggccagaggcggcggcggcggcagcggctgctacaccgaggactacagcgtgagcgtgcagtacaccctgaccgaggagcccccccccggctgctaccccggcgccagagacctgagccagagaatccccatcatccccgaggacgtggactgcgacctgggcctgcccagcgactgccagggcacccacagcctgggcagctggggcggcaccagaggccccgacacccccagaccccacagaggcctgggcgccaccagagaggaggagagagccctgtgctgccaggccagagccctgctgagacccggctgcccccccgaggaggccggcgccgtgagagccaacttccccagcgccctgcaggacacccaggagagcagcaccaccgccaccgaggccgccggccccagaagccacagcgccgacagcagcagccccggcgcctag

SEQ ID NO: 105520 - DNA, 2511 bp, synthetic construct; identical to SEQ ID NO: 105519
  misc_feature 1..2511: note = Description of Artificial Sequence: Synthetic coding sequence
  source 1..2511: mol_type = other DNA

SEQ ID NO: 105521 - DNA, 2511 bp, synthetic construct; identical to SEQ ID NO: 105519
  misc_feature 1..2511: note = Description of Artificial Sequence: Synthetic coding sequence
  source 1..2511: mol_type = other DNA

SEQ ID NO: 105522 - DNA, 1932 bp, synthetic construct
  misc_feature 1..1932: note = Description of Artificial Sequence: Synthetic coding sequence
  source 1..1932: mol_type = other DNA
gtgcccagcgtgtggagaagcaccctgatggagagaagctgcggcagcagccccgtgctgaccggcttcaccggcagcgcctggacccccctgctgcagcaccacacctgcccccactgcagacacaacatcatcgagcagaagggcaaccccagcgccgtgtgcgtggagaccagcaacctgagcagaggcagacagcagagagtgaccctgcccgtgcactaccccggcagagtgcacagaaccaacgccatccccgcctaccccaccagaaccagcatggacagccacggcaaccccgtgaccctgctgaccatggacagacacggcgagcagagcctgtacagcccccagacccccgcctacatcagaagctacccccccctgcacctggaccacagcctggccgcccacagatgcggcctggagcacagagcctacagccccgcccaccccttcagaagacccaagctgagcggcagaagcttcagcaaggccgcctgcttcagccagtacgagaccatgtaccagcactactacttccagggcctgagctaccccgagcaggagggccagagcccccccagcctggcccccagaggccccgccagagccttcccccccagcggcagcggcagcctgctgttccccaccgtggtgcacgtggccccccccagccacctggagagcggcagcaccagcagcttcagctgctaccacggccacagaagcgtgtgcagcggctacctggccgactgccccggcagcgacagcagcagcagcagcagcagcggccagtgccactgcagcagcagcgacagcgtggtggactgcaccgaggtgagcaaccagggcgtgtacggcagctgcagcaccttcagaagcagcctgagcagcgactacgaccccttcatctacagaagcagaagcccctgcagagccagcgaggccggcggcagcggcagcagcggcagaggccccgccctgtgcttcgagggcagccccccccccgaggagctgcccgccgtgcacagccacggcgccggcagaggcgagccctggcccggccccgccagccccagcggcgaccaggtgagcacctgcagcctggagatgaactacagcagcaacagcagcctggagcacagaggccccaacagcagcaccagcgaggtgggcctggaggccagccccggcgccgcccccgacctgagaagaacctggaagggcggccacgagctgcccagctgcgcctgctgctgcgagccccagcccagccccgccggccccagcgccggcgccgccggcagcagcaccctgttcctgggcccccacctgtacgagggcagcggccccgccggcggcgagccccagagcggcagcagccagggcctgtacggcctgcaccccgaccacctgcccagaaccgacggcgtgaagtacgagggcctgccctgctgcttctacgaggagaagcaggtggccagaggcggcggcggcggcagcggctgctacaccgaggactacagcgtgagcgtgcagtacaccctgaccgaggagcccccccccggctgctaccccggcgccagagacctgagccagagaatccccatcatccccgaggacgtggactgcgacctgggcctgcccagcgactgccagggcacccacagcctgggcagctggggcggcaccagaggccccgacacccccagaccccacagaggcctgggcgccaccagagaggaggagagagccctgtgctgccaggccagagccctgctgagacccggctgcccccccgaggaggccggcgccgtgagagccaacttccccagcgccctgcaggacacccaggagagcagcaccaccgccaccgaggccgccggccccagaagccacagcgccgacagcagcagccccggcgcctag

SEQ ID NO: 105523 - DNA, 2811 bp, synthetic construct
  misc_feature 1..2811: note = Description of Artificial Sequence: Synthetic coding sequence
  source 1..2811: mol_type = other DNA
atgagacccagaagcggcggcagacccggcgccaccggcagaagaagaagaagactgagaagaagacccagaggcctgagatgcagcagactgcccccccccccccccctgcccctgctgctgggcctgctgctggccgccgccggccccggcgccgccagagccaaggagaccgccttcgtggaggtggtgctgttcgagagcagccccagcggcgactacaccacctacaccaccggcctgaccggcagattcagcagagccggcgccaccctgagcgccgagggcgagatcgtgcagatgcaccccctgggcctgtgcaacaacaacgacgaggaggacctgtacgagtacggctgggtgggcgtggtgaagctggagcagcccgagctggaccccaagccctgcctgaccgtgctgggcaaggccaagagagccgtgcagagaggcgccaccgccgtgatcttcgacgtgagcgagaaccccgaggccatcgaccagctgaaccagggcagcgaggaccccctgaagagacccgtggtgtacgtgaagggcgccgacgccatcaagctgatgaacatcgtgaacaagcagaaggtggccagagccagaatccagcacagaccccccagacagcccaccgagtacttcgacatgggcatcttcctggccttcttcgtggtggtgagcctggtgtgcctgatcctgctggtgaagatcaagctgaagcagagaagaagccagaacagcatgaacagactggccgtgcaggccctggagaagatggagaccagaaagttcaacagcaagagcaagggcagaagagagggcagctgcggcgccctggacaccctgagcagcagcagcaccagcgactgcgccatctgcctggagaagtacatcgacggcgaggagctgagagtgatcccctgcacccacagattccacagaaagtgcgtggacccctggctgctgcagcaccacacctgcccccactgcagacacaacatcatcgagcagaagggcaaccccagcgccgtgtgcgtggagaccagcaacctgagcagaggcagacagcagagagtgaccctgcccgtgcactaccccggcagagtgcacagaaccaacgccatccccgcctaccccaccagaaccagcatggacagccacggcaaccccgtgaccctgctgaccatggacagacacggcgagcagagcctgtacagcccccagacccccgcctacatcagaagctacccccccctgcacctggaccacagcctggccgcccacagatgcggcctggagcacagagcctacagccccgcccaccccttcagaagacccaagctgagcggcagaagcttcagcaaggccgcctgcttcagccagtacgagaccatgtaccagcactactacttccagggcctgagctaccccgagcaggagggccagagcccccccagcctggcccccagaggccccgccagagccttcccccccagcggcagcggcagcctgctgttccccaccgtggtgcacgtggccccccccagccacctggagagcggcagcaccagcagcttcagctgctaccacggccacagaagcgtgtgcagcggctacctggccgactgccccggcagcgacagcagcagcagcagcagcagcggccagtgccactgcagcagcagcgacagcgtggtggactgcaccgaggtgagcaaccagggcgtgtacggcagctgcagcaccttcagaagcagcctgagcagcgactacgaccccttcatctacagaagcagaagcccctgcagagccagcgaggccggcggcagcggcagcagcggcagaggccccgccctgtgcttcgagggcagccccccccccgaggagctgcccgccgtgcacagccacggcgccggcagaggcgagccctggcccggccccgccagccccagcggcgaccaggtgagcacctgcagcctggagatgaactacagcagcaacagcagcctggagcacagaggccccaacagcagcaccagcgaggtgggcctggaggccagccccggcgccgcccccgacctgagaagaacctggaagggcggccacgagctgcccagctgcgcctgctgctgcgagccccagcccagccccgccggccccagcgccggcgccgccggcagcagcaccctgttcctgggcccccacctgtacgagggcagcggccccgccggcggcgagccccagagcggcagcagccagggcctgtacggcctgcaccccgaccacctgcccagaaccgacggcgtgaagtacgagggcctgccctgctgcttctacgaggagaagcaggtggccagaggcggcggcggcggcagcggctgctacaccgaggactacagcgtgagcgtgcagtacaccctgaccgaggagcccccccccggctgctaccccggcgccagagacctgagccagagaatccccatcatccccgaggacgtggactgcgacctgggcctgcccagcgactgccagggcacccacagcctgggcagctggggcggcaccagaggccccgacacccccagaccccacagaggcctgggcgccaccagagaggaggagagagccctgtgctgccaggccagagccctgctgagacccggctgcccccccgaggaggccggcgccgtgagagccaacttccccagcgccctgcaggacacccaggagagcagcaccaccgccaccgaggccgccggccccagaagccacagcgccgacagcagcagccccggcgcctag

SEQ ID NO: 105524 - DNA, 339 bp, synthetic construct
  misc_feature 1..339: note = Description of Artificial Sequence: Synthetic coding sequence
  source 1..339: mol_type = other DNA
atgagctaccccgtgaccagccagccccagtgcgccaccaccagctgctaccagacccagctgagcgactggcacaccggcctgaccgactgctgcaacgacatgcccgtgtgcctgtgcggcaccttcgcccccctgtgcctggcctgcagaatcagcgacgacttcggcgagtgctgctgcgccccctacctgcccggcggcctgcacagcatcagaaccggcatgagagagagataccacatccagggcagcgtgggccacgactgggccgccctgaccttctgcctgccctgcgccctgtgccagatggccagagagctgaagatcagagagtag

SEQ ID NO: 105525 - DNA, 1440 bp, synthetic construct
  misc_feature 1..1440: note = Description of Artificial Sequence: Synthetic coding sequence
  source 1..1440: mol_type = other DNA
atggccgccctggagaagatgaccttccccaagaagatgaccttccccgagaagcccagccacaagaagtacagagccgccctgaagaaggagaagagaaagaagagaagacaggagctggccagactgagagacagcggcctgagccaggaggaggaggaggacaccttcatcgaggagcagcagctggaggaggagaagctgctggagagagagagagagagactgcacgaggagtggctgctgagagagcagaaggcccaggaggagttcagaatcaagaaggagaaggaggaggccgccaagaagtggctggaggagcaggagagaaagctgaaggagcagtggaaggagcagcagagaaaggagagagaggaggaggagcagaagcagcaggagaagaaggagaaggaggaggccgtgcagaagatgctggaccaggccgagaacgacctggagaacagcaccacctggcagaaccccgagccccccgtggacttcagagtgatggagaaggacagagccaactgccccttctacagcaagaccggcgcctgcagattcggcgacagatgcagcagaaagcacaacttccccaccagcagccccaccctgctgatcaagagcatgttcaccaccttcggcatggagcagtgcagaagagacgactacgaccccgacgccagcctggagtacagcgaggaggagacctaccagcagttcctggacttctacgaggacgtgctgcccgagttcaagaacgtgggcaaggtgatccagttcaaggtgagctgcaacctggagccccacctgagaggcaacgtgtacgtgcagtaccagagcgaggaggagtgccaggccgccctgagcctgttcaacggcagatggtacgccggcagacagctgcagtgcgagttctgccccgtgaccagatggaagatggccatctgcggcctgttcgagatccagcagtgccccagaggcaagcactgcaacttcctgcacgtgttcagaaaccccaacaacgagttctgggaggccaacagagacatctacctgagcagcgaccagaccggcagcagcttcggcaagaacagcgagagaagagagaagatgggccaccacgaccactactacagcagacagagaggcagaagaaaccccagccccgaccacacctacaagagaaacggcgagagcgagagaaagaagagcagccacagaggcaagaagagccacaagagaaccagcaagagcagagagagacacaacagccccagcagaggcagaaacagacacagaagctgggaccagggcagaagaagccagagcagaagaagccacagaagcagaagccagagcagcagcagatgcagaagcagaggcagaagaaagagcggcaacagagacagaaccgtgcagagcccccagagcaagtag

SEQ ID NO: 105526 - DNA, 1449 bp, synthetic construct
  misc_feature 1..1449: note = Description of Artificial Sequence: Synthetic coding sequence
  source 1..1449: mol_type = other DNA
atggccgcccccgagaagatgaccttccccgagaagcccagccacaagaagtacagagccgccctgaagaaggagaagagaaagaagagaagacaggagctggccagactgagagacagcggcctgagccagaaggaggaggaggaggacaccttcatcgaggagcagcagctggaggaggagaagctgctggagagagagagacagagactgcacgaggagtggctgctgagagagcagaaggcccaggaggagttcagaatcaagaaggagaaggaggaggccgccaagaagagacaggaggagcaggagagaaagctgaaggagcagtgggaggagcagcagagaaaggagagagaggaggaggagcagaagagacaggagaagaaggagaaggaggaggccctgcagaagatgctggaccaggccgagaacgagctggagaacggcaccacctggcagaaccccgagccccccgtggacttcagagtgatggagaaggacagagccaactgccccttctacagcaagaccggcgcctgcagattcggcgacagatgcagcagaaagcacaacttccccaccagcagccccaccctgctgatcaagagcatgttcaccaccttcggcatggagcagtgcagaagagacgactacgaccccgacgccagcctggagtacagcgaggaggagacctaccagcagttcctggacttctacgaggacgtgctgcccgagttcaagaacgtgggcaaggtgatccagttcaaggtgagctgcaacctggagccccacctgagaggcaacgtgtacgtgcagtaccagagcgaggaggagtgccaggccgccctgagcctgttcaacggcagatggtacgccggcagacagctgcagtgcgagttctgccccgtgaccagatggaagatggccatctgcggcctgttcgagatccagcagtgccccagaggcaagcactgcaacttcctgcacgtgttcagaaaccccaacaacgagttctgggaggccaacagagacatctacctgagccccgacagaaccggcagcagcttcggcaagaacagcgagagaagagagagaatgggccaccacgacgactactacagcagactgagaggcagaagaaaccccagccccgaccacagctacaagagaaacggcgagagcgagagaaagagcagcagacacagaggcaagaagagccacaagagaaccagcaagagcagagagagacacaacagcagaagcagaggcagaaacagagacagaagcagagacagaagcagaggcagaggcagcagaagcagaagcagaagcagaagcagaagaagcagaagaagcagaagccagagcagcagcagaagcagaagcagaggcagaagaagaagcggcaacagagacagaaccgtgcagagccccaagagcaagtag

SEQ ID NO: 105527 - DNA, 444 bp, synthetic construct
  misc_feature 1..444: note = Description of Artificial Sequence: Synthetic coding sequence
  source 1..444: mol_type = other DNA
atggccgcccccgagaagatgaccttccccgagaagcccagccacaagaagtacagagccgccctgaagaaggagaagagaaagaagagaagacaggagctggccagactgagagacagcggcctgagccagaaggaggaggaggaggacaccttcatcgaggagcagcagctggaggaggagaagctgctggagagagagagactggagtgcagcggcgtgatcagcgcccacagaaacctgcacctgcccggcagccacgacagccccgccagcgccagcagagtggccggcatcaccggcacccacagacacacccagctgatcttcttctgcaccttcagcagagacggcgtgagcccctgctggcccggctggagcagaagcctggacctgatgatctgcccccccagaccccacaaggtgctgagactgcaggtgtag

SEQ ID NO: 105528 - DNA, 3438 bp, synthetic construct
  misc_feature 1..3438: note = Description of Artificial Sequence: Synthetic coding sequence
  source 1..3438: mol_type = other DNA
atgtgcaagtgctgcaacctgttcagccccaaccagagcgagctgctgagccacgtgagcgagaagcacatggaggagggcgtgaacgtggacgagatcatcatccccctgagacccctgagcacccccgagccccccaacagcagcaagaccggcgacgagttcctggtgatgaagagaaagagaggcagacccaagggcagcaccaagaagagcagcaccgaggaggagctggccgagaacatcgtgagccccaccgaggacagccccctggcccccgaggagggcaacagcctgccccccagcagcctggagtgcagcaagtgctgcagaaagttcagcaacaccagacagctgagaaagcacatctgcatcatcgtgctgaacctgggcgaggaggagggcgaggccggcaacgagagcgacctggagctggagaagaagtgcaaggaggacgacagagagaaggccagcaagagacccagaagccagaagaccgagaaggtgcagaagatcagcggcaaggaggccagacagctgagcggcgccaagaagcccatcatcagcgtggtgctgaccgcccacgaggccatccccggcgccaccaagatcgtgcccgtggaggccggcccccccgagaccggcgccaccaacagcgagaccaccagcgccgacctggtgcccagaagaggctaccaggagtacgccatccagcagaccccctacgagcagcccatgaagagcagcagactgggccccacccagctgaagatcttcacctgcgagtactgcaacaaggtgttcaagttcaagcacagcctgcaggcccacctgagaatccacaccaacgagaagccctacaagtgcccccagtgcagctacgccagcgccatcaaggccaacctgaacgtgcacctgagaaagcacaccggcgagaagttcgcctgcgactactgcagcttcacctgcctgagcaagggccacctgaaggtgcacatcgagagagtgcacaagaagatcaagcagcactgcagattctgcaagaagaagtacagcgacgtgaagaacctgatcaagcacatcagagacgcccacgacccccaggacaagaaggtgaaggaggccctggacgagctgtgcctgatgaccagagagggcaagagacagctgctgtacgactgccacatctgcgagagaaagttcaagaacgagctggacagagacagacacatgctggtgcacggcgacaagtggcccttcgcctgcgagctgtgcggccacggcgccaccaagtaccaggccctggagctgcacgtgagaaagcaccccttcgtgtacgtgtgcgccgtgtgcagaaagaagttcgtgagcagcatcagactgagaacccacatcaaggaggtgcacggcgccgcccaggaggccctggtgttcaccagcagcatcaaccagagcttctgcctgctggagcccggcggcgacatccagcaggaggccctgggcgaccagctgcagctggtggaggaggagttcgccctgcagggcgtgaacgccctgaaggaggaggcctgccccggcgacacccagctggaggagggcagaaaggagcccgaggcccccggcgagatgcccgcccccgccgtgcacctggccagcccccaggccgagagcaccgccctgcccccctgcgagctggagaccaccgtggtgagcagcagcgacctgcacagccaggaggtggtgagcgacgacttcctgctgaagaacgacaccagcagcgccgaggcccacgccgcccccgagaagccccccgacatgcagcacagaagcagcgtgcagacccagggcgaggtgatcaccctgctgctgagcaaggcccagagcgccggcagcgaccaggagagccacggcgcccagagccccctgggcgagggccagaacatggccgtgctgagcgccggcgaccccgaccccagcagatgcctgagaagcaaccccgccgaggccagcgacctgctgccccccgtggccggcggcggcgacaccatcacccaccagcccgacagctgcaaggccgcccccgagcacagaagcggcatcaccgccttcatgaaggtgctgaacagcctgcagaagaagcagatgaacaccagcctgtgcgagagaatcagaaaggtgtacggcgacctggagtgcgagtactgcggcaagctgttctggtaccaggtgcacttcgacatgcacgtgagaacccacaccagagagcacctgtactactgcagccagtgccactacagcagcatcaccaagaactgcctgaagagacacgtgatccagaagcacagcaacatcctgctgaagtgccccaccgacggctgcgactacagcacccccgacaagtacaagctgcaggcccacctgaaggtgcacaccgccctggacaagagaagctacagctgccccgtgtgcgagaagagcttcagcgaggacagactgatcaagagccacatcaagaccaaccaccccgaggtgagcatgagcaccatcagcgaggtgctgggcagaagagtgcagctgaagggcctgatcggcaagagagccatgaagtgcccctactgcgacttctacttcatgaagaacggcagcgacctgcagagacacatctgggcccacgagggcgtgaagcccttcaagtgcagcctgtgcgagtacgccaccagaagcaagagcaacctgaaggcccacatgaacagacacagcaccgagaagacccacctgtgcgacatgtgcggcaagaagttcaagagcaagggcaccctgaagagccacaagctgctgcacaccgccgacggcaagcagttcaagtgcaccgtgtgcgactacaccgccgcccagaagccccagctgctgagacacatggagcagcacgtgagcttcaagcccttcagatgcgcccactgccactacagctgcaacatcagcggcagcctgaagagacactacaacagaaagcaccccaacgaggagtacgccaacgtgggcaccggcgagctggccgccgaggtgctgatccagcagggcggcctgaagtgccccgtgtgcagcttcgtgtacggcaccaagtgggagttcaacagacacctgaagaacaagcacggcctgaaggtggtggagatcgacggcgaccccaagtgggaggtgaccgaggaggagcccagcagcaaccacaccgtgatgatccaggagaccgtgcagcaggccagcgtggagctggccgagcagcaccacctggtggtgagcagcgacgacgtggagggcatcgagaccgtgaccgtgtacacccagggcggcgaggccagcgagttcatcgtgtacgtgcaggaggccatgcagcccgtggaggagcaggccgtggagcagcccgcccaggagctgtag

SEQ ID NO: 105529 - DNA, 3546 bp, synthetic construct
  misc_feature 1..3546: note = Description of Artificial Sequence: Synthetic coding sequence
  source 1..3546: mol_type = other DNA
atggagaccagagccgccgagaacaccgccatcttcatgtgcaagtgctgcaacctgttcagccccaaccagagcgagctgctgagccacgtgagcgagaagcacatggaggagggcgtgaacgtggacgagatcatcatccccctgagacccctgagcacccccgagccccccaacagcagcaagaccggcgacgagttcctggtgatgaagagaaagagaggcagacccaagggcagcaccaagaagagcagcaccgaggaggagctggccgagaacatcgtgagccccaccgaggacagccccctggcccccgaggagggcaacagcctgccccccagcagcctggagtgcagcaagtgctgcagaaagttcagcaacaccagacagctgagaaagcacatctgcatcatcgtgctgaacctgggcgaggaggagggcgaggccggcgccaccaagatcgtgcccgtggaggccggcccccccgagaccggcgccaccaacagcgagaccaccagcgccgacctggtgcccagaagaggctaccaggagtacgccatccagcagaccccctacgagcagcccatgaagagcagcagactgggccccacccagctgaagatcttcacctgcgagtactgcaacaaggtgttcaagttcaagcacagcctgcaggcccacctgagaatccacaccaacgagaagccctacaagtgcccccagtgcagctacgccagcgccatcaaggccaacctgaacgtgcacctgagaaagcacaccggcgagaagttcgcctgcgactactgcagcttcacctgcctgagcaagggccacctgaaggtgcacatcgagagagtgcacaagaagatcaagcagcactgcagattctgcaagaagaagtacagcgacgtgaagaacctgatcaagcacatcagagacgcccacgacccccaggacaagaaggtgaaggaggccctggacgagctgtgcctgatgaccagagagggcaagagacagctgctgtacgactgccacatctgcgagagaaagttcaagaacgagctggacagagacagacacatgctggtgcacggcgacaagtggcccttcgcctgcgagctgtgcggccacggcgccaccaagtaccaggccctggagctgcacgtgagaaagcaccccttcgtgtacgtgtgcgccgtgtgcagaaagaagttcgtgagcagcatcagactgagaacccacatcaaggaggtgcacggcgccgcccaggaggccctggtgttcaccagcagcatcaaccagagcttctgcctgctggagcccggcggcgacatccagcaggaggccctgggcgaccagctgcagctggtggaggaggagttcgccctgcagggcgtgaacgccctgaaggaggaggcctgccccggcgacacccagctggaggagggcagaaaggagcccgaggcccccggcgagatgcccgcccccgccgtgcacctggccagcccccaggccgagagcaccgccctgcccccctgcgagctggagaccaccgtggtgagcagcagcgacctgcacagccaggaggtggtgagcgacgacttcctgctgaagaacgacaccagcagcgccgaggcccacgccgcccccgagaagccccccgacatgcagcacagaagcagcgtgcagacccagggcgaggtgatcaccctgctgctgagcaaggcccagagcgccggcagcgaccaggagagccacggcgcccagagccccctgggcgagggccagaacatggccgtgctgagcgccggcgaccccgaccccagcagatgcctgagaagcaaccccgccgaggccagcgacctgctgccccccgtggccggcggcggcgacaccatcacccaccagcccgacagctgcaaggccgcccccgagcacagaagcggcatcaccgccttcatgaaggtgctgaacagcctgcagaagaagcagatgaacaccagcctgtgcgagagaatcagaaaggtgtacggcgacctggagtgcgagtactgcggcaagctgttctggtaccaggtgcacttcgacatgcacgtgagaacccacaccagagagcacctgtactactgcagccagtgccactacagcagcatcaccaagaactgcctgaagagacacgtgatccagaagcacagcaacatcctgctgaagtgccccaccgacggctgcgactacagcacccccgacaagtacaagctgcaggcccacctgaaggtgcacaccgccctggacaagagaagctacagctgccccgtgtgcgagaagagcttcagcgaggacagactgatcaagagccacatcaagaccaaccaccccgaggtgagcatgagcaccatcagcgaggtgctgggcagaagagtgcagctgaagggcctgatcggcaagagagccatgaagtgcccctactgcgacttctacttcatgaagaacggcagcgacctgcagagacacatctgggcccacgagggcgtgaagcccttcaagtgcagcctgtgcgagtacgccaccagaagcaagagcaacctgaaggcccacatgaacagacacagcaccgagaagacccacctgtgcgacatgtgcggcaagaagttcaagagcaagggcaccctgaagagccacaagctgctgcacaccgccgacggcaagcagttcaagtgcaccgtgtgcgactacaccgccgcccagaagccccagctgctgagacacatggagcagcacgtgagcttcaagcccttcagatgcgcccactgccactacagctgcaacatcagcggcagcctgaagagacactacaacagaaagcaccccaacgaggagtacgccaacgtgggcaccggcgagctggccgccgaggtgctgatccagcagggcggcctgaagtgccccgtgtgcagcttcgtgtacggcaccaagtgggagttcaacagacacctgaagaacaagcacggcctgaaggtggtggagatcgacggcgaccccaagtgggagaccgccaccgaggcccccgaggagcccagcacccagtacctgcacatcaccgaggccgaggaggacgtgcagggcacccaggccgccgtggccgccctgcaggacctgagatacaccagcgagagcggcgacagactggaccccaccgccgtgaacatcctgcagcagatcatcgagctgggcgccgagacccacgacgccaccgccctggccagcgtggtggccatggcccccggcaccgtgaccgtggtgaagcaggtgaccgaggaggagcccagcagcaaccacaccgtgatgatccaggagaccgtgcagcaggccagcgtggagctggccgagcagcaccacctggtggtgagcagcgacgacgtggagggcatcgagaccgtgaccgtgtacacccagggcggcgaggccagcgagttcatcgtgtacgtgcaggaggccatgcagcccgtggaggagcaggccgtggagcagcccgcccaggagctgtag

SEQ ID NO: 105530 - DNA, 177 bp, synthetic construct
  misc_feature 1..177: note = Description of Artificial Sequence: Synthetic coding sequence
  source 1..177: mol_type = other DNA
atggagaccagagccgccggcctgctggagttcgccggcggccccctgcacaccctgttcgcctgggtgagccccgtggaggccgccgagcagcagagactgctgcccgtgcccgccagcggcagcttcgtgcccgagggccacctgcccgacgccagccagagcagccccgtgtag

SEQ ID NO: 105531 - DNA, 1653 bp, synthetic construct
  misc_feature 1..1653: note = Description of Artificial Sequence: Synthetic coding sequence
  source 1..1653: mol_type = other DNA
atggacctgaccaagatgggcatgatccagctgcagaaccccagccaccccaccggcctgctgtgcaaggccaaccagatgagactggccggcaccctgtgcgacgtggtgatcatggtggacagccaggagttccacgcccacagaaccgtgctggcctgcaccagcaagatgttcgagatcctgttccacagaaacagccagcactacaccctggacttcctgagccccaagaccttccagcagatcctggagtacgcctacaccgccaccctgcaggccaaggccgaggacctggacgacctgctgtacgccgccgagatcctggagatcgagtacctggaggagcagtgcctgaagatgctggagaccatccaggccagcgacgacaacgacaccgaggccaccatggccgacggcggcgccgaggaggaggaggacagaaaggccagatacctgaagaacatcttcatcagcaagcacagcagcgaggagagcggctacgccagcgtggccggccagagcctgcccggccccatggtggaccagagccccagcgtgagcaccagcttcggcctgagcgccatgagccccaccaaggccgccgtggacagcctgatgaccatcggccagagcctgctgcagggcaccctgcagccccccgccggccccgaggagcccaccctggccggcggcggcagacaccccggcgtggccgaggtgaagaccgagatgatgcaggtggacgaggtgcccagccagggcttcatccagagagagctgttcagcaagctgggcgagctggccgtgggcatgaagagcgagagcagaaccatcggcgagcagtgcagcgtgtgcggcgtggagctgcccgacaacgaggccgtggagcagcacagaaagctgcacagcggcatgaagacctacggctgcgagctgtgcggcaagagattcctggacagcctgagactgagaatgcacctgctggcccacagcgccggcgccaaggccttcgtgtgcgaccagtgcggcgcccagttcagcaaggaggacgccctggagacccacagacagacccacaccggcaccgacatggccgtgttctgcctgctgtgcggcaagagattccaggcccagagcgccctgcagcagcacatggaggtgcacgccggcgtgagaagctacatctgcagcgagtgcaacagaaccttccccagccacaccgccctgaagagacacctgagaagccacaccggcgaccacccctacgagtgcgagttctgcggcagctgcttcagagacgagagcaccctgaagagccacaagagaatccacaccggcgagaagccctacgagtgcaacggctgcggcaagaagttcagcctgaagcaccagctggagacccactacagagtgcacaccggcgagaagcccttcgagtgcaagctgtgccaccagagaagcagagactacagcgccatgatcaagcacctgagaacccacaacggcgccagcccctaccagtgcaccatctgcaccgagtactgccccagcctgagcagcatgcagaagcacatgaagggccacaagcccgaggagatcccccccgactggagaatcgagaagacctacctgtacctgtgctacgtgtag

SEQ ID NO: 105532 - DNA, 2022 bp, synthetic construct
  misc_feature 1..2022: note = Description of Artificial Sequence: Synthetic coding sequence
  source 1..2022: mol_type = other DNA
atggacctgaccaagatgggcatgatccagctgcagaaccccagccaccccaccggcctgctgtgcaaggccaaccagatgagactggccggcaccctgtgcgacgtggtgatcatggtggacagccaggagttccacgcccacagaaccgtgctggcctgcaccagcaagatgttcgagatcctgttccacagaaacagccagcactacaccctggacttcctgagccccaagaccttccagcagatcctggagtacgcctacaccgccaccctgcaggccaaggccgaggacctggacgacctgctgtacgccgccgagatcctggagatcgagtacctggaggagcagtgcctgaagatgctggagaccatccaggccagcgacgacaacgacaccgaggccaccatggccgacggcggcgccgaggaggaggaggacagaaaggccagatacctgaagaacatcttcatcagcaagcacagcagcgaggagagcggctacgccagcgtggccggccagagcctgcccggccccatggtggaccagagccccagcgtgagcaccagcttcggcctgagcgccatgagccccaccaaggccgccgtggacagcctgatgaccatcggccagagcctgctgcagggcaccctgcagccccccgccggccccgaggagcccaccctggccggcggcggcagacaccccggcgtggccgaggtgaagaccgagatgatgcaggtggacgaggtgcccagccaggacagccccggcgccgccgagagcagcatcagcggcggcatgggcgacaaggtggaggagagaggcaaggagggccccggcacccccaccagaagcagcgtgatcaccagcgccagagagctgcactacggcagagaggagagcgccgagcaggtgcccccccccgccgaggccggccaggcccccaccggcagacccgagcaccccgcccccccccccgagaagcacctgggcatctacagcgtgctgcccaaccacaaggccgacgccgtgctgagcatgcccagcagcgtgaccagcggcctgcacgtgcagcccgccctggccgtgagcatggacttcagcacctacggcggcctgctgccccagggcttcatccagagagagctgttcagcaagctgggcgagctggccgtgggcatgaagagcgagagcagaaccatcggcgagcagtgcagcgtgtgcggcgtggagctgcccgacaacgaggccgtggagcagcacagaaagctgcacagcggcatgaagacctacggctgcgagctgtgcggcaagagattcctggacagcctgagactgagaatgcacctgctggcccacagcgccggcgccaaggccttcgtgtgcgaccagtgcggcgcccagttcagcaaggaggacgccctggagacccacagacagacccacaccggcaccgacatggccgtgttctgcctgctgtgcggcaagagattccaggcccagagcgccctgcagcagcacatggaggtgcacgccggcgtgagaagctacatctgcagcgagtgcaacagaaccttccccagccacaccgccctgaagagacacctgagaagccacaccggcgaccacccctacgagtgcgagttctgcggcagctgcttcagagacgagagcaccctgaagagccacaagagaatccacaccggcgagaagccctacgagtgcaacggctgcggcaagaagttcagcctgaagcaccagctggagacccactacagagtgcacaccggcgagaagcccttcgagtgcaagctgtgccaccagagaagcagagactacagcgccatgatcaagcacctgagaacccacaacggcgccagcccctaccagtgcaccatctgcaccgagtactgccccagcctgagcagcatgcagaagcacatgaagggccacaagcccgaggagatcccccccgactggagaatcgagaagacctacctgtacctgtgctacgtgtag

SEQ ID NO: 105533 - DNA, 2022 bp, synthetic construct; identical to SEQ ID NO: 105532
  misc_feature 1..2022: note = Description of Artificial Sequence: Synthetic coding sequence
  source 1..2022: mol_type = other DNA

SEQ ID NO: 105534 - DNA, 447 bp, synthetic construct
  misc_feature 1..447: note = Description of Artificial Sequence: Synthetic coding sequence
  source 1..447: mol_type = other DNA
atggacctgaccaagatgggcatgatccagctgcagaaccccagccaccccaccggcctgctgtgcaaggccaaccagatgagactggccggcaccctgtgcgacgtggtgatcatggtggacagccaggagttccacgcccacagaaccgtgctggcctgcaccagcaagatgttcgagatcctgttccacagaaacagccagcactacaccctggacttcctgagccccaagaccttccagcagatcctggagtacgcctacaccgccaccctgcaggccaaggccgaggacctggacgacctgctgtacgccgccgagatcctggagatcgagtacctggaggagcagtgcctgaagatgctggagaccatccaggccagcgacgacaacgacaccgaggccaccatggccgacggcggcgccgaggaggaggaggacagatag

SEQ ID NO: 105535 - DNA, 348 bp, synthetic construct
  misc_feature 1..348: note = Description of Artificial Sequence: Synthetic coding sequence
  source 1..348: mol_type = other DNA
atggacctgaccaagatgggcatgatccagctgcagaaccccagccaccccaccggcctgctgtgcaaggccaaccagatgagactggccggcaccctgtgcgacgtggtgatcatggtggacagccaggagttccacgcccacagaaccgtgctggcctgcaccagcaagatgttcgagatcctgttccacagaaacagccagcactacaccctggacttcctgagccccaagaccttccagcagatcctggagtacgcctacaccgccaccctgcaggccaaggccgaggacctggacgacctgctgtacgccgccgagatcctggagatcgagtacctggagtag

SEQ ID NO: 105536 - DNA, 723 bp, synthetic construct
  misc_feature 1..723: note = Description of Artificial Sequence: Synthetic coding sequence
  source 1..723: mol_type = other DNA
gaggccctgcccgtgagactgctgagacccctgctgctgagaccccacttccaggacgccccccccggcgaccccagacacggccagggcgcccaggtgcccaccctgagacaggaggtgcagcccggcaacctgaagagacacctgagaatccacagcggcgagaagccctacgtgtgcatccactgccagagacagttcgccgaccccggcgccctgcagagacacgtgagaatccacaccggcgagaagccctgccagtgcgtgatgtgcggcaaggccttcacccaggccagcagcctgatcgcccacgtgagacagcacaccggcgagaagccctacgtgtgcgagagatgcggcaagagattcgtgcagagcagccagctggccaaccacatcagacaccacgacaacatcagaccccacaagtgcagcgtgtgcagcaaggccttcgtgaacgtgggcgacctgagcaagcacatcatcatccacaccggcgagaagccctacctgtgcgacaagtgcggcagaggcttcaacagagtggacaacctgagaagccacgtgaagaccgtgcaccagggcaaggccggcatcaagatcctggagcccgaggagggcagcgaggtgagcgtggtgaccgtggacgacatggtgaccctggccaccgaggccctggccgccaccgccgtgacccagctgaccgtggtgcccgtgggctag

SEQ ID NO: 105537 - DNA, 2433 bp, synthetic construct
  misc_feature 1..2433: note = Description of Artificial Sequence: Synthetic coding sequence
  source 1..2433: mol_type = other DNA
atggacttcccccagcacagccagcacgtgctggagcagctgaaccagcagagacagctgggcctgctgtgcgactgcaccttcgtggtggacggcgtgcacttcaaggcccacaaggccgtgctggccgcctgcagcgagtacttcaagatgctgttcgtggaccagaaggacgtggtgcacctggacatcagcaacgccgccggcctgggccaggtgctggagttcatgtacaccgccaagctgagcctgagccccgagaacgtggacgacgtgctggccgtggccaccttcctgcagatgcaggacatcatcaccgcctgccacgccctgaagagcctggccgagcccgccaccagccccggcggcaacgccgaggccctggccaccgagggcggcgacaagagagccaaggaggagaaggtggccaccagcaccctgagcagactggagcaggccggcagaagcacccccatcggccccagcagagacctgaaggaggagagaggcggccaggcccagagcgccgccagcggcgccgagcagaccgagaaggccgacgcccccagagagcccccccccgtggagctgaagcccgaccccaccagcggcatggccgccgccgaggccgaggccgccctgagcgagagcagcgagcaggagatggaggtggagcccgccagaaagggcgaggaggagcagaaggagcaggaggagcaggaggaggagggcgccggccccgccgaggtgaaggaggagggcagccagctggagaacggcgaggcccccgaggagaacgagaacgaggagagcgccggcaccgacagcggccaggagctgggcagcgaggccagaggcctgagaagcggcacctacggcgacagaaccgagagcaaggcctacggcagcgtgatccacaagtgcgaggactgcggcaaggagttcacccacaccggcaacttcaagagacacatcagaatccacaccggcgagaagcccttcagctgcagagagtgcagcaaggccttcagcgaccccgccgcctgcaaggcccacgagaagacccacagccccctgaagccctacggctgcgaggagtgcggcaagagctacagactgatcagcctgctgaacctgcacaagaagagacacagcggcgaggccagatacagatgcgaggactgcggcaagctgttcaccaccagcggcaacctgaagagacaccagctggtgcacagcggcgagaagccctaccagtgcgactactgcggcagaagcttcagcgaccccaccagcaagatgagacacctggagacccacgacaccgacaaggagcacaagtgcccccactgcgacaagaagttcaaccaggtgggcaacctgaaggcccacctgaagatccacatcgccgacggccccctgaagtgcagagagtgcggcaagcagttcaccaccagcggcaacctgaagagacacctgagaatccacagcggcgagaagccctacgtgtgcatccactgccagagacagttcgccgaccccggcgccctgcagagacacgtgagaatccacaccggcgagaagccctgccagtgcgtgatgtgcggcaaggccttcacccaggccagcagcctgatcgcccacgtgagacagcacaccggcgagaagccctacgtgtgcgagagatgcggcaagagattcgtgcagagcagccagctggccaaccacatcagacaccacgacaacatcagaccccacaagtgcagcgtgtgcagcaaggccttcgtgaacgtgggcgacctgagcaagcacatcatcatccacaccggcgagaagccctacctgtgcgacaagtgcggcagaggcttcaacagagtggacaacctgagaagccacgtgaagaccgtgcaccagggcaaggccggcatcaagatcctggagcccgaggagggcagcgaggtgagcgtggtgaccgtggacgacatggtgaccctggccaccgaggccctggccgccaccgccgtgacccagctgaccggccccgccaccctgcccgccgtggtgcccgtgggcgccgccgtgaccgccgacgagaccgaggtgctgaaggccgagatcagcaaggccgtgaagcaggtgcaggaggaggaccccaacacccacatcctgtacgcctgcgacagctgcggcgacaagttcctggacgccaacagcctggcccagcacgtgagaatccacaccgcccaggccctggtgatgttccagaccgacgccgacttctaccagcagtacggccccggcggcacctggcccgccggccaggtgctgcaggccggcgagctggtgttcagacccagagacggcgccgagggccagcccgccctggccgagaccagccccaccgcccccgagtgccccccccccgccgagtag

SEQ ID NO: 105538 - DNA, 2412 bp, synthetic construct
  misc_feature 1..2412: note = Description of Artificial Sequence: Synthetic coding sequence
  source 1..2412: mol_type = other DNA
atggacttcccccagcacagccagcacgtgctggagcagctgaaccagcagagacagctgggcctgctgtgcgactgcaccttcgtggtggacggcgtgcacttcaaggcccacaaggccgtgctggccgcctgcagcgagtacttcaagatgctgttcgtggaccagaaggacgtggtgcacctggacatcagcaacgccgccggcctgggccaggtgctggagttcatgtacaccgccaagctgagcctgagccccgagaacgtggacgacgtgctggccgtggccaccttcctgcagatgcaggacatcatcaccgcctgccacgccctgaagagcctggccgagcccgccaccagccccggcggcaacgccgaggccctggccaccgagggcggcgacaagagagccaaggaggagaaggtggccaccagcaccctgagcagactggagcaggccggcagaagcacccccatcggccccagcagagacctgaaggaggagagaggcggccaggcccagagcgccgccagcggcgccgagcagaccgagaaggccgacgcccccagagagcccccccccgtggagctgaagcccgaccccaccagcggcatggccgccgccgaggccgaggccgccctgagcgagagcagcgagcaggagatggaggtggagcccgccagaaagggcgaggaggagcagaaggagcaggaggagcaggaggaggagggcgccggccccgccgaggtgaaggaggagggcagccagctggagaacggcgaggcccccgaggagaacgagaacgaggagagcgccggcaccgacagcggccaggagctgggcagcgaggccagaggcctgagaagcggcacctacggcgacagaaccgagagcaaggcctacggcagcgtgatccacaagtgcgaggactgcggcaaggagttcacccacaccggcaacttcaagagacacatcagaatccacaccggcgagaagcccttcagctgcagagagtgcagcaaggccttcagcgaccccgccgcctgcaaggcccacgagaagacccacagccccctgaagccctacggctgcgaggagtgcggcaagagctacagactgatcagcctgctgaacctgcacaagaagagacacagcggcgaggccagatacagatgcgaggactgcggcaagctgttcaccaccagcggcaacctgaagagacaccagctggtgcacagcggcgagaagccctaccagtgcgactactgcggcagaagcttcagcgaccccaccagcaagatgagacacctggagacccacgacaccgacaaggagcacaagtgcccccactgcgacaagaagttcaaccaggtgggcaacctgaaggcccacctgaagatccacatcgccgacggccccctgaagtgcagagagtgcggcaagcagttcaccaccagcggcaacctgaagagacacctgagaatccacagcggcgagaagccctacgtgtgcatccactgccagagacagttcgccgaccccggcgccctgcagagacacgtgagaatccacaccggcgagaagccctgccagtgcgtgatgtgcggcaaggccttcacccaggccagcagcctgatcgcccacgtgagacagcacaccggcgagaagccctacgtgtgcgagagatgcggcaagagattcgtgcagagcagccagctggccaaccacatcagacaccacgacaacatcagaccccacaagtgcagcgtgtgcagcaaggccttcgtgaacgtgggcgacctgagcaagcacatcatcatccacaccggcgagaagccctacctgtgcgacaagtgcggcagaggcttcaacagagtggacaacctgagaagccacgtgaagaccgtgcaccagggcaaggccggcatcaagatcctggagcccgaggagggcagcgaggtgagcgtggtgaccgtggacgacatggtgaccctggccaccgaggccctggccgccaccgccgtgacccagctgaccgtggtgcccgtgggcgccgccgtgaccgccgacgagaccgaggtgctgaaggccgagatcagcaaggccgtgaagcaggtgcaggaggaggaccccaacacccacatcctgtacgcctgcgacagctgcggcgacaagttcctggacgccaacagcctggcccagcacgtgagaatccacaccgcccaggccctggtgatgttccagaccgacgccgacttctaccagcagtacggccccggcggcacctggcccgccggccaggtgctgcaggccggcgagctggtgttcagacccagagacggcgccgagggccagcccgccctggccgagaccagccccaccgcccccgagtgccccccccccgccgagtag

SEQ ID NO: 105539 - DNA, 633 bp, synthetic construct
  misc_feature 1..633: note = Description of Artificial Sequence: Synthetic coding sequence
  source 1..633: mol_type = other DNA
tgaagcaagcacatcatcatccacaccggcgagaagccctacctgtgcgacaagtgcggcagaggcttcaacagagtggacaacctgagaagccacgtgaagaccgtgcaccagggcaaggccggcatcaagatcctggagcccgaggagggcagcgaggtgagcgtggtgaccgtggacgacatggtgaccctggccaccgaggccctggccgccaccgccgtgacccagctgaccggccccgccaccctgcccgccgtggtgcccgtgggcgccgccgtgaccgccgacgagaccgaggtgctgaaggccgagatcagcaaggccgtgaagcaggtgcaggaggaggaccccaacacccacatcctgtacgcctgcgacagctgcggcgacaagttcctggacgccaacagcctggcccagcacgtgagaatccacaccgcccaggccctggtgatgttccagaccgacgccgacttctaccagcagtacggccccggcggcacctggcccgccggccaggtgctgcaggccggcgagctggtgttcagacccagagacggcgccgagggccagcccgccctggccgagaccagccccaccgcccccgagtgccccccccccgccgagtag

SEQ ID NO: 105540 - DNA, 726 bp, synthetic construct
  misc_feature 1..726: note = Description of Artificial Sequence: Synthetic coding sequence
  source 1..726: mol_type = other DNA
tgagaggccctgcccgtgagactgctgagacccctgctgctgagaccccacttccaggacgccccccccggcgaccccagacacggccagggcgcccaggtgcccaccctgagacaggaggtgcagcccggcaacctgaagagacacctgagaatccacagcggcgagaagccctacgtgtgcatccactgccagagacagttcgccgaccccggcgccctgcagagacacgtgagaatccacaccggcgagaagccctgccagtgcgtgatgtgcggcaaggccttcacccaggccagcagcctgatcgcccacgtgagacagcacaccggcgagaagccctacgtgtgcgagagatgcggcaagagattcgtgcagagcagccagctggccaaccacatcagacaccacgacaacatcagaccccacaagtgcagcgtgtgcagcaaggccttcgtgaacgtgggcgacctgagcaagcacatcatcatccacaccggcgagaagccctacctgtgcgacaagtgcggcagaggcttcaacagagtggacaacctgagaagccacgtgaagaccgtgcaccagggcaaggccggcatcaagatcctggagcccgaggagggcagcgaggtgagcgtggtgaccgtggacgacatggtgaccctggccaccgaggccctggccgccaccgccgtgacccagctgaccgtggtgcccgtgggctag

SEQ ID NO: 105541 - DNA, 2169 bp, synthetic construct
  misc_feature 1..2169: note = Description of Artificial Sequence: Synthetic coding sequence
  source 1..2169: mol_type = other DNA
atggacttcccccagcacagccagcacgtgctggagcagctgaaccagcagagacagctgggcctgctgtgcgactgcaccttcgtggtggacggcgtgcacttcaaggcccacaaggccgtgctggccgcctgcagcgagtacttcaagatgctgttcgtggaccagaaggacgtggtgcacctggacatcagcaacgccgccggcctgggccaggtgctggagttcatgtacaccgccaagctgagcctgagccccgagaacgtggacgacgtgctggccgtggcccccggcgccgagcagaccgagaaggccgacgcccccagagagcccccccccgtggagctgaagcccgaccccaccagcggcatggccgccgccgaggccgaggccgccctgagcgagagcagcgagcaggagatggaggtggagcccgccagaaagggcgaggaggagcagaaggagcaggaggagcaggaggaggagggcgccggccccgccgaggtgaaggaggagggcagccagctggagaacggcgaggcccccgaggagaacgagaacgaggagagcgccggcaccgacagcggccaggagctgggcagcgaggccagaggcctgagaagcggcacctacggcgacagaaccgagagcaaggcctacggcagcgtgatccacaagtgcgaggactgcggcaaggagttcacccacaccggcaacttcaagagacacatcagaatccacaccggcgagaagcccttcagctgcagagagtgcagcaaggccttcagcgaccccgccgcctgcaaggcccacgagaagacccacagccccctgaagccctacggctgcgaggagtgcggcaagagctacagactgatcagcctgctgaacctgcacaagaagagacacagcggcgaggccagatacagatgcgaggactgcggcaagctgttcaccaccagcggcaacctgaagagacaccagctggtgcacagcggcgagaagccctaccagtgcgactactgcggcagaagcttcagcgaccccaccagcaagatgagacacctggagacccacgacaccgacaaggagcacaagtgcccccactgcgacaagaagttcaaccaggtgggcaacctgaaggcccacctgaagatccacatcgccgacggccccctgaagtgcagagagtgcggcaagcagttcaccaccagcggcaacctgaagagacacctgagaatccacagcggcgagaagccctacgtgtgcatccactgccagagacagttcgccgaccccggcgccctgcagagacacgtgagaatccacaccggcgagaagccctgccagtgcgtgatgtgcggcaaggccttcacccaggccagcagcctgatcgcccacgtgagacagcacaccggcgagaagccctacgtgtgcgagagatgcggcaagagattcgtgcagagcagccagctggccaaccacatcagacaccacgacaacatcagaccccacaagtgcagcgtgtgcagcaaggccttcgtgaacgtgggcgacctgagcaagcacatcatcatccacaccggcgagaagccctacctgtgcgacaagtgcggcagaggcttcaacagagtggacaacctgagaagccacgtgaagaccgtgcaccagggcaaggccggcatcaagatcctggagcccgaggagggcagcgaggtgagcgtggtgaccgtggacgacatggtgaccctggccaccgaggccctggccgccaccgccgtgacccagctgaccgtggtgcccgtgggcgccgccgtgaccgccgacgagaccgaggtgctgaaggccgagatcagcaaggccgtgaagcaggtgcaggaggaggaccccaacacccacatcctgtacgcctgcgacagctgcggcgacaagttcctggacgccaacagcctggcccagcacgtgagaatccacaccgcccaggccctggtgatgttccagaccgacgccgacttctaccagcagtacggccccggcggcacctggcccgccggccaggtgctgcaggccggcgagctggtgttcagacccagagacggcgccgagggccagcccgccctggccgagaccagccccaccgcccccgagtgccccccccccgccgagtag

SEQ ID NO: 105542 - DNA, 1530 bp, synthetic construct
  misc_feature 1..1530: note = Description of Artificial Sequence: Synthetic coding sequence
  source 1..1530: mol_type = other DNA
atggacttcccccagcacagccagcacgtgctggagcagctgaaccagcagagacagctgggcctgctgtgcgactgcaccttcgtggtggacggcgtgcacttcaaggcccacaaggccgtgctggccgcctgcagcgagtacttcaagatgctgttcgtggaccagaaggacgtggtgcacctggacatcagcaacgccgccggcggcgacaagagagccaaggaggagaaggtggccaccagcaccctgagcagactggagcaggccggcagaagcacccccatcggccccagcagagacctgaaggaggagagaggcggccaggcccagagcgccgccagcggcgccgagcagaccgagaaggccgacgcccccagagagcccccccccgtggagctgaagcccgaccccaccagcggcatggccgccgccgaggccgaggccgccctgagcgagagcagcgagcaggagatggaggtggagcccgccagaaagggcgaggaggagcagaaggagcaggaggagcaggaggaggagggcgccggccccgccgaggtgaaggaggagggcagccagctggagaacggcgaggcccccgaggagaacgagaacgaggagagcgccggcaccgacagcggccaggagctgggcagcgaggccagaggcctgagaagcggcacctacggcgacagaaccgagagcaaggcctacggcagcgtgatccacaagtgcgaggactgcggcaaggagttcacccacaccggcaacttcaagagacacatcagaatccacaccggcgagaagcccttcagctgcagagagtgcagcaaggccttcagcgaccccgccgcctgcaaggcccacgagaagacccacagccccctgaagccctacggctgcgaggagtgcggcaagagctacagactgatcagcctgctgaacctgcacaagaagagacacagcggcgaggccagatacagatgcgaggactgcggcaagctgttcaccaccagcggcaacctgaagagacaccagctggtgcacagcggcgagaagccctaccagtgcgactactgcggcagaagcttcagcgaccccaccagcaagatgagacacctggagacccacgacaccgacaaggagcacaagtgcccccactgcgacaagaagttcaaccaggtgtgcggccccctgcccgagcccgcccccggcagcagaagatggccccagccccacgcctgccacgtggtgggcagagccggcagcaccgcccccgccagcagaagcagcagcgcctgcagccccagaaagcaggcccagagagagcccctgcccagaggcagcagcagactgctgtgcggcggccaggccgacagcggcagaggcctggtgctgaagaagtggggcggcgccgcctacctgagccccctgggccccggcaccagccccgaccccggcgagatcgagcccttcaccgaccccggcaagcccgagagccagctgttcctgtgcggcagaggcagatag

SEQ ID NO: 105543 - DNA, 2166 bp, synthetic construct
  misc_feature 1..2166: note = Description of Artificial Sequence: Synthetic coding sequence
  source 1..2166: mol_type = other DNA
atgatgtgctggccctggcccctgagcagcaagtgcagaaccagcagcagacccgccatgcccagcagccacctgctgagcagactgcccgccctgggcgagatgagaagaccctggccccagaaggtgtgccccgtgcccagccccggcggcgacaagagagccaaggaggagaaggtggccaccagcaccctgagcagactggagcaggccggcagaagcacccccatcggccccagcagagacctgaaggaggagagaggcggccaggcccagagcgccgccagcggcgccgagcagaccgagaaggccgacgcccccagagagcccccccccgtggagctgaagcccgaccccaccagcggcatggccgccgccgaggccgaggccgccctgagcgagagcagcgagcaggagatggaggtggagcccgccagaaagggcgaggaggagcagaaggagcaggaggagcaggaggaggagggcgccggccccgccgaggtgaaggaggagggcagccagctggagaacggcgaggcccccgaggagaacgagaacgaggagagcgccggcaccgacagcggccaggagctgggcagcgaggccagaggcctgagaagcggcacctacggcgacagaaccgagagcaaggcctacggcagcgtgatccacaagtgcgaggactgcggcaaggagttcacccacaccggcaacttcaagagacacatcagaatccacaccggcgagaagcccttcagctgcagagagtgcagcaaggccttcagcgaccccgccgcctgcaaggcccacgagaagacccacagccccctgaagccctacggctgcgaggagtgcggcaagagctacagactgatcagcctgctgaacctgcacaagaagagacacagcggcgaggccagatacagatgcgaggactgcggcaagctgttcaccaccagcggcaacctgaagagacaccagctggtgcacagcggcgagaagccctaccagtgcgactactgcggcagaagcttcagcgaccccaccagcaagatgagacacctggagacccacgacaccgacaaggagcacaagtgcccccactgcgacaagaagttcaaccaggtgggcaacctgaaggcccacctgaagatccacatcgccgacggccccctgaagtgcagagagtgcggcaagcagttcaccaccagcggcaacctgaagagacacctgagaatccacagcggcgagaagccctacgtgtgcatccactgccagagacagttcgccgaccccggcgccctgcagagacacgtgagaatccacaccggcgagaagccctgccagtgcgtgatgtgcggcaaggccttcacccaggccagcagcctgatcgcccacgtgagacagcacaccggcgagaagccctacgtgtgcgagagatgcggcaagagattcgtgcagagcagccagctggccaaccacatcagacaccacgacaacatcagaccccacaagtgcagcgtgtgcagcaaggccttcgtgaacgtgggcgacctgagcaagcacatcatcatccacaccggcgagaagccctacctgtgcgacaagtgcggcagaggcttcaacagagtggacaacctgagaagccacgtgaagaccgtgcaccagggcaaggccggcatcaagatcctggagcccgaggagggcagcgaggtgagcgtggtgaccgtggacgacatggtgaccctggccaccgaggccctggccgccaccgccgtgacccagctgaccgtggtgcccgtgggcgccgccgtgaccgccgacgagaccgaggtgctgaaggccgagatcagcaaggccgtgaagcaggtgcaggaggaggaccccaacacccacatcctgtacgcctgcgacagctgcggcgacaagttcctggacgccaacagcctggcccagcacgtgagaatccacaccgcccaggccctggtgatgttccagaccgacgccgacttctaccagcagtacggccccggcggcacctggcccgccggccaggtgctgcaggccggcgagctggtgttcagacccagagacggcgccgagggccagcccgccctggccgagaccagccccaccgcccccgagtgccccccccccgccgagtag

SEQ ID NO: 105544 - DNA, 2007 bp, synthetic construct
  misc_feature 1..2007: note = Description of Artificial Sequence: Synthetic coding sequence
  source 1..2007: mol_type = other DNA
atgaccgagagaatccacagcatcaacctgcacaacttcagcaacagcgtgctggagaccctgaacgagcagagaaacagaggccacttctgcgacgtgaccgtgagaatccacggcagcatgctgagagcccacagatgcgtgctggccgccggcagccccttcttccaggacaagctgctgctgggctacagcgacatcgagatccccagcgtggtgagcgtgcagagcgtgcagaagctgatcgacttcatgtacagcggcgtgctgagagtgagccagagcgaggccctgcagatcctgaccgccgccagcatcctgcagatcaagaccgtgatcgacgagtgcaccagaatcgtgagccagaacgtgggcgacgtgttccccggcatccaggacagcggccaggacacccccagaggcacccccgagagcggcaccagcggccagagcagcgacaccgagagcggctacctgcagagccacccccagcacagcgtggacagaatctacagcgccctgtacgcctgcagcatgcagaacggcagcggcgagagaagcttctacagcggcgccgtggtgagccaccacgagaccgccctgggcctgcccagagaccaccacatggaggaccccagctggatcaccagaatccacgagagaagccagcagatggagagatacctgagcaccacccccgagaccacccactgcagaaagcagcccagacccgtgagaatccagaccctggtgggcaacatccacatcaagcaggagatggaggacgactacgactactacggccagcagagagtgcagatcctggagagaaacgagagcgaggagtgcaccgaggacaccgaccaggccgagggcaccgagagcgagcccaagggcgagagcttcgacagcggcgtgagcagcagcatcggcaccgagcccgacagcgtggagcagcagttcggccccggcgccgccagagacagccaggccgagcccacccagcccgagcaggccgccgaggcccccgccgagggcggcccccagaccaaccagctggagaccggcgccagcagccccgagagaagcaacgaggtggagatggacagcaccgtgatcaccgtgagcaacagcagcgacaagagcgtgctgcagcagcccagcgtgaacaccagcatcggccagcccctgcccagcacccagctgtacctgagacagaccgagaccctgaccagcaacctgagaatgcccctgaccctgaccagcaacacccaggtgatcggcaccgccggcaacacctacctgcccgccctgttcaccacccagcccgccggcagcggccccaagcccttcctgttcagcctgccccagcccctggccggccagcagacccagttcgtgaccgtgagccagcccggcctgagcaccttcaccgcccagctgcccgccccccagcccctggccagcagcgccggccacagcaccgccagcggccagggcgagaagaagccctacgagtgcaccctgtgcaacaagaccttcaccgccaagcagaactacgtgaagcacatgttcgtgcacaccggcgagaagccccaccagtgcagcatctgctggagaagcttcagcctgaaggactacctgatcaagcacatggtgacccacaccggcgtgagagcctaccagtgcagcatctgcaacaagagattcacccagaagagcagcctgaacgtgcacatgagactgcacagaggcgagaagagctacgagtgctacatctgcaagaagaagttcagccacaagaccctgctggagagacacgtggccctgcacagcgccagcaacggcaccccccccgccggcaccccccccggcgccagagccggcccccccggcgtggtggcctgcaccgagggcaccacctacgtgtgcagcgtgtgccccgccaagttcgaccagatcgagcagttcaacgaccacatgagaatgcacgtgagcgacggctag

SEQ ID NO: 105545 - DNA, 2007 bp, synthetic construct; identical to SEQ ID NO: 105544
  misc_feature 1..2007: note = Description of Artificial Sequence: Synthetic coding sequence
  source 1..2007: mol_type = other DNA

SEQ ID NO: 105546 - DNA, 2007 bp, synthetic construct; identical to SEQ ID NO: 105544
  misc_feature 1..2007: note = Description of Artificial Sequence: Synthetic coding sequence
  source 1..2007: mol_type = other DNA

SEQ ID NO: 105547 - DNA, 2007 bp, synthetic construct; identical to SEQ ID NO: 105544
  misc_feature 1..2007: note = Description of Artificial Sequence: Synthetic coding sequence
  source 1..2007: mol_type = other DNA

SEQ ID NO: 105548 - DNA, 174 bp, synthetic construct
  misc_feature 1..174: note = Description of Artificial Sequence: Synthetic coding sequence
  source 1..174: mol_type = other DNA
atgaccgagagaatccacagcatcaacctgcacaacttcagcaacagcgtgctggagaccctgaacgagcagagaaacagaggccacttctgcgacgtgaccgtgagaatccacggcagcatgctgagagcccacagatgcgtgctggccgccggcagccccttcttccagtag

SEQ ID NO: 105549 - DNA, 2007 bp, synthetic construct; identical to SEQ ID NO: 105544
  misc_feature 1..2007: note = Description of Artificial Sequence: Synthetic coding sequence
  source 1..2007: mol_type = other DNA

SEQ ID NO: 105550 - DNA, 2226 bp, synthetic construct
  misc_feature 1..2226: note = Description of Artificial Sequence: Synthetic coding sequence
  source 1..2226: mol_type = other DNA
atgctggagagaaagaagcccaagaccgccgagaaccagaaggccagcgaggagaacgagatcacccagcccggcggcagcagcgccaagcccggcctgccctgcctgaacttcgaggccgtgctgagccccgaccccgccctgatccacagcacccacagcctgaccaacagccacgcccacaccggcagcagcgactgcgacatcagctgcaagggcatgaccgagagaatccacagcatcaacctgcacaacttcagcaacagcgtgctggagaccctgaacgagcagagaaacagaggccacttctgcgacgtgaccgtgagaatccacggcagcatgctgagagcccacagatgcgtgctggccgccggcagccccttcttccaggacaagctgctgctgggctacagcgacatcgagatccccagcgtggtgagcgtgcagagcgtgcagaagctgatcgacttcatgtacagcggcgtgctgagagtgagccagagcgaggccctgcagatcctgaccgccgccagcatcctgcagatcaagaccgtgatcgacgagtgcaccagaatcgtgagccagaacgtgggcgacgtgttccccggcatccaggacagcggccaggacacccccagaggcacccccgagagcggcaccagcggccagagcagcgacaccgagagcggctacctgcagagccacccccagcacagcgtggacagaatctacagcgccctgtacgcctgcagcatgcagaacggcagcggcgagagaagcttctacagcggcgccgtggtgagccaccacgagaccgccctgggcctgcccagagaccaccacatggaggaccccagctggatcaccagaatccacgagagaagccagcagatggagagatacctgagcaccacccccgagaccacccactgcagaaagcagcccagacccgtgagaatccagaccctggtgggcaacatccacatcaagcaggagatggaggacgactacgactactacggccagcagagagtgcagatcctggagagaaacgagagcgaggagtgcaccgaggacaccgaccaggccgagggcaccgagagcgagcccaagggcgagagcttcgacagcggcgtgagcagcagcatcggcaccgagcccgacagcgtggagcagcagttcggccccggcgccgccagagacagccaggccgagcccacccagcccgagcaggccgccgaggcccccgccgagggcggcccccagaccaaccagctggagaccggcgccagcagccccgagagaagcaacgaggtggagatggacagcaccgtgatcaccgtgagcaacagcagcgacaagagcgtgctgcagcagcccagcgtgaacaccagcatcggccagcccctgcccagcacccagctgtacctgagacagaccgagaccctgaccagcaacctgagaatgcccctgaccctgaccagcaacacccaggtgatcggcaccgccggcaacacctacctgcccgccctgttcaccacccagcccgccggcagcggccccaagcccttcctgttcagcctgccccagcccctggccggccagcagacccagttcgtgaccgtgagccagcccggcctgagcaccttcaccgcccagctgcccgccccccagcccctggccagcagcgccggccacagcaccgccagcggccagggcgagaagaagccctacgagtgcaccctgtgcaacaagaccttcaccgccaagcagaactacgtgaagcacatgttcgtgcacaccggcgagaagccccaccagtgcagcatctgctggagaagcttcagcctgaaggactacctgatcaagcacatggtgacccacaccggcgtgagagcctaccagtgcagcatctgcaacaagagattcacccagaagagcagcctgaacgtgcacatgagactgcacagaggcgagaagagctacgagtgctacatctgcaagaagaagttcagccacaagaccctgctggagagacacgtggccctgcacagcgccagcaacggcaccccccccgccggcaccccccccggcgccagagccggcccccccggcgtggtggcctgcaccgagggcaccacctacgtgtgcagcgtgtgccccgccaagttcgaccagatcgagcagttcaacgaccacatgagaatgcacgtgagcgacggctag

SEQ ID NO: 105551 - DNA, 2007 bp, synthetic construct; identical to SEQ ID NO: 105544
  misc_feature 1..2007: note = Description of Artificial Sequence: Synthetic coding sequence
  source 1..2007: mol_type = other DNA

SEQ ID NO: 105552 - DNA, 60 bp, synthetic construct
  misc_feature 1..60: note = Description of Artificial Sequence: Synthetic coding sequence
  source 1..60: mol_type = other DNA
atgctggagagaaagaagcccaagaccgccgagaaccagaaggccagcgaggagaactag

SEQ ID NO: 105553 - DNA, 489 bp, synthetic construct
  misc_feature 1..489: note = Description of Artificial Sequence: Synthetic coding sequence
  source 1..489: mol_type = other DNA
atggccgagaccgtggccgacaccagaagactgatcaccaagccccagaacctgaacgacgcctacggcccccccagcaacttcctggagatcgacgtgagcaacccccagaccgtgggcgtgggcagaggcagattcaccacctacgagatcagagtgaagaccaacctgcccatcttcaagctgaaggagagcaccgtgagaagaagatacagcgacttcgagtggctgagaagcgagctggagagagagagcaaggtggtggtgccccccctgcccggcaaggccttcctgagacagctgcccttcagaggcgacgacggcatcttcgacgacaacttcatcgaggagagaaagcagggcctggagcagttcatcaacaaggtggccggccaccccctggcccagaacgagagatgcctgcacatgttcctgcaggacgagatcatcgacaagagctacacccccagcaagatcagacacgcctag

SEQ ID NO: 105554 - DNA, 1308 bp, synthetic construct
  misc_feature 1..1308: note = Description of Artificial Sequence: Synthetic coding sequence
  source 1..1308: mol_type = other DNA
atggacaccgccagccacagcctggtgctgctgcagcagctgaacatgcagagagagttcggcttcctgtgcgactgcaccgtggccatcggcgacgtgtacttcaaggcccacagagccgtgctggccgccttcagcaactacttcaagatgatcttcatccaccagaccagcgagtgcatcaagatccagcccaccgacatccagcccgacatcttcagctacctgctgcacatcatgtacaccggcaagggccccaagcagatcgtggaccacagcagactggaggagggcatcagattcctgcacgccgactacctgagccacatcgccaccgagatgaaccaggtgttcagccccgagaccgtgcagagcagcaacctgtacggcatccagatcagcaccacccagaagaccgtggtgaagcagggcctggaggtgaaggaggcccccagcagcaacagcggcaacagagccgccgtgcagggcgaccacccccagctgcagctgagcctggccatcggcctggacgacggcaccgccgaccagcagagagcctgccccgccacccaggccctggaggagcaccagaagccccccgtgagcatcaagcaggagagatgcgaccccgagagcgtgatcagccagagccaccccagccccagcagcgaggtgaccggccccaccttcaccgagaacagcgtgaagatccacctgtgccactactgcggcgagagattcgacagcagaagcaacctgagacagcacctgcacacccacgtgagcggcagcctgcccttcggcgtgcccgccagcatcctggagagcaacgacctgggcgaggtgcaccccctgaacgagaacagcgaggccctggagtgcagaagactgagcagcttcatcgtgaaggagaacgagcagcagcccgaccacaccaacagaggcaccaccgagcccctgcagatcagccaggtgagcctgatcagcaaggacaccgagcccgtggagctgaactgcaacttcagcttcagcagaaagagaaagatgagctgcaccatctgcggccacaagttccccagaaagagccagctgctggagcacatgtacacccacaagggcaagagctacagatacaacagatgccagagattcggcaacgccctggcccagagattccagccctactgcgacagctggagcgacgtgagcctgaagagcagcagactgagccaggagcacctggacctgccctgcgccctggagagcgagctgacccaggagaacgtggacaccatcctggtggagtag

SEQ ID NO: 105555 - DNA, 1308 bp, synthetic construct; identical to SEQ ID NO: 105554
  misc_feature 1..1308: note = Description of Artificial Sequence: Synthetic coding sequence
  source 1..1308: mol_type = other DNA

SEQ ID NO: 105556 - DNA, 1464 bp, synthetic construct
  misc_feature 1..1464: note = Description of Artificial Sequence: Synthetic coding sequence
  source 1..1464: mol_type = other DNA
atgagcctgccccccatcagactgcccagcccctacggcagcgacagactggtgcagctggccgccagactgagacccgccctgtgcgacaccctgatcaccgtgggcagccaggagttccccgcccacagcctggtgctggccggcgtgagccagcagctgggcagaagaggccagtgggccctgggcgagggcatcagccccagcaccttcgcccagctgctgaacttcgtgtacggcgagagcgtggagctgcagcccggcgagctgagacccctgcaggaggccgccagagccctgggcgtgcagagcctggaggaggcctgctggagagccagaggcgacagagccaagaagcccgaccccggcctgaagaagcaccaggaggagcccgagaagcccagcagaaaccccgagagagagctgggcgaccccggcgagaagcagaagcccgagcaggtgagcagaaccggcggcagagagcaggagatgctgcacaagcacagcccccccagaggcagacccgagatggccggcgccacccaggaggcccagcaggagcagaccagaagcaaggagaagagactgcaggcccccgtgggccagagaggcgccgacggcaagcacggcgtgctgacctggctgagagagaaccccggcggcagcgaggagagcctgagaaagctgcccggccccctgccccccgccggcagcctgcagaccagcgtgacccccagacccagctgggccgaggccccctggctggtgggcggccagcccgccctgtggagcatcctgctgatgccccccagatacggcatccccttctaccacagcacccccaccaccggcgcctggcaggaggtgtggagagagcagagaatccccctgagcctgaacgcccccaagggcctgtggagccagaaccagctggccagcagcagccccacccccggcagcctgccccagggccccgcccagctgagccccggcgagatggaggagagcgaccagggccacaccggcgccctggccacctgcgccggccacgaggacaaggccggctgcccccccagaccccaccccccccccgccccccccgccagaagcagaccctacgcctgcagcgtgtgcggcaagagattcagcctgaagcaccagatggagacccactacagagtgcacaccggcgagaagcccttcagctgcagcctgtgcccccagagaagcagagacttcagcgccatgaccaagcacctgagaacccacggcgccgccccctacagatgcagcctgtgcggcgccggctgccccagcctggccagcatgcaggcccacatgagaggccacagccccagccagctgccccccggctggaccatcagaagcaccttcctgtacagcagcagcagacccagcagacccagcaccagcccctgctgccccagcagcagcaccacctag

SEQ ID NO: 105557 - DNA, 1464 bp, synthetic construct; identical to SEQ ID NO: 105556
  misc_feature 1..1464: note = Description of Artificial Sequence: Synthetic coding sequence
  source 1..1464: mol_type = other DNA

SEQ ID NO: 105558 - DNA, 2019 bp, synthetic construct
  misc_feature 1..2019: note = Description of Artificial Sequence: Synthetic coding sequence
  source 1..2019: mol_type = other DNA
atggagagcagaaagctgatcagcgccaccgacatccagtacagcggcagcctgctgaacagcctgaacgagcagagaggccacggcctgttctgcgacgtgaccgtgatcgtggaggacagaaagttcagagcccacaagaacatcctgagcgccagcagcacctacttccaccagctgttcagcgtggccggccaggtggtggagctgagcttcatcagagccgagatcttcgccgagatcctgaactacatctacagcagcaagatcgtgagagtgagaagcgacctgctggacgagctgatcaagagcggccagctgctgggcgtgaagttcatcgccgagctgggcgtgcccctgagccaggtgaagagcatcagcggcaccgcccaggacggcaacaccgagcccctgccccccgacagcggcgacaagaacctggtgatccagaagagcaaggacgaggcccaggacaacggcgccaccatcatgcccatcatcaccgagagcttcagcctgagcgccgaggactacgagatgaagaagatcatcgtgaccgacagcgacgacgacgacgacgacgtgatcttctgcagcgagatcctgcccaccaaggagaccctgcccagcaacaacaccgtggcccaggtgcagagcaaccccggccccgtggccatcagcgacgtggcccccagcgccagcaacaacagcccccccctgaccaacatcacccccacccagaagctgcccacccccgtgaaccaggccaccctgagccagacccagggcagcgagaagctgctggtgagcagcgcccccacccacctgacccccaacatcatcctgctgaaccagacccccctgagcaccccccccaacgtgagcagcagcctgcccaaccacatgcccagcagcatcaacctgctggtgcagaaccagcagacccccaacagcgccatcctgaccggcaacaaggccaacgaggaggaggaggaggagatcatcgacgacgacgacgacaccatcagcagcagccccgacagcgccgtgagcaacaccagcctggtgccccaggccgacaccagccagaacaccagcttcgacggcagcctgatccagaagatgcagatccccaccctgctgcaggagcccctgagcaacagcctgaagatcagcgacatcatcaccagaaacaccaacgaccccggcgtgggcagcaagcacctgatggagggccagaagatcatcaccctggacaccgccaccgagatcgagggcctgagcaccggctgcaaggtgtacgccaacatcggcgaggacacctacgacatcgtgatccccgtgaaggacgaccccgacgagggcgaggccagactggagaacgagatccccaagaccagcggcagcgagatggccaacaagagaatgaaggtgaagcacgacgaccactacgagctgatcgtggacggcagagtgtactacatctgcatcgtgtgcaagagaagctacgtgtgcctgaccagcctgagaagacacttcaacatccacagctgggagaagaagtacccctgcagatactgcgagaaggtgttccccctggccgagtacagaaccaagcacgagatccaccacaccggcgagagaagataccagtgcctggcctgcggcaagagcttcatcaactaccagttcatgagcagccacatcaagagcgtgcacagccaggaccccagcggcgacagcaagctgtacagactgcacccctgcagaagcctgcagatcagacagtacgcctacctgagcgacagaagcagcaccatccccgccatgaaggacgacggcatcggctacaaggtggacaccggcaaggagccccccgtgggcaccaccaccagcacccagaacaagcccatgacctgggaggacatcttcatccagcaggagaacgacagcatcttcaagcagaacgtgaccgacggcagcaccgagttcgagttcatcatccccgagagctactag

SEQ ID NO: 105559 - DNA, 2019 bp, synthetic construct; identical to SEQ ID NO: 105558
  misc_feature 1..2019: note = Description of Artificial Sequence: Synthetic coding sequence
  source 1..2019: mol_type = other DNA

SEQ ID NO: 105560 - DNA, 2019 bp, synthetic construct; identical to SEQ ID NO: 105558
  misc_feature 1..2019: note = Description of Artificial Sequence: Synthetic coding sequence
  source 1..2019: mol_type = other DNA

SEQ ID NO: 105561 - DNA, 1515 bp, synthetic construct
  misc_feature 1..1515: note = Description of Artificial Sequence: Synthetic coding sequence
  source 1..1515: mol_type = other DNA
atgagcgtggagatggacagcagcagcttcatccagttcgacgtgcccgagtacagcagcaccgtgctgagccagctgaacgagctgagactgcagggcaagctgtgcgacatcatcgtgcacatccagggccagcccttcagagcccacaaggccgtgctggccgccagcagcccctacttcagagaccacagcgccctgagcaccatgagcggcctgagcatcagcgtgatcaagaaccccaacgtgttcgagcagctgctgagcttctgctacaccggcagaatgagcctgcagctgaaggacgtggtgagcttcctgaccgccgccagcttcctgcagatgcagtgcgtgatcgacaagtgcacccagatcctggagagcatccacagcaagatcagcgtgggcgacgtggacagcgtgaccgtgggcgccgaggagaaccccgagagcagaaacggcgtgaaggacagcagcttcttcgccaaccccgtggagatcagccccccctactgcagccagggcagacagcccaccgccagcagcgacctgagaatggagaccacccccagcaaggccctgagaagcagactgcaggaggagggccacagcgacagaggcagcagcggcagcgtgagcgagtacgagatccagatcgagggcgaccacgagcagggcgacctgctggtgagagagagccagatcaccgaggtgaaggtgaagatggagaagagcgacagacccagctgcagcgacagcagcagcctgggcgacgacggctaccacaccgagatggtggacggcgagcaggtggtggccgtgaacgtgggcagctacggcagcgtgctgcagcacgcctacagctacagccaggccgccagccagcccaccaacgtgagcgaggccttcggcagcctgagcaacagcagccccagcagaagcatgctgagctgcttcagaggcggcagagccagacagaagagagccctgagcgtgcacctgcacagcgacctgcagggcctggtgcagggcagcgacagcgaggccatgatgaacaaccccggctacgagagcagccccagagagagaagcgccagaggccactggtacccctacaacgagagactgatctgcatctactgcggcaagagcttcaaccagaagggcagcctggacagacacatgagactgcacatgggcatcacccccttcgtgtgcaagttctgcggcaagaagtacaccagaaaggaccagctggagtaccacatcagaggccacaccgacgacaagcccttcagatgcgagatctgcggcaagtgcttccccttccagggcaccctgaaccagcacctgagaaagaaccaccccggcgtggccgaggtgagaagcagaatcgagagccccgagagaaccgacgtgtacgtggagcagaagctggagaacgacgccagcgccagcgagatgggcctggacagcagaatggagatccacaccgtgagcgacgcccccgactag

SEQ ID NO: 105562 - DNA, 1503 bp, synthetic construct
  misc_feature 1..1503: note = Description of Artificial Sequence: Synthetic coding sequence
  source 1..1503: mol_type = other DNA
atggacagcagcagcttcatccagttcgacgtgcccgagtacagcagcaccgtgctgagccagctgaacgagctgagactgcagggcaagctgtgcgacatcatcgtgcacatccagggccagcccttcagagcccacaaggccgtgctggccgccagcagcccctacttcagagaccacagcgccctgagcaccatgagcggcctgagcatcagcgtgatcaagaaccccaacgtgttcgagcagctgctgagcttctgctacaccggcagaatgagcctgcagctgaaggacgtggtgagcttcctgaccgccgccagcttcctgcagatgcagtgcgtgatcgacaagtgcacccagatcctggagagcatccacagcaagatcagcgtgggcgacgtggacagcgtgaccgtgggcgccgaggagaaccccgagagcagaaacggcgtgaaggacagcagcttcttcgccaaccccgtggagatcagccccccctactgcagccagggcagacagcccaccgccagcagcgacctgagaatggagaccacccccagcaaggccctgagaagcagactgcaggaggagggccacagcgacagaggcagcagcggcagcgtgagcgagtacgagatccagatcgagggcgaccacgagcagggcgacctgctggtgagagagagccagatcaccgaggtgaaggtgaagatggagaagagcgacagacccagctgcagcgacagcagcagcctgggcgacgacggctaccacaccgagatggtggacggcgagcaggtggtggccgtgaacgtgggcagctacggcagcgtgctgcagcacgcctacagctacagccaggccgccagccagcccaccaacgtgagcgaggccttcggcagcctgagcaacagcagccccagcagaagcatgctgagctgcttcagaggcggcagagccagacagaagagagccctgagcgtgcacctgcacagcgacctgcagggcctggtgcagggcagcgacagcgaggccatgatgaacaaccccggctacgagagcagccccagagagagaagcgccagaggccactggtacccctacaacgagagactgatctgcatctactgcggcaagagcttcaaccagaagggcagcctggacagacacatgagactgcacatgggcatcacccccttcgtgtgcaagttctgcggcaagaagtacaccagaaaggaccagctggagtaccacatcagaggccacaccgacgacaagcccttcagatgcgagatctgcggcaagtgcttccccttccagggcaccctgaaccagcacctgagaaagaaccaccccggcgtggccgaggtgagaagcagaatcgagagccccgagagaaccgacgtgtacgtggagcagaagctggagaacgacgccagcgccagcgagatgggcctggacagcagaatggagatccacaccgtgagcgacgcccccgactag

SEQ ID NO: 105563 - DNA, 3591 bp, synthetic construct
  misc_feature 1..3591: note = Description of Artificial Sequence: Synthetic coding sequence
  source 1..3591: mol_type = other DNA
atgatgaccgtgatgagcctgagcagagacctgaaggacgacttccacagcgacaccgtgctgagcatcctgaacgagcagagaatcagaggcatcctgtgcgacgtgaccatcatcgtggaggacaccaagttcaaggcccacagcaacgtgctggccgccagcagcctgtacttcaagaacatcttctggagccacaccatctgcatcagcagccacgtgctggagctggacgacctgaaggccgaggtgttcaccgagatcctgaactacatctacagcagcaccgtggtggtgaagagacaggagaccgtgaccgacctggccgccgccggcaagaagctgggcatcagcttcctggaggacctgaccgacagaaacttcagcaacagccccggcccctacgtgttctgcatcaccgagaagggcgtggtgaaggaggagaagaacgagaagagacacgaggagcccgccatcaccaacggccccagaatcaccaacgccttcagcatcatcgagaccgagaacagcaacaacatgttcagccccctggacctgagagccagcttcaagaaggtgagcgacagcatgagaaccgccagcctgtgcctggagagaaccgacgtgtgccacgaggccgagcccgtgagaaccctggccgagcacagctacgccgtgagcagcgtggccgaggcctacagaagccagcccgtgagagagcacgacggcagcagccccggcaacaccggcaaggagaactgcgaggccctggccgccaagcccaagacctgcagaaagcccaagaccttcagcatcccccaggacagcgacagcgccaccgagaacatcccccccccccccgtgagcaacctggaggtgaaccaggagagaagcccccagcccgccgccgtgctgaccagaagcaagagccccaacaacgagggcgacgtgcacttcagcagagaggacgagaaccagagcagcgacgtgcccggcccccccgccgccgaggtgccccccctggtgtacaactgcagctgctgcagcaaggccttcgacagcagcaccctgctgagcgcccacatgcagctgcacaagcccacccaggagcccctggtgtgcaagtactgcaacaagcagttcaccaccctgaacagactggacagacacgagcagatctgcatgagaagcagccacatgcccatccccggcggcaaccagagattcctggagaactaccccaccatcggccagaacggcggcagcttcaccggccccgagcccctgctgagcgagaacagaatcggcgagttcagcagcaccggcagcaccctgcccgacaccgaccacatggtgaagttcgtgaacggccagatgctgtacagctgcgtggtgtgcaagagaagctacgtgaccctgagcagcctgagaagacacgccaacgtgcacagctggagaagaacctacccctgccactactgcaacaaggtgttcgccctggccgagtacagaaccagacacgagatctggcacaccggcgagagaagataccagtgcatcttctgcctggagaccttcatgacctactacatcctgaagaaccaccagaagagcttccacgccatcgaccacagactgagcatcagcaagaagaccgccaacggcggcctgaagcccagcgtgtacccctacaagctgtacagactgctgcccatgaagtgcaagagagccccctacaagagctacagaaacagcagctacgagaacgccagagagaacagccagatgaacgagagcgcccccggcacctacgtggtgcagaacccccacagcagcgagctgcccaccctgaacttccaggacaccgtgaacaccctgaccaacagccccgccatccccctggagaccagcgcctgccaggacatccccaccagcgccaacgtgcagaacgccgagggcaccaagtggggcgaggaggccctgaagatggacctggacaacaacttctacagcaccgaggtgagcgtgagcagcaccgagaacgccgtgagcagcgacctgagagccggcgacgtgcccgtgctgagcctgagcaacagcagcgagaacgccgccagcgtgatcagctacagcggcagcgcccccagcgtgatcgtgcacagcagccagttcagcagcgtgatcatgcacagcaacgccatcgccgccatgaccagcagcaaccacagagccttcagcgaccccgccgtgagccagagcctgaaggacgacagcaagcccgagcccgacaaggtgggcagattcgccagcagacccaagagcatcaaggagaagaagaagaccaccagccacaccagaggcgagatccccgaggagagcaactacgtggccgaccccggcggcagcctgagcaagaccaccaacatcgccgaggagaccagcaagatcgagacctacatcgccaagcccgccctgcccggcaccagcaccaacagcaacgtggcccccctgtgccagatcaccgtgaagatcggcaacgaggccatcgtgaagagacacatcctgggcagcaagctgttctacaagagaggcagaagacccaagtaccagatgcaggaggagcccctgccccagggcaacgaccccgagcccagcggcgacagccccctgggcctgtgccagagcgagtgcatggagatgagcgaggtgttcgacgacgccagcgaccaggacagcaccgacaagccctggagaccctactacaactacaagcccaagaagaagagcagacagctgaagaagatgagaaaggtgaactggagaaaggagcacggcaacagaagccccagccacaagtgcaagtaccccgccgagctggactgcgccgtgggcaaggccccccaggacaagcccttcgaggaggaggagaccaaggagatgcccaagctgcagtgcgagctgtgcgacggcgacaaggccgtgggcgccggcaaccagggcagaccccacagacacctgaccagcagaccctacgcctgcgagctgtgcgccaagcagttccagagccccagcaccctgaagatgcacatgagatgccacaccggcgagaagccctaccagtgcaagacctgcggcagatgcttcagcgtgcagggcaacctgcagaagcacgagagaatccacctgggcctgaaggagttcgtgtgccagtactgcaacaaggccttcaccctgaacgagaccctgaagatccacgagagaatccacaccggcgagaagagataccactgccagttctgcttccagagattcctgtacctgagcaccaagagaaaccacgagcagagacacatcagagagcacaacggcaagggctacgcctgcttccagtgccccaagatctgcaagaccgccgccgccctgggcatgcaccagaagaagcacctgttcaagagccccagccagcaggagaagatcggcgacgtgtgccacgagaacagcaaccccctggagaaccagcacttcatcggcagcgaggacaacgaccagaaggacaacatccagaccggcgtggagaacgtggtgctgtag

SEQ ID NO: 105564 - DNA, 3588 bp, synthetic construct
  misc_feature 1..3588: note = Description of Artificial Sequence: Synthetic coding sequence
  source 1..3588: mol_type = other DNA
atgaccgtgatgagcctgagcagagacctgaaggacgacttccacagcgacaccgtgctgagcatcctgaacgagcagagaatcagaggcatcctgtgcgacgtgaccatcatcgtggaggacaccaagttcaaggcccacagcaacgtgctggccgccagcagcctgtacttcaagaacatcttctggagccacaccatctgcatcagcagccacgtgctggagctggacgacctgaaggccgaggtgttcaccgagatcctgaactacatctacagcagcaccgtggtggtgaagagacaggagaccgtgaccgacctggccgccgccggcaagaagctgggcatcagcttcctggaggacctgaccgacagaaacttcagcaacagccccggcccctacgtgttctgcatcaccgagaagggcgtggtgaaggaggagaagaacgagaagagacacgaggagcccgccatcaccaacggccccagaatcaccaacgccttcagcatcatcgagaccgagaacagcaacaacatgttcagccccctggacctgagagccagcttcaagaaggtgagcgacagcatgagaaccgccagcctgtgcctggagagaaccgacgtgtgccacgaggccgagcccgtgagaaccctggccgagcacagctacgccgtgagcagcgtggccgaggcctacagaagccagcccgtgagagagcacgacggcagcagccccggcaacaccggcaaggagaactgcgaggccctggccgccaagcccaagacctgcagaaagcccaagaccttcagcatcccccaggacagcgacagcgccaccgagaacatcccccccccccccgtgagcaacctggaggtgaaccaggagagaagcccccagcccgccgccgtgctgaccagaagcaagagccccaacaacgagggcgacgtgcacttcagcagagaggacgagaaccagagcagcgacgtgcccggcccccccgccgccgaggtgccccccctggtgtacaactgcagctgctgcagcaaggccttcgacagcagcaccctgctgagcgcccacatgcagctgcacaagcccacccaggagcccctggtgtgcaagtactgcaacaagcagttcaccaccctgaacagactggacagacacgagcagatctgcatgagaagcagccacatgcccatccccggcggcaaccagagattcctggagaactaccccaccatcggccagaacggcggcagcttcaccggccccgagcccctgctgagcgagaacagaatcggcgagttcagcagcaccggcagcaccctgcccgacaccgaccacatggtgaagttcgtgaacggccagatgctgtacagctgcgtggtgtgcaagagaagctacgtgaccctgagcagcctgagaagacacgccaacgtgcacagctggagaagaacctacccctgccactactgcaacaaggtgttcgccctggccgagtacagaaccagacacgagatctggcacaccggcgagagaagataccagtgcatcttctgcctggagaccttcatgacctactacatcctgaagaaccaccagaagagcttccacgccatcgaccacagactgagcatcagcaagaagaccgccaacggcggcctgaagcccagcgtgtacccctacaagctgtacagactgctgcccatgaagtgcaagagagccccctacaagagctacagaaacagcagctacgagaacgccagagagaacagccagatgaacgagagcgcccccggcacctacgtggtgcagaacccccacagcagcgagctgcccaccctgaacttccaggacaccgtgaacaccctgaccaacagccccgccatccccctggagaccagcgcctgccaggacatccccaccagcgccaacgtgcagaacgccgagggcaccaagtggggcgaggaggccctgaagatggacctggacaacaacttctacagcaccgaggtgagcgtgagcagcaccgagaacgccgtgagcagcgacctgagagccggcgacgtgcccgtgctgagcctgagcaacagcagcgagaacgccgccagcgtgatcagctacagcggcagcgcccccagcgtgatcgtgcacagcagccagttcagcagcgtgatcatgcacagcaacgccatcgccgccatgaccagcagcaaccacagagccttcagcgaccccgccgtgagccagagcctgaaggacgacagcaagcccgagcccgacaaggtgggcagattcgccagcagacccaagagcatcaaggagaagaagaagaccaccagccacaccagaggcgagatccccgaggagagcaactacgtggccgaccccggcggcagcctgagcaagaccaccaacatcgccgaggagaccagcaagatcgagacctacatcgccaagcccgccctgcccggcaccagcaccaacagcaacgtggcccccctgtgccagatcaccgtgaagatcggcaacgaggccatcgtgaagagacacatcctgggcagcaagctgttctacaagagaggcagaagacccaagtaccagatgcaggaggagcccctgccccagggcaacgaccccgagcccagcggcgacagccccctgggcctgtgccagagcgagtgcatggagatgagcgaggtgttcgacgacgccagcgaccaggacagcaccgacaagccctggagaccctactacaactacaagcccaagaagaagagcagacagctgaagaagatgagaaaggtgaactggagaaaggagcacggcaacagaagccccagccacaagtgcaagtaccccgccgagctggactgcgccgtgggcaaggccccccaggacaagcccttcgaggaggaggagaccaaggagatgcccaagctgcagtgcgagctgtgcgacggcgacaaggccgtgggcgccggcaaccagggcagaccccacagacacctgaccagcagaccctacgcctgcgagctgtgcgccaagcagttccagagccccagcaccctgaagatgcacatgagatgccacaccggcgagaagccctaccagtgcaagacctgcggcagatgcttcagcgtgcagggcaacctgcagaagcacgagagaatccacctgggcctgaaggagttcgtgtgccagtactgcaacaaggccttcaccctgaacgagaccctgaagatccacgagagaatccacaccggcgagaagagataccactgccagttctgcttccagagattcctgtacctgagcaccaagagaaaccacgagcagagacacatcagagagcacaacggcaagggctacgcctgcttccagtgccccaagatctgcaagaccgccgccgccctgggcatgcaccagaagaagcacctgttcaagagccccagccagcaggagaagatcggcgacgtgtgccacgagaacagcaaccccctggagaaccagcacttcatcggcagcgaggacaacgaccagaaggacaacatccagaccggcgtggagaacgtggtgctgtag

SEQ ID NO: 105565 - DNA, 105 bp, synthetic construct
  misc_feature 1..105: note = Description of Artificial Sequence: Synthetic coding sequence
  source 1..105: mol_type = other DNA
atgaccgtgatgagcctgagcagagacctgaaggacgacttccacagcgacaccgtgctgagcatcctgaacgagcagagaatcagaggcatcctgtgcgactag

SEQ ID NO: 105566 - DNA, 285 bp, synthetic construct
  misc_feature 1..285: note = Description of Artificial Sequence: Synthetic coding sequence
  source 1..285: mol_type = other DNA
atgaccgtgatgagcctgagcagagacctgaaggacgacttccacagcgacaccgtgctgagcatcctgaacgagcagagaatcagaggcatcctgtgcgacgtgaccatcatcgtggaggacaccaagttcaaggcccacagcaacgtgctggccgccagcagcctgtacttcaagaacatcttctggagccacaccatctgcatcagcagccacgtgctggagctggacgacctgaaggccgaggtgttcaccgagatcctgaactacatctacagcagctag

SEQ ID NO: 105567 - DNA, 357 bp, synthetic construct
  misc_feature 1..357: note = Description of Artificial Sequence: Synthetic coding sequence
  source 1..357: mol_type = other DNA
atgaccgtgatgagcctgagcagagacctgaaggacgacttccacagcgacaccgtgctgagcatcctgaacgagcagagaatcagaggcatcctgtgcgacgtgaccatcatcgtggaggacaccaagttcaaggcccacagcaacgtgctggccgccagcagcctgtacttcaagaacatcttctggagccacaccatctgcatcagcagccacgtgctggagctggacgacctgaaggccgaggtgttcaccgagatcctgaactacatctacagcagcaccgtggtggtgaagagacaggagaccgtgaccgacctggccgccgccggcaagaagctgggcatcagcttctag

SEQ ID NO: 105568 - DNA, 336 bp, synthetic construct
  misc_feature 1..336: note = Description of Artificial Sequence: Synthetic coding sequence
  source 1..336: mol_type = other DNA
atgaccgtgatgagcctgagcagagacctgaaggacgacttccacagcgacaccgtgctgagcatcctgaacgagcagagaatcagaggcatcctgtgcgacgtgaccatcatcgtggaggacaccaagttcaaggcccacagcaacgtgctggccgccagcagcctgtacttcaagaacatcttctggagccacaccatctgcatcagcagccacgtgctggagctggacgacctgaaggccgaggtgttcaccgagatcctgaactacatctacagcagcaccgtggtggtgaagagacaggagaccgtgaccgacctggccgccgccggctag

SEQ ID NO: 105569 - DNA, 453 bp, synthetic construct
  misc_feature 1..453: note = Description of Artificial Sequence: Synthetic coding sequence
  source 1..453: mol_type = other DNA
atgaccgtgatgagcctgagcagagacctgaaggacgacttccacagcgacaccgtgctgagcatcctgaacgagcagagaatcagaggcatcctgtgcgacgtgaccatcatcgtggaggacaccaagttcaaggcccacagcaacgtgctggccgccagcagcctgtacttcaagaacatcttctggagccacaccatctgcatcagcagccacgtgctggagctggacgacctgaaggccgaggtgttcaccgagatcctgaactacatctacagcagcaccgtggtggtgaagagacaggagaccgtgaccgacctggccgccgccggcaagaagctgggcatcagcttcctggaggacctgaccgacagaaacttcagcaacagccccggcccctacgtgttctgcatcaccgagaagggcgtggtgaaggaggagaagaacgagtag

SEQ ID NO: 105570 - DNA, 2316 bp, synthetic construct
  misc_feature 1..2316: note = Description of Artificial Sequence: Synthetic coding sequence
  source 1..2316: mol_type = other DNA
atgaccgtgatgagcctgagcagagacctgaaggacgacttccacagcgacaccgtgctgagcatcctgaacgagcagagaatcagaggcatcctgtgcgacgtgaccatcatcgtggaggacaccaagttcaaggcccacagcaacgtgctggccgccagcagcctgtacttcaagaacatcttctggagccacaccatctgcatcagcagccacgtgctggagctggacgacctgaaggccgaggtgttcaccgagatcctgaactacatctacagcagcaccgtggtggtgaagagacaggagaccgtgaccgacctggccgccgccggcaagaagctgggcatcagcttcctggaggacctgaccgacagaaacttcagcaacagccccggcccctacgtgttctgcatcaccgagaagggcgtggtgaaggaggagaagaacgagaagagacacgaggagcccgccatcaccaacggccccagaatcaccaacgccttcagcatcatcgagaccgagaacagcaacaacatgttcagccccctggacctgagagccagcttcaagaaggtgagcgacagcatgagaaccgccagcctgtgcctggagagaaccgacgtgtgccacgaggccgagcccgtgagaaccctggccgagcacagctacgccgtgagcagcgtggccgaggcctacagaagccagcccgtgagagagcacgacggcagcagccccggcaacaccggcaaggagaactgcgaggccctggccgccaagcccaagacctgcagaaagcccaagaccttcagcatcccccaggacagcgacagcgccaccgagaacatcccccccccccccgtgagcaacctggaggtgaaccaggagagaagcccccagcccgccgccgtgctgaccagaagcaagagccccaacaacgagggcgacgtgcacttcagcagagaggacgagaaccagagcagcgacgtgcccggcccccccgccgccgaggtgccccccctggtgtacaactgcagctgctgcagcaaggccttcgacagcagcaccctgctgagcgcccacatgcagctgcacaagcccacccaggagcccctggtgtgcaagtactgcaacaagcagttcaccaccctgaacagactggacagacacgagcagatctgcatgagaagcagccacatgcccatccccggcggcaaccagagattcctggagaactaccccaccatcggccagaacggcggcagcttcaccggccccgagcccctgctgagcgagaacagaatcggcgagttcagcagcaccggcagcaccctgcccgacaccgaccacatggtgaagttcgtgaacggccagatgctgtacagctgcgtggtgtgcaagagaagctacgtgaccctgagcagcctgagaagacacgccaacgtgcacagctggagaagaacctacccctgccactactgcaacaaggtgttcgccctggccgagtacagaaccagacacgagatctggcacaccggcgagagaagataccagtgcatcttctgcctggagaccttcatgacctactacatcctgaagaaccaccagaagagcttccacgccatcgaccacagactgagcatcagcaagaagaccgccaacggcggcctgaagcccagcgtgtacccctacaagctgtacagactgctgcccatgaagtgcaagagagccccctacaagagctacagaaacagcagctacgagaacgccagagagaacagccagatgaacgagagcgcccccggcacctacgtggtgcagaacccccacagcagcgagctgcccaccctgaacttccaggacaccgtgaacaccctgaccaacagccccgccatccccctggagaccagcgcctgccaggacatccccaccagcgccaacgtgcagaacgccgagggcaccaagtggggcgaggaggccctgaagatggacctggacaacaacttctacagcaccgaggtgagcgtgagcagcaccgagaacgccgtgagcagcgacctgagagccggcgacgtgcccgtgctgagcctgagcaacagcagcgagaacgccgccagcgtgatcagctacagcggcagcgcccccagcgtgatcgtgcacagcagccagttcagcagcgtgatcatgcacagcaacgccatcgccgccatgaccagcagcaaccacagagccttcagcgaccccgccgtgagccagagcctgaaggacgacagcaagcccgagcccgacaaggtgggcagattcgccagcagaccctag

SEQ ID NO: 105571 - DNA, 441 bp, synthetic construct
  misc_feature 1..441: note = Description of Artificial Sequence: Synthetic coding sequence
  source 1..441: mol_type = other DNA
atgaccgtgatgagcctgagcagagacctgaaggacgacttccacagcgacaccgtgctgagcatcctgaacgagcagagaatcagaggcatcctgtgcgacgtgaccatcatcgtggaggacaccaagttcaaggcccacagcaacgtgctggccgccagcagcctgtacttcaagaacatcttctggagccacaccatctgcatcagcagccacgtgctggagctggacgacctgaaggccgaggtgttcaccgagatcctgaactacatctacagcagcaccgtggtggtgaagagacaggagaccgtgaccgacctggccgccgccggcaagaagctgggcatcagcttcctggaggacctgaccgacagaaacttcagcaacagccccggcccctacgtgttctgcatcaccgagaagggcgtggtgaaggagtag

SEQ ID NO: 105572 - DNA, 633 bp, synthetic construct
  misc_feature 1..633: note = Description of Artificial Sequence: Synthetic coding sequence
  source 1..633: mol_type = other DNA
atgaccgtgatgagcctgagcagagacctgaaggacgacttccacagcgacaccgtgctgagcatcctgaacgagcagagaatcagaggcatcctgtgcgacgtgaccatcatcgtggaggacaccaagttcaaggcccacagcaacgtgctggccgccagcagcctgtacttcaagaacatcttctggagccacaccatctgcatcagcagccacgtgctggagctggacgacctgaaggccgaggtgttcaccgagatcctgaactacatctacagcagcaccgtggtggtgaagagacaggagaccgtgaccgacctggccgccgccggcaagaagctgggcatcagcttcctggaggacctgaccgacagaaacttcagcaacagccccggcccctacgtgttctgcatcaccgagaagggcgtggtgaaggaggagaagaacgagaagagacacgaggagcccgccatcaccaacggccccagaatcaccaacgccttcagcatcatcgagaccgagaacagcaacaacatgttcagccccctggacctgagagccagcttcaagaaggtgagcgacagcatgagaaccgccagcctgtgcctggagagaaccgacgtgtgccactag

SEQ ID NO: 105573 - DNA, 327 bp, synthetic construct
  misc_feature 1..327: note = Description of Artificial Sequence: Synthetic coding sequence
  source 1..327: mol_type = other DNA
atgaccgtgatgagcctgagcagagacctgaaggacgacttccacagcgacaccgtgctgagcatcctgaacgagcagagaatcagaggcatcctgtgcgacgtgaccatcatcgtggaggacaccaagttcaaggcccacagcaacgtgctggccgccagcagcctgtacttcaagaacatcttctggagccacaccatctgcatcagcagccacgtgctggagctggacgacctgaaggccgaggtgttcaccgagatcctgaactacatctacagcagcaccgtggtggtgaagagacaggagaccgtgaccgacctggcctag

SEQ ID NO: 105574 - DNA, 213 bp, synthetic construct
  misc_feature 1..213: note = Description of Artificial Sequence: Synthetic coding sequence
  source 1..213: mol_type = other DNA
atgaccgtgatgagcctgagcagagacctgaaggacgacttccacagcgacaccgtgctgagcatcctgaacgagcagagaatcagaggcatcctgtgcgacgtgaccatcatcgtggaggacaccaagttcaaggcccacagcaacgtgctggccgccagcagcctgtacttcaagaacatcttctggagccacaccatctgcatcagctag

SEQ ID NO: 105575 - DNA, 3588 bp, synthetic construct; identical to SEQ ID NO: 105564
  misc_feature 1..3588: note = Description of Artificial Sequence: Synthetic coding sequence
  source 1..3588: mol_type = other DNA

SEQ ID NO: 105576 - DNA, 3042 bp, synthetic construct
  misc_feature 1..3042: note = Description of Artificial Sequence: Synthetic coding sequence
  source 1..3042: mol_type = other DNA
atgcccccccccgccgaggtgaccgaccccagccacgcccccgccgtgctgagacagctgaacgagcagagactgagaggcctgttctgcgacgtgaccctgatcgccggcgacaccaagttccccgcccacagaagcgtgctggccgccagcagccccttcttcagagaggccctgctgaccagcgcccccctgcccctgccccccgccaccggcggcgccgcccccaaccccgccaccaccaccgccgccagcagcagcagcagcagcagcagcagcagcagcagcagcagcagcagcgccagcagcagcagcagcagcagcagcagcagccccccccccgccagcccccccgccagcagcccccccagagtgctggagctgcccggcgtgcccgccgccgccttcagcgacgtgctgaacttcatctacagcgccagactggccctgcccggcggcggcggcgacggcgccgccgtggccgagatcggcgccctgggcagaagactgggcatcagcagactgcagggcctgggcgagggcggcgacgcctgggtgccccccacccccgcccccatggccaccagccagcccgaggaggacagcttcggccccggccccagacccgccggcgagtgggagggcgacagagccgaggcccaggcccccgacctgcagtgcagcctgcccagaagacccctgccctgcccccagtgcggcaagagcttcatccaccccaagagactgcagacccacgaggcccagtgcagaagaggcgccagcaccagaggcagcaccggcctgggcgccggcggcgccggccccggcggccccgccggcgtggacgccagcgccctgcccccccccgtgggcttcagaggcggccccgagcacgtggtgaaggtggtgggcggccacgtgctgtacgtgtgcgccgcctgcgagagaagctacgtgaccctgagcagcctgaagagacacagcaacgtgcacagctggagaagaaagtacccctgcagatactgcgagaaggtgttcgccctggccgagtacagaaccaagcacgaggtgtggcacaccggcgagagaagataccagtgcatcttctgctgggagaccttcgtgacctactacaacctgaagacccaccagagagccttccacggcatcagccccggcctgctggccagcgagaagacccccaacggcggctacaagcccaagctgaacaccctgaagctgtacagactgctgcccatgagagccgccaagagaccctacaagacctacagccagggcgcccccgaggcccccctgagccccaccctgaacacccccgcccccgtggccatgcccgccagccccccccccggccccccccccgcccccgagcccggccccccccccagcgtgatcaccttcgcccaccccgcccccagcgtgatcgtgcacggcggcagcagcagcggcggcggcggcagcggcaccgccagcaccggcggcagccaggccgccagcgtgatcacctacaccgccccccccagaccccccaagaagagagagtaccccccccccccccccgagcccgccgccacccccaccagccccgccaccgccgtgagccccgccaccgccgccggccccgccatggccaccaccaccgaggaggccaagggcagaaaccccagagccggcagaaccctgacctacaccgccaagcccgtgggcggcatcggcggcggcggcggcccccccaccggcgccggcagaggccccagccagctgcaggcccccccccccctgtgccagatcaccgtgagaatcggcgaggaggccatcgtgaagagaagaatcagcgagaccgacctgagacccggcgagctgagcggcgaggagatggaggagagcgaggaggacgaggaggaggaggacgaggaggaggaggaggaggacgaggaggagagcaaggccggcggcgaggaccagctgtggagaccctactacagctacaagcccaagagaaaggccggcgccgccggcggcgccagcgtgggcggcagcggcctgcccagaggcagaagaccccccagatggagacagaagctggagagaagaagctgggaggagacccccgccgccgagagccccgccggcagagccagaaccgagagaagacacagatgcggcgactgcgcccagaccttcaccaccctgagaaagctgagaaagcaccaggaggcccacggcggcggcagccacagcagcagagccggcagaagacccagcaccagattcacctgcccccactgcgccaaggtgtgcaagaccgccgccgccctgagcagacacggccagagacacgccgccgagagacccggcggcacccccacccccgtgatcgcctacagcaagggcagcgccggcaccagacccggcgacgtgaaggaggaggccccccaggagatgcaggtgagcagcagcagcggcgaggccggcggcggcagcaccgccgccgaggaggccagcgagaccgccagcctgcaggaccccatcatcagcggcggcgaggagccccccgtggtggccagcggcggcagctacgtgtacccccccgtgcaggagttccccctggccctgatcggcggcggcagagagcccggcggcggcagaggcaagagcggcagcgagggccccgtgggcgccggcgagggcgacagaatggagggcatcggcgccgccaaggtgaccttctaccccgagccctaccccctggtgtacggcccccagctgctggccgcctacccctacaacttcagcaacctggccgccctgcccgtggccctgaacatggtgctgcccgacgagaagggcgccggcgccctgcccttcctgcccggcgtgttcggctacgccgtgaacccccaggccgccccccccgccccccccaccccccccccccccaccctgcccccccccatcccccccaagggcgagggcgagagagccggcgtggagagaacccagaagggcgacgtgggctag

SEQ ID NO: 105577 - DNA, 3042 bp, synthetic construct; identical to SEQ ID NO: 105576
  misc_feature 1..3042: note = Description of Artificial Sequence: Synthetic coding sequence
  source 1..3042: mol_type = other DNA

SEQ ID NO: 105578 - DNA, 708 bp, synthetic construct
  misc_feature 1..708: note = Description of Artificial Sequence: Synthetic coding sequence
  source 1..708: mol_type = other DNA
atggagctgcccaactacagcagacagctgctgcagcagctgtacaccctgtgcaaggagcagcagttctgcgactgcaccatcagcatcggcaccatctacttcagagcccacaagctggtgctggccgccgccagcctgctgttcaagaccctgctggacaacaccgacaccatcagcatcgacgccagcgtggtgagccccgaggagttcgccctgctgctggagatgatgtacaccggcaagctgcccgtgggcaagcacaacttcagcaagatcatcagcctggccgacagcctgcagatgttcgacgtggccgtgagctgcaagaacctgctgaccagcctgctggccgccacccccggcggccccgtgaaggccgagaccgaggaggccgcccacagcgtgagccaggagatgagcgtgaacagccccaccgcccaggagagccagagaaacgccgagacccccgccgagacccccaccaccgccgaggcctgcagccccagccccgccgtgcagaccttcagcgaggccaagaagaccagcaccgagcccggctgcgagagaaagcactaccagctgaacttcctgctggagaacgagggcgtgttcagcgacgccctgatggtgacccaggacgtgctgaagaagctggagatgtgcagcaactgctgcgtgcccgtggaggccgtgcccatcttctag

SEQ ID NO: 105579 - DNA, 3384 bp, synthetic construct
  misc_feature 1..3384: note = Description of Artificial Sequence: Synthetic coding sequence
  source 1..3384: mol_type = other DNA
atggagctgcccaactacagcagacagctgctgcagcagctgtacaccctgtgcaaggagcagcagttctgcgactgcaccatcagcatcggcaccatctacttcagagcccacaagctggtgctggccgccgccagcctgctgttcaagaccctgctggacaacaccgacaccatcagcatcgacgccagcgtggtgagccccgaggagttcgccctgctgctggagatgatgtacaccggcaagctgcccgtgggcaagcacaacttcagcaagatcatcagcctggccgacagcctgcagatgttcgacgtggccgtgagctgcaagaacctgctgaccagcctggtgaactgcagcgtgcagggccaggtggtgagagacgtgagcgcccccagcagcgagaccttcagaaaggagcccgagaagccccaggtggagatcctgagcagcgagggcgccggcgagccccacagcagccccgagctggccgccacccccggcggccccgtgaaggccgagaccgaggaggccgcccacagcgtgagccaggagatgagcgtgaacagccccaccgcccaggagagccagagaaacgccgagacccccgccgagacccccaccaccgccgaggcctgcagccccagccccgccgtgcagaccttcagcgaggccaagaagaccagcaccgagcccggctgcgagagaaagcactaccagctgaacttcctgctggagaacgagggcgtgttcagcgacgccctgatggtgacccaggacgtgctgaagaagctggagatgtgcagcgagatcaagggcccccagaaggaggtgatcctgaactgctgcgagggcagaacccccaaggagaccatcgagaacctgctgcacagaatgaccgaggagaagaccctgaccgccgagggcctggtgaagctgctgcaggccgtgaagaccaccttccccaacctgggcctgctgctggagaagctgcagaagagcgccaccctgcccagcaccaccgtgcagcccagccccgacgactacggcaccgagctgctgagaagataccacgagaacctgagcgagatcttcaccgacaaccagatcctgctgaagatgatcagccacatgaccagcctggcccccggcgagagagaggtgatggagaagctggtgaagagagacagcggcagcggcggcttcaacagcctgatcagcgccgtgctggagaagcagaccctgagcgccaccgccatctggcagctgctgctggtggtgcaggagaccaagacctgccccctggacctgctgatggaggagatcagaagagagcccggcgccgacgccttcttcagagccgtgaccacccccgagcacgccaccctggagaccatcctgagacacaaccagctgatcctggaggccatccagcagaagatcgagtacaagctgttcaccagcgaggaggagcacctggccgagaccgtgaaggagatcctgagcatccccagcgagaccgccagccccgaggccagcctgagagccgtgctgagcagagccatggagaagagcgtgcccgccatcgagatctgccacctgctgtgcagcgtgcacaagagcttccccggcctgcagcccgtgatgcaggagctggcctacatcggcgtgctgaccaaggaggacggcgagaaggagacctggaaggtgagcaacaagttccacctggaggccaacaacaaggaggacgagaaggccgccaaggaggacagccagcccggcgagcagaacgaccagggcgagaccggcagcctgcccggccagcaggagaaggaggccagcgccagccccgaccccgccaagaagagcttcatctgcaaggcctgcgacaagagcttccacttctactgcagactgaaggtgcacatgaagagatgcagagtggccaagagcaagcaggtgcagtgcaaggagtgcagcgagaccaaggacagcaagaaggagctggacaagcaccagctggaggcccacggcgccggcggcgagcccgacgcccccaagaagaagaagaagagactgcccgtgacctgcgacctgtgcggcagagagttcgcccacgccagcggcatgcagtaccacaagctgaccgagcacttcgacgagaagcccttcagctgcgaggagtgcggcgccaagttcgccgccaacagcaccctgaagaaccacctgagactgcacaccggcgacagacccttcatgtgcaagcactgcctgatgaccttcacccaggccagcgccctggcctaccacaccaagaagaagcacagcgagggcaagatgtacgcctgccagtactgcgacgccgtgttcgcccagagcatcgagctgagcagacacgtgagaacccacaccggcgacaagccctacgtgtgcagagactgcggcaagggcttcagacaggccaacggcctgagcatccacctgcacaccttccacaacatcgaggacccctacgactgcaagaagtgcagaatgagcttccccaccctgcaggaccacagaaagcacatccacgaggtgcacagcaaggagtaccacccctgccccacctgcggcaagatcttcagcgcccccagcatgctggagagacacgtggtgacccacgtgggcggcaagcccttcagctgcggcatctgcaacaaggcctaccagcagctgagcggcctgtggtaccacaacagaacccaccaccccgacgtgttcgccgcccagaaccacagaagcagcaagttcagcagcctgcagtgcagcagctgcgacaagaccttccccaacaccatcgagcacaagaagcacatcaaggccgagcacgccgacatgaagttccacgagtgcgaccagtgcaaggagctgttccccacccccgccctgctgcaggtgcacgtgaagtgccagcacagcggcagccagcccttcagatgcctgtactgcgccgccaccttcagattccccggcgccctgcagcaccacgtgaccaccgagcacttcaagcagagcgagaccaccttcccctgcgagctgtgcggcgagctgttcaccagccaggcccagctggacagccacctggagagcgagcaccccaaggtgatgagcaccgagacccaggccgccgccagccagatggcccaggtgatccagacccccgagcccgtggcccccaccgagcaggtgatcaccctggaggagacccagctggccggcagccaggtgttcgtgaccctgcccgacagccaggccagccaggccagcagcgagctggtggccgtgaccgtggaggacctgctggacggcaccgtgaccctgatctgcggcgaggccaagtag

SEQ ID NO: 105580 - DNA, 3720 bp, synthetic construct
  misc_feature 1..3720: note = Description of Artificial Sequence: Synthetic coding sequence
  source 1..3720: mol_type = other DNA
atggagctgcccaactacagcagacagctgctgcagcagctgtacaccctgtgcaaggagcagcagttctgcgactgcaccatcagcatcggcaccatctacttcagagcccacaagctggtgctggccgccgccagcctgctgttcaagaccctgctggacaacaccgacaccatcagcatcgacgccagcgtggtgagccccgaggagttcgccctgctgctggagatgatgtacaccggcaagctgcccgtgggcaagcacaacttcagcaagatcatcagcctggccgacagcctgcagatgttcgacgtggccgtgagctgcaagaacctgctgaccagcctggtgaactgcagcgtgcagggccaggtggtgagagacgtgagcgcccccagcagcgagaccttcagaaaggagcccgagaagccccaggtggagatcctgagcagcgagggcgccggcgagccccacagcagccccgagctggccgccacccccggcggccccgtgaaggccgagaccgaggaggccgcccacagcgtgagccaggagatgagcgtgaacagccccaccgcccaggagagccagagaaacgccgagacccccgccgagacccccaccaccgccgaggcctgcagccccagccccgccgtgcagaccttcagcgaggccaagaagaccagcaccgagcccggctgcgagagaaagcactaccagctgaacttcctgctggagaacgagggcgtgttcagcgacgccctgatggtgacccaggacgtgctgaagaagctggagatgtgcagcgagatcaagggcccccagaaggagatgatcgtgaagtgcttcgagggcgagggcggccacagcgccttccagagaatcctgggcaaggtgagagaggagagcctggacgtgcagaccgtggtgagcctgctgagactgtaccagtacagcaaccccgccgtgaagaccgccctgctggacagaaagcccgaggacgtggacaccgtgcagcccaagggcagcaccgaggagggcaagaccctgagcgtgctgctgctggagcacaaggaggacctgatccagtgcgtgacccagctgagacccatcatggagagcctggagaccgccaaggaggagttcctgaccggcaccgagaagagagtgatcctgaactgctgcgagggcagaacccccaaggagaccatcgagaacctgctgcacagaatgaccgaggagaagaccctgaccgccgagggcctggtgaagctgctgcaggccgtgaagaccaccttccccaacctgggcctgctgctggagaagctgcagaagagcgccaccctgcccagcaccaccgtgcagcccagccccgacgactacggcaccgagctgctgagaagataccacgagaacctgagcgagatcttcaccgacaaccagatcctgctgaagatgatcagccacatgaccagcctggcccccggcgagagagaggtgatggagaagctggtgaagagagacagcggcagcggcggcttcaacagcctgatcagcgccgtgctggagaagcagaccctgagcgccaccgccatctggcagctgctgctggtggtgcaggagaccaagacctgccccctggacctgctgatggaggagatcagaagagagcccggcgccgacgccttcttcagagccgtgaccacccccgagcacgccaccctggagaccatcctgagacacaaccagctgatcctggaggccatccagcagaagatcgagtacaagctgttcaccagcgaggaggagcacctggccgagaccgtgaaggagatcctgagcatccccagcgagaccgccagccccgaggccagcctgagagccgtgctgagcagagccatggagaagagcgtgcccgccatcgagatctgccacctgctgtgcagcgtgcacaagagcttccccggcctgcagcccgtgatgcaggagctggcctacatcggcgtgctgaccaaggaggacggcgagaaggagacctggaaggtgagcaacaagttccacctggaggccaacaacaaggaggacgagaaggccgccaaggaggacagccagcccggcgagcagaacgaccagggcgagaccggcagcctgcccggccagcaggagaaggaggccagcgccagccccgaccccgccaagaagagcttcatctgcaaggcctgcgacaagagcttccacttctactgcagactgaaggtgcacatgaagagatgcagagtggccaagagcaagcaggtgcagtgcaaggagtgcagcgagaccaaggacagcaagaaggagctggacaagcaccagctggaggcccacggcgccggcggcgagcccgacgcccccaagaagaagaagaagagactgcccgtgacctgcgacctgtgcggcagagagttcgcccacgccagcggcatgcagtaccacaagctgaccgagcacttcgacgagaagcccttcagctgcgaggagtgcggcgccaagttcgccgccaacagcaccctgaagaaccacctgagactgcacaccggcgacagacccttcatgtgcaagcactgcctgatgaccttcacccaggccagcgccctggcctaccacaccaagaagaagcacagcgagggcaagatgtacgcctgccagtactgcgacgccgtgttcgcccagagcatcgagctgagcagacacgtgagaacccacaccggcgacaagccctacgtgtgcagagactgcggcaagggcttcagacaggccaacggcctgagcatccacctgcacaccttccacaacatcgaggacccctacgactgcaagaagtgcagaatgagcttccccaccctgcaggaccacagaaagcacatccacgaggtgcacagcaaggagtaccacccctgccccacctgcggcaagatcttcagcgcccccagcatgctggagagacacgtggtgacccacgtgggcggcaagcccttcagctgcggcatctgcaacaaggcctaccagcagctgagcggcctgtggtaccacaacagaacccaccaccccgacgtgttcgccgcccagaaccacagaagcagcaagttcagcagcctgcagtgcagcagctgcgacaagaccttccccaacaccatcgagcacaagaagcacatcaaggccgagcacgccgacatgaagttccacgagtgcgaccagtgcaaggagctgttccccacccccgccctgctgcaggtgcacgtgaagtgccagcacagcggcagccagcccttcagatgcctgtactgcgccgccaccttcagattccccggcgccctgcagcaccacgtgaccaccgagcacttcaagcagagcgagaccaccttcccctgcgagctgtgcggcgagctgttcaccagccaggcccagctggacagccacctggagagcgagcaccccaaggtgatgagcaccgagacccaggccgccgccagccagatggcccaggtgatccagacccccgagcccgtggcccccaccgagcaggtgatcaccctggaggagacccagctggccggcagccaggtgttcgtgaccctgcccgacagccaggccagccaggccagcagcgagctggtggccgtgaccgtggaggacctgctggacggcaccgtgaccctgatctgcggcgaggccaagtag

SEQ ID NO: 105581 - DNA, 1362 bp, synthetic construct
  misc_feature 1..1362: note = Description of Artificial Sequence: Synthetic coding sequence
  source 1..1362: mol_type = other DNA
atggagctgcccaactacagcagacagctgctgcagcagctgtacaccctgtgcaaggagcagcagttctgcgactgcaccatcagcatcggcaccatctacttcagagcccacaagctggtgctggccgccgccagcctgctgttcaagaccctgctggacaacaccgacaccatcagcatcgacgccagcgtggtgagccccgaggagttcgccctgctgctggagatgatgtacaccggcaagctgcccgtgggcaagcacaacttcagcaagatcatcagcctggccgacagcctgcagatgttcgacgtggccgtgagctgcaagaacctgctgaccagcctggtgaactgcagcgtgcagggccaggtggtgagagacgtgagcgcccccagcagcgagaccttcagaaaggagcccgagaagccccaggtggagatcctgagcagcgagggcgccggcgagccccacagcagccccgagctggccgccacccccggcggccccgtgaaggccgagaccgaggaggccgcccacagcgtgagccaggagatgagcgtgaacagccccaccgcccaggagagccagagaaacgccgagacccccgccgagacccccaccaccgccgaggcctgcagccccagccccgccgtgcagaccttcagcgaggccaagaagaccagcaccgagcccggctgcgagagaaagcactaccagctgaacttcctgctggagaacgagggcgtgttcagcgacgccctgatggtgacccaggacgtgctgaagaagctggagatgtgcagcgagatcaagggcccccagaaggagatgatcgtgaagtgcttcgagggcgagggcggccacagcgccttccagagaatcctgggcaaggtgagagaggagagcctggacgtgcagaccgtggtgagcctgctgagactgtaccagtacagcaaccccgccgtgaagaccgccctgctggacagaaagcccgaggacgtggacaccgtgcagcccaagggcagcaccgaggagggcaagaccctgagcgtgctgctgctggagcacaaggaggacctgatccagtgcgtgacccagctgagacccatcatggagagcctggagaccgccaaggaggagttcctgaccggcaccgagaagagagtgatcctgaactgctgcgagggcagaacccccaaggagaccatcgagaacctgctgcacagaatgaccgaggagaagaccctgaccgccgagggcctggtgaagctgctgcaggccgtgaagaccaccttccccaacctgggcctgctgctggagaagctgcagaagagcgccaccctgcccagcaccacctag

SEQ ID NO: 105582 - DNA, 3720 bp, synthetic construct; identical to SEQ ID NO: 105580
  misc_feature 1..3720: note = Description of Artificial Sequence: Synthetic coding sequence
  source 1..3720: mol_type = other DNA

SEQ ID NO: 105583 - DNA, 1269 bp, synthetic construct
  misc_feature 1..1269: note = Description of Artificial Sequence: Synthetic coding sequence
  source 1..1269: mol_type = other DNA
atggagttccccgagcacggcggcagactgctgggcagactgagacagcagagagagctgggcttcctgtgcgactgcaccgtgctggtgggcgacgccagattccccgcccacagagccgtgctggccgcctgcagcgtgtacttccacctgttctacagagacagacccgccggcagcagagacaccgtgagactgaacggcgacatcgtgaccgcccccgccttcggcagactgctggacttcatgtacgagggcagactggacctgagaagcctgcccgtggaggacgtgctggccgccgccagctacctgcacatgtacgacatcgtgaaggtgtgcaagggcagactgcaggagaaggacagaagcctggaccccggcaaccccgcccccggcgccgagcccgcccagcccccctgcccctggcccgtgtggaccgccgacctgtgccccgccgccagaaaggccaagctgccccccttcggcgtgaaggccgccctgccccccagagccagcggcccccccccctgccaggtgcccgaggagagcgaccaggccctggacctgagcctgaagagcggccccagacaggagagagtgcaccccccctgcgtgctgcagacccccctgtgcagccagagacagcccggcgcccagcccctggtgaaggacgagagagacagcctgagcgagcaggaggagagcagcagcagcagaagcccccacagcccccccaagcccccccccgtgcccgccgccaagggcctggtggtgggcctgcagcccctgcccctgagcggcgagggcagcagagagctggagctgggcgccggcagactggccagcgaggacgagctgggccccggcggccccctgtgcatctgccccctgtgcagcaagctgttccccagcagccacgtgctgcagctgcacctgagcgcccacttcagagagagagacagcaccagagccagactgagccccgacggcgtggcccccacctgccccctgtgcggcaagaccttcagctgcacctacaccctgaagagacacgagagaacccacagcggcgagaagccctacacctgcgtgcagtgcggcaagagcttccagtacagccacaacctgagcagacacaccgtggtgcacaccagagagaagccccacgcctgcagatggtgcgagagaagattcacccagagcggcgacctgtacagacacgtgagaaagttccactgcggcctggtgaagagcctgctggtgtag

SEQ ID NO: 105584 - DNA, 1269 bp, synthetic construct; identical to SEQ ID NO: 105583
  misc_feature 1..1269: note = Description of Artificial Sequence: Synthetic coding sequence
  source 1..1269: mol_type = other DNA

SEQ ID NO: 105585 - DNA, 1815 bp, synthetic construct
  misc_feature 1..1815: note = Description of Artificial Sequence: Synthetic coding sequence
  source 1..1815: mol_type = other DNA
atggccagcacctgggccatccaggcccacatggaccaggacgagcccctggaggtgaagatcgaggaggagaagtacaccaccagacaggactgggacctgagaaagaacaacacccacagcagagaggtgttcagacagtacttcagacagttctgctaccaggagaccagcggccccagagaggccctgagcagactgagagagctgtgccaccagtggctgagacccgagacccacaccaaggagcagatcctggagctgctggtgctggagcagttcctgaccatcctgcccgaggagctgcaggcctgggtgcaggagcagcaccccgagagcggcgaggaggtggtgaccgtgctggaggacctggagagagagctggacgagcccggcgagcaggtgagcgtgcacaccggcgagcaggagatgttcctgcaggagaccgtgagactgagaaaggagggcgagcccagcatgagcctgcagagcatgaaggcccagcccaagtacgagagccccgagctggagagccagcaggagcaggtgctggacgtggagaccggcaacgagtacggcaacctgaagcaggaggtgagcgaggagatggagccccacggcaagaccagcagcaagttcgagaacgacatgagcaagagcgccagatgcggcgagaccagagagcccgaggagatcaccgaggagcccagcgcctgcagcagagaggacaagcagcccacctgcgacgagaacggcgtgagcctgaccgagaacagcgaccacaccgagcaccagagaatctgccccggcgaggagagctacggctgcgacgactgcggcaaggccttcagccagcacagccacctgatcgagcaccagagaatccacaccggcgacagaccctacaagtgcgaggagtgcggcaaggccttcagaggcagaaccgtgctgatcagacacaagatcatccacaccggcgagaagccctacaagtgcaacgagtgcggcaaggccttcggcagatggagcgccctgaaccagcaccagagactgcacaccggcgagaagcactaccactgcaacgactgcggcaaggccttcagccagaaggccggcctgttccaccacatcaagatccacaccagagacaagccctaccagtgcacccagtgcaacaagagcttcagcagaagaagcatcctgacccagcaccagggcgtgcacaccggcgccaagccctacgagtgcaacgagtgcggcaaggccttcgtgtacaacagcagcctggtgagccaccaggagatccaccacaaggagaagtgctaccagtgcaaggagtgcggcaagagcttcagccagagcggcctgatccagcaccagagaatccacaccggcgagaagccctacaagtgcgacgtgtgcgagaaggccttcatccagagaaccagcctgaccgagcaccagagaatccacaccggcgagagaccctacaagtgcgacaagtgcggcaaggccttcacccagagaagcgtgctgaccgagcaccagagaatccacaccggcgagagaccctacaagtgcgacgagtgcggcaacgccttcagaggcatcaccagcctgatccagcaccagagaatccacaccggcgagaagccctaccagtgcgacgagtgcggcaaggccttcagacagagaaagaagaccagctacaaggagatcctgctgaagaaccacagcgagccccaggccggcgtgaacctgctgctgagcagcctgatccccgagtggcagagctgcttcagaagagacctgtag

SEQ ID NO: 105586 - DNA, 1815 bp, synthetic construct; identical to SEQ ID NO: 105585
  misc_feature 1..1815: note = Description of Artificial Sequence: Synthetic coding sequence
  source 1..1815: mol_type = other DNA

SEQ ID NO: 105587 - DNA, 1476 bp, synthetic construct
  misc_feature 1..1476: note = Description of Artificial Sequence: Synthetic coding sequence
  source 1..1476: mol_type = other DNA
atggccatccccaagcacagcctgagccccgtgccctgggaggaggacagcttcctgcaggtgaaggtggaggaggaggaggaggccagcctgagccagggcggcgagagcagccacgaccacatcgcccacagcgaggccgccagactgagattcagacacttcagatacgaggaggccagcggcccccacgaggccctggcccacctgagagccctgtgctgccagtggctgcagcccgaggcccacagcaaggagcagatcctggagctgctggtgctggagcagttcctgggcgccctgccccccgagatccaggcctgggtgggcgcccagagccccaagagcggcgaggaggccgccgtgctggtggaggacctgacccaggtgctggacaagagaggctgggaccccggcgccgagcccaccgaggccagctgcaagcagagcgacctgggcgagagcgagcccagcaacgtgaccgagaccctgatgggcggcgtgagcctgggccccgccttcgtgaaggcctgcgagcccgagggcagcagcgagagaagcggcctgagcggcgagatctggaccaagagcgtgacccagcagatccacttcaagaagaccagcggcccctacaaggacgtgcccaccgaccagagaggcagagagagcggcgccagcagaaacagcagcagcgcctggcccaacctgaccagccaggagaagccccccagcgaggacaagttcgacctggtggacgcctacggcaccgagcccccctacacctacagcggcaagagaagcagcaagtgcagagagtgcagaaagatgttccagagcgccagcgccctggaggcccaccagaagacccacagcagaaagaccccctacgcctgcagcgagtgcggcaaggccttcagcagaagcacccacctggcccagcaccaggtggtgcacaccggcgccaagccccacgagtgcaaggagtgcggcaaggccttcagcagagtgacccacctgacccagcaccagagaatccacaccggcgagaagccctacaagtgcggcgagtgcggcaagaccttcagcagaagcacccacctgacccagcaccagagagtgcacaccggcgagagaccctacgagtgcgacgcctgcggcaaggccttcagccagagcacccacctgacccagcaccagagaatccacaccggcgagaagccctacaagtgcgacgcctgcggcagagccttcagcgactgcagcgccctgatcagacacctgagaatccacagcggcgagaagccctaccagtgcaaggtgtgccccaaggccttcgcccagagcagcagcctgatcgagcaccagagaatccacaccggcgagaagccctacaagtgcagcgactgcggcaaggccttcagcagaagcagcgccctgatggtgcacctgagaatccacatcaccgtgctgcagtag

SEQ ID NO: 105588 - DNA, 1302 bp, synthetic construct
  misc_feature 1..1302: note = Description of Artificial Sequence: Synthetic coding sequence
  source 1..1302: mol_type = other DNA
atggccctggacctgagaaccatcttccagtgcgagcccagcgagaacaacctgggcagcgagaacagcgccttccagcagagccagggccccgccgtgcagagagaggagggcatcagcgagttcagcagaatggtgctgaacagcttccaggacagcaacaacagctacgccagacaggagctgcagagactgtacagaatcttccacagctggctgcagcccgagaagcacagcaaggacgagatcatcagcctgctggtgctggagcagttcatgatcggcggccactgcaacgacaaggccagcgtgaaggagaagtggaagagcagcggcaagaacctggagagattcatcgaggacctgaccgacgacagcatcaacccccccgccctggtgcacgtgcacatgcagggccaggaggccctgttcagcgaggacatgcccctgagagacgtgatcgtgcacctgaccaagcaggtgaacgcccagaccaccagagaggccaacatgggcacccccagccagaccagccaggacaccagcctggagaccggccagggctacgaggacgagcaggacggctggaacagcagcagcaagaccaccagagtgaacgagaacatcaccaaccagggcaaccagatcgtgagcctgatcatcatccaggaggagaacggccccagacccgaggagggcggcgtgagcagcgacaacccctacaacagcaagagagccgagctggtgaccgccagaagccaggagggcagcatcaacggcatcaccttccagggcgtgcccatggtgatgggcgccggctgcatcagccagcccgagcagagcagccccgagagcgccctgacccaccagagcaacgagggcaacagcacctgcgaggtgcaccagaagggcagccacggcgtgcagaagagctacaagtgcgaggagtgccccaaggtgttcaagtacctgtgccacctgctggcccaccagagaagacacagaaacgagagacccttcgtgtgccccgagtgccagaagggcttcttccagatcagcgacctgagagtgcaccagatcatccacaccggcaagaagcccttcacctgcagcatgtgcaagaagagcttcagccacaagaccaacctgagaagccacgagagaatccacaccggcgagaagccctacacctgccccttctgcaagaccagctacagacagagcagcacctaccacagacacatgagaacccacgagaagatcaccctgcccagcgtgcccagcacccccgaggccagctag

SEQ ID NO: 105589 - DNA, 2433 bp, synthetic construct
  misc_feature 1..2433: note = Description of Artificial Sequence: Synthetic coding sequence
  source 1..2433: mol_type = other DNA
atgcccaaccagggcgaggactgctacttcttcttctacagcacctgcaccaagggcgacagctgccccttcagacactgcgaggccgccatcggcaacgagaccgtgtgcaccctgtggcaggagggcagatgcttcagacaggtgtgcagattcagacacatggagatcgacaagaagagaagcgagatcccctgctactgggagaaccagcccaccggctgccagaagctgaactgcgccttccaccacaacagaggcagatacgtggacggcctgttcctgccccccagcaagaccgtgctgcccaccgtgcccgagagccccgaggaggaggtgaaggccagccagctgagcgtgcagcagaacaagctgagcgtgcagagcaaccccagcccccagctgagaagcgtgatgaaggtggagagcagcgagaacgtgcccagccccacccacccccccgtggtgatcaacgccgccgacgacgacgaggacgacgacgaccagttcagcgaggagggcgacgagaccaagacccccaccctgcagcccacccccgaggtgcacaacggcctgagagtgaccagcgtgagaaagcccgccgtgaacatcaagcagggcgagtgcctgaacttcggcatcaagaccctggaggagatcaagagcaagaagatgaaggagaagagcaagaagcagggcgagggcagcagcggcgtgagcagcctgctgctgcaccccgagcccgtgcccggccccgagaaggagaacgtgagaaccgtggtgagaaccgtgaccctgagcaccaagcagggcgaggagcccctggtgagactgagcctgaccgagagactgggcaagagaaagttcagcgccggcggcgacagcgacccccccctgaagagaagcctggcccagagactgggcaagaaggtggaggcccccgagaccaacatcgacaagacccccaagaaggcccaggtgagcaagagcctgaaggagagactgggcatgagcgccgaccccgacaacgaggacgccaccgacaaggtgaacaaggtgggcgagatccacgtgaagaccctggaggagatcctgctggagagagccagccagaagagaggcgagctgcagaccaagctgaagaccgagggccccagcaagaccgacgacagcaccagcggcgccagaagcagcagcaccatcagaatcaagaccttcagcgaggtgctggccgagaagaagcacagacagcaggaggccgagagacagaagagcaagaaggacaccacctgcatcaagctgaagatcgacagcgagatcaagaagaccgtggtgctgccccccatcgtggccagcagaggccagagcgaggagcccgccggcaagaccaagagcatgcaggaggtgcacatcaagaccctggaggagatcaagctggagaaggccctgagagtgcagcagagcagcgagagcagcaccagcagccccagccagcacgaggccacccccggcgccagaagactgctgagaatcaccaagagaaccggcatgaaggaggagaagaacctgcaggagggcaacgaggtggacagccagagcagcatcagaaccgaggccaaggaggccagcggcgagaccaccggcgtggacatcaccaagatccaggtgaagagatgcgagaccatgagagagaagcacatgcagaagcagcaggagagagagaagagcgtgctgacccccctgagaggcgacgtggccagctgcaacacccaggtggccgagaagcccgtgctgaccgccgtgcccggcatcaccagacacctgaccaagagactgcccaccaagagcagccagaaggtggaggtggagaccagcggcatcggcgacagcctgctgaacgtgaagtgcgccgcccagaccctggagaagagaggcaaggccaagcccaaggtgaacgtgaagcccagcgtggtgaaggtggtgagcagccccaagctggcccccaagagaaaggccgtggagatgcacgccgccgtgatcgccgccgtgaagcccctgagcagcagcagcgtgctgcaggagccccccgccaagaaggccgccgtggccgtggtgcccctggtgagcgaggacaagagcgtgaccgtgcccgaggccgagaaccccagagacagcctggtgctgccccccacccagagcagcagcgacagcagcccccccgaggtgagcggccccagcagcagccagatgagcatgaagaccagaagactgagcagcgccagcaccggcaagccccccctgagcgtggaggacgacttcgagaagctgatctgggagatcagcggcggcaagctggaggccgagatcgacctggaccccggcaaggacgaggacgacctgctgctggagctgagcgagatgatcgacagctag

SEQ ID NO: 105590 - DNA, 2433 bp, synthetic construct; identical to SEQ ID NO: 105589
  misc_feature 1..2433: note = Description of Artificial Sequence: Synthetic coding sequence
  source 1..2433: mol_type = other DNA

SEQ ID NO: 105591 - DNA, 2433 bp, synthetic construct; identical to SEQ ID NO: 105589
  misc_feature 1..2433: note = Description of Artificial Sequence: Synthetic coding sequence
  source 1..2433: mol_type = other DNA

SEQ ID NO: 105592 - DNA, 2433 bp, synthetic construct; identical to SEQ ID NO: 105589
  misc_feature 1..2433: note = Description of Artificial Sequence: Synthetic coding sequence
  source 1..2433: mol_type = other DNA

SEQ ID NO: 105593 - DNA, 153 bp, synthetic construct
  misc_feature 1..153: note = Description of Artificial Sequence: Synthetic coding sequence
  source 1..153: mol_type = other DNA
atgcccaaccagggcgaggactgctacttcttcttctacagcacctgcaccaagggcgacagctgccccttcagacactgcgaggccgccatcggcaacgagaccgtgtgcaccctgtggcaggagggcagatgcttcagacaggtgtgctag

SEQ ID NO: 105594 - DNA, 1548 bp, synthetic construct
  misc_feature 1..1548: note = Description of Artificial Sequence: Synthetic coding sequence
  source 1..1548: mol_type = other DNA
atgcccaaccagggcgaggactgctacttcttcttctacagcacctgcaccaagggcgacagctgccccttcagacactgcgaggccgccatcggcaacgagaccgtgtgcaccctgtggcaggagggcagatgcttcagacaggtgtgcagattcagacacatggagatcgacaagaagagaagcgagatcccctgctactgggagaaccagcccaccggctgccagaagctgaactgcgccttccaccacaacagaggcagatacgtggacggcctgttcctgccccccagcaagaccgtgctgcccaccgtgcccgagagccccgaggaggaggtgaaggccagccagctgagcgtgcagcagaacaagctgagcgtgcagagcaaccccagcccccagctgagaagcgtgatgaaggtggagagcagcgagaacgtgcccagccccacccacccccccgtggtgatcaacgccgccgacgacgacgaggacgacgacgaccagttcagcgaggagggcgacgagaccaagacccccaccctgcagcccacccccgaggtgcacaacggcctgagagtgaccagcgtgagaaagcccgccgtgaacatcaagcagggcgagtgcctgaacttcggcatcaagaccctggaggagatcaagagcaagaagatgaaggagaagagcaagaagcagggcgagggcagcagcggcgtgagcagcctgctgctgcaccccgagcccgtgcccggccccgagaaggagaacgtgagaaccgtggtgagaaccgtgaccctgagcaccaagcagggcgaggagcccctggtgagactgagcctgaccgagagactgggcaagagaaagttcagcgccggcggcgacagcgacccccccctgaagagaagcctggcccagagactgggcaagaaggtggaggcccccgagaccaacatcgacaagacccccaagaaggcccaggtgagcaagagcctgaaggagagactgggcatgagcgccgaccccgacaacgaggacgccaccgacaaggtgaacaaggtgggcgagatccacgtgaagaccctggaggagatcctgctggagagagccagccagaagagaggcgagctgcagaccaagctgaagaccgagggccccagcaagaccgacgacagcaccagcggcgccagaagcagcagcaccatcagaatcaagaccttcagcgaggtgctggccgagaagaagcacagacagcaggaggccgagagacagaagagcaagaaggacaccacctgcatcaagctgaagatcgacagcgagatcaagaagaccgtggtgctgccccccatcgtggccagcagaggccagagcgaggagcccgccggcaagaccaagagcatgcaggaggtgcacatcaagaccctggaggagatcaagctggagaaggccctgagagtgcagcagagcagcgagagcagcaccagcagccccagccagcacgaggccacccccggcgccagaagactgctgagaatcaccaagagaacctag

SEQ ID NO: 105595 - DNA, 2271 bp, synthetic construct
  misc_feature 1..2271: note = Description of Artificial Sequence: Synthetic coding sequence
  source 1..2271: mol_type = other DNA
atggagatcgacaagaagagaagcgagatcccctgctactgggagaaccagcccaccggctgccagaagctgaactgcgccttccaccacaacagaggcagatacgtggacggcctgttcctgccccccagcaagaccgtgctgcccaccgtgcccgagagccccgaggaggaggtgaaggccagccagctgagcgtgcagcagaacaagctgagcgtgcagagcaaccccagcccccagctgagaagcgtgatgaaggtggagagcagcgagaacgtgcccagccccacccacccccccgtggtgatcaacgccgccgacgacgacgaggacgacgacgaccagttcagcgaggagggcgacgagaccaagacccccaccctgcagcccacccccgaggtgcacaacggcctgagagtgaccagcgtgagaaagcccgccgtgaacatcaagcagggcgagtgcctgaacttcggcatcaagaccctggaggagatcaagagcaagaagatgaaggagaagagcaagaagcagggcgagggcagcagcggcgtgagcagcctgctgctgcaccccgagcccgtgcccggccccgagaaggagaacgtgagaaccgtggtgagaaccgtgaccctgagcaccaagcagggcgaggagcccctggtgagactgagcctgaccgagagactgggcaagagaaagttcagcgccggcggcgacagcgacccccccctgaagagaagcctggcccagagactgggcaagaaggtggaggcccccgagaccaacatcgacaagacccccaagaaggcccaggtgagcaagagcctgaaggagagactgggcatgagcgccgaccccgacaacgaggacgccaccgacaaggtgaacaaggtgggcgagatccacgtgaagaccctggaggagatcctgctggagagagccagccagaagagaggcgagctgcagaccaagctgaagaccgagggccccagcaagaccgacgacagcaccagcggcgccagaagcagcagcaccatcagaatcaagaccttcagcgaggtgctggccgagaagaagcacagacagcaggaggccgagagacagaagagcaagaaggacaccacctgcatcaagctgaagatcgacagcgagatcaagaagaccgtggtgctgccccccatcgtggccagcagaggccagagcgaggagcccgccggcaagaccaagagcatgcaggaggtgcacatcaagaccctggaggagatcaagctggagaaggccctgagagtgcagcagagcagcgagagcagcaccagcagccccagccagcacgaggccacccccggcgccagaagactgctgagaatcaccaagagaaccggcatgaaggaggagaagaacctgcaggagggcaacgaggtggacagccagagcagcatcagaaccgaggccaaggaggccagcggcgagaccaccggcgtggacatcaccaagatccaggtgaagagatgcgagaccatgagagagaagcacatgcagaagcagcaggagagagagaagagcgtgctgacccccctgagaggcgacgtggccagctgcaacacccaggtggccgagaagcccgtgctgaccgccgtgcccggcatcaccagacacctgaccaagagactgcccaccaagagcagccagaaggtggaggtggagaccagcggcatcggcgacagcctgctgaacgtgaagtgcgccgcccagaccctggagaagagaggcaaggccaagcccaaggtgaacgtgaagcccagcgtggtgaaggtggtgagcagccccaagctggcccccaagagaaaggccgtggagatgcacgccgccgtgatcgccgccgtgaagcccctgagcagcagcagcgtgctgcaggagccccccgccaagaaggccgccgtggccgtggtgcccctggtgagcgaggacaagagcgtgaccgtgcccgaggccgagaaccccagagacagcctggtgctgccccccacccagagcagcagcgacagcagcccccccgaggtgagcggccccagcagcagccagatgagcatgaagaccagaagactgagcagcgccagcaccggcaagccccccctgagcgtggaggacgacttcgagaagctgatctgggagatcagcggcggcaagctggaggccgagatcgacctggaccccggcaaggacgaggacgacctgctgctggagctgagcgagatgatcgacagctag

SEQ ID NO: 105596 - DNA, 2433 bp, synthetic construct; identical to SEQ ID NO: 105589
  misc_feature 1..2433: note = Description of Artificial Sequence: Synthetic coding sequence
  source 1..2433: mol_type = other DNA

SEQ ID NO: 105597 - DNA, 1584 bp, synthetic construct
  misc_feature 1..1584: note = Description of Artificial Sequence: Synthetic coding sequence
  source 1..1584: mol_type = other DNA
atggagcaccccagcaagatggagttcttccagaagctgggctacgacagagaggacgtgctgagagtgctgggcaagctgggcgagggcgccctggtgaacgacgtgctgcaggagctgatcagaaccggcagcagacccggcgccctggagcaccccgccgcccccagactggtgcccagaggcagctgcggcgtgcccgacagcgcccagagaggccccggcaccgccctggaggaggacttcagaaccctggccagcagcctgagacccatcgtgatcgacggcagcaacgtggccatgagccacggcaacaaggagaccttcagctgcagaggcatcaagctggccgtggactggttcagagacagaggccacacctacatcaaggtgttcgtgcccagctggagaaaggacccccccagagccgacacccccatcagagagcagcacgtgctggccgagctggagagacaggccgtgctggtgtacacccccagcagaaaggtgcacggcaagagactggtgtgctacgacgacagatacatcgtgaaggtggcctacgagcaggacggcgtgatcgtgagcaacgacaactacagagacctgcagagcgagaaccccgagtggaagtggttcatcgagcagagactgctgatgttcagcttcgtgaacgacagattcatgccccccgacgaccccctgggcagacacggccccagcctgagcaacttcctgagcagaaagcccaagccccccgagcccagctggcagcactgcccctacggcaagaagtgcacctacggcatcaagtgcaagttctaccaccccgagagaccccaccacgcccagctggccgtggccgacgagctgagagccaagaccggcgccagacccggcgccggcgccgaggagcagagaccccccagagcccccggcggcagcgccggcgccagagccgcccccagagagcccttcgcccacagcctgccccccgccagaggcagccccgacctggccgccctgagaggcagcttcagcagactggccttcagcgacgacctgggccccctgggcccccccctgcccgtgcccgcctgcagcctgacccccagactgggcggccccgactgggtgagcgccggcggcagagtgcccggccccctgagcctgcccagccccgagagccagttcagccccggcgacctgccccccccccccggcctgcagctgcagcccagaggcgagcacagacccagagacctgcacggcgacctgctgagccccagaagaccccccgacgacccctgggccagaccccccagaagcgacagattccccggcagaagcgtgtgggccgagcccgcctggggcgacggcgccaccggcggcctgagcgtgtacgccaccgaggacgacgagggcgacgccagagccagagccagaatcgccctgtacagcgtgttccccagagaccaggtggacagagtgatggccgccttccccgagctgagcgacctggccagactgatcctgctggtgcagagatgccagagcgccggcgcccccctgggcaagccctag

SEQ ID NO: 105598 - DNA, 1584 bp, synthetic construct; identical to SEQ ID NO: 105597
  misc_feature 1..1584: note = Description of Artificial Sequence: Synthetic coding sequence
  source 1..1584: mol_type = other DNA

SEQ ID NO: 105599 - DNA, 966 bp, synthetic construct
  misc_feature 1..966: note = Description of Artificial Sequence: Synthetic coding sequence
  source 1..966: mol_type = other DNA
atggagcaccccagcaagatggagttcttccagaagctgggctacgacagagaggacgtgctgagagtgctgggcaagctgggcgagggcgccctggtgaacgacgtgctgcaggagctgatcagaaccggcagcagacccggcgccctggagcaccccgccgcccccagactggtgcccagaggcagctgcggcgtgcccgacagcgcccagagaggccccggcaccgccctggaggaggacttcagaaccctggccagcagcctgagacccatcgtgatcgacggcagcaacgtggccatgagccacggcaacaaggagaccttcagctgcagaggcatcaagctggccgtggactggttcagagacagaggccacacctacatcaaggtgttcgtgcccagctggagaaaggacccccccagagccgacacccccatcagagagcagcacgtgctggccgagctggagagacaggccgtgctggtgtacacccccagcagaaaggtgcacggcaagagactggtgtgctacgacgacagatacatcgtgaaggtggcctacgagcaggacggcgtgatcgtgagcaacgacaactacagagacctgcagagcgagaaccccgagtggaagtggttcatcgagcagagactgctgatgttcagcttcgtgaacgacagattcatgccccccgacgaccccctgggcagacacggccccagcctgagcaacttcctgagcagaaagcccaagccccccgagcccagctggcagcactgcccctacggcaagaagtgcacctacggcatcaagtgcaagttctaccaccccgagagaccccaccacgcccagctggccgtggccgacgagctgagagccaagaccggcgccagactgggcgtgagaggcagaccccccgccagcgccagacccgccgcccccgccgccggcagaacccccccctag

SEQ ID NO: 105600 - DNA, 966 bp, synthetic construct
  misc_feature 1..966: note = Description of Artificial Sequence: Synthetic coding sequence
  source 1..966: mol_type = other DNA
atggagcaccccagcaagatggagttcttccagaagctgggctacgacagagaggacgtgctgagagtgctgggcaagctgggcgagggcgccctggtgaacgacgtgctgcaggagctgatcagaaccggcagcagacccggcgccctggagcaccccgccgcccccagactggtgcccagaggcagctgcggcgtgcccgacagcgcccagagaggccccggcaccgccctggaggaggacttcagaaccctggccagcagcctgagacccatcgtgatcgacggcagcaacgtggccatgagccacggcaacaaggagaccttcagctgcagaggcatcaagctggccgtggactggttcagagacagaggccacacctacatcaaggtgttcgtgcccagctggagaaaggacccccccagagccgacacccccatcagagagcagcacgtgctggccgagctggagagacaggccgtgctggtgtacacccccagcagaaaggtgcacggcaagagactggtgtgctacgacgacagatacatcgtgaaggtggcctacgagcaggacggcgtgatcgtgagcaacgacaactacagagacctgcagagcgagaaccccgagtggaagtggttcatcgagcagagactgctgatgttcagcttcgtgaacgacagattcatgccccccgacgaccccctgggcagacacggccccagcctgagcaacttcctgagcagaaagcccaagccccccgagcccagctggcagcactgcccctacggcaagaagtgcacctacggcatcaagtgcaagttctaccaccccgagagaccccaccacgcccagctggccgtggccgacgagctgagagccaagaccggcgccagacccgtgctgcccggcagaccccccgccagcgccagacccgccgcccccgccgccggcagaacccccccctag

SEQ ID NO: 105601 - DNA, 2211 bp, synthetic construct
  misc_feature 1..2211: note = Description of Artificial Sequence: Synthetic coding sequence
  source 1..2211: mol_type = other DNA
atggagatcggcaccgagatcagcagaaagatcagaagcgccatcaagggcaagctgcaggagctgggcgcctacgtggacgaggagctgcccgactacatcatggtgatggtggccaacaagaagagccaggaccagatgaccgaggacctgagcctgttcctgggcaacaacaccatcagattcaccgtgtggctgcacggcgtgctggacaagctgagaagcgtgaccaccgagcccagcagcctgaagagcagcgacaccaacatcttcgacagcaacgtgcccagcaacaagagcaacttcagcagaggcgacgagagaagacacgaggccgccgtgccccccctggccatccccagcgccagacccgagaagagagacagcagagtgagcaccagcagccaggagagcaagaccaccaacgtgagacagacctacgacgacggcgccgccaccagactgatgagcaccgtgaagcccctgagagagcccgcccccagcgaggacgtgatcgacatcaagcccgagcccgacgacctgatcgacgaggacctgaacttcgtgcaggagaaccccctgagccagaagaagcccaccgtgaccctgacctacggcagcagcagacccagcatcgagatctacagaccccccgccagcagaaacgccgacagcggcgtgcacctgaacagactgcagttccagcagcagcagaacagcatccacgccgccaagcagctggacatgcagagcagctgggtgtacgagaccggcagactgtgcgagcccgaggtgctgaacagcctggaggagacctacagccccttcttcagaaacaacagcgagaagatgagcatggaggacgagaacttcagaaagagaaagctgcccgtggtgagcagcgtggtgaaggtgaagaagttcaaccacgacggcgaggaggaggaggaggacgacgactacggcagcagaaccggcagcatcagcagcagcgtgagcgtgcccgccaagcccgagagaagacccagcctgccccccagcaagcaggccaacaagaacctgatcctgaaggccatcagcgaggcccaggagagcgtgaccaagaccaccaactacagcaccgtgccccagaagcagaccctgcccgtggcccccagaaccagaaccagccaggaggagctgctggccgaggtggtgcagggccagagcagaacccccagaatcagcccccccatcaaggaggaggagaccaagggcgacagcgtggagaagaaccagggcacccagcagagacagctgctgagcagactgcagatcgaccccgtgatggccgagaccctgcagatgagccaggactactacgacatggagagcatggtgcacgccgacaccagaagcttcatcctgaagaagcccaagctgagcgaggaggtggtggtggcccccaaccaggagagcggcatgaagaccgccgacagcctgagagtgctgagcggccacctgatgcagaccagagacctggtgcagcccgacaagcccgccagccccaagttcatcgtgaccctggacggcgtgcccagcccccccggctacatgagcgaccaggaggaggacatgtgcttcgagggcatgaagcccgtgaaccagaccgccgccagcaacaagggcctgagaggcctgctgcacccccagcagctgcacctgctgagcagacagctggaggaccccaacggcagcttcagcaacgccgagatgagcgagctgagcgtggcccagaagcccgagaagctgctggagagatgcaagtactggcccgcctgcaagaacggcgacgagtgcgcctaccaccaccccatcagcccctgcaaggccttccccaactgcaagttcgccgagaagtgcctgttcgtgcaccccaactgcaagtacgacgccaagtgcaccaagcccgactgccccttcacccacgtgagcagaagaatccccgtgctgagccccaagcccgccgtggccccccccgccccccccagcagcagccagctgtgcagatacttccccgcctgcaagaagatggagtgccccttctaccaccccaagcactgcagattcaacacccagtgcaccagacccgactgcaccttctaccaccccaccatcaacgtgccccccagacacgccctgaagtggatcagaccccagaccagcgagtag

SEQ ID NO: 105602 - DNA, 1740 bp, synthetic construct
  misc_feature 1..1740: note = Description of Artificial Sequence: Synthetic coding sequence
  source 1..1740: mol_type = other DNA
atggagatcggcaccgagatcagcagaaagatcagaagcgccatcaagggcaagctgcaggagctgggcgcctacgtggacgaggagctgcccgactacatcatggtgatggtggccaacaagaagagccaggaccagatgaccgaggacctgagcctgttcctgggcaacaacaccatcagattcaccgtgtggctgcacggcgtgctggacaagctgagaagcgtgaccaccgagcccagcagcctgaagagcagcgacaccaacatcttcgacagcaacgtgcccagcaacaagagcaacttcagcagaggcgacgagagaagacacgaggccgccgtgccccccctggccatccccagcgccagacccgagaagagagacagcagagtgagcaccagcagccaggagagcaagaccaccaacgtgagacagacctacgacgacggcgccgccaccagactgatgagcaccgtgaagcccctgagagagcccgcccccagcgaggacgtgatcgacatcaagcccgagcccgacgacctgatcgacgaggacctgaacttcgtgcaggagaaccccctgagccagaagaagcccaccgtgaccctgacctacggcagcagcagacccagcatcgagatctacagaccccccgccagcagaaacgccgacagcggcgtgcacctgaacagactgcagttccagcagcagcagaacagcatccacgccgccaagcagctggacatgcagagcagctgggtgtacgagaccggcagactgtgcgagcccgaggtgctgaacagcctggaggagacctacagccccttcttcagaaacaacagcgagaagatgagcatggaggacgagaacttcagaaagagaaagctgcccgtggtgagcagcgtggtgaaggtgaagaagttcaaccacgacggcgaggaggaggaggaggacgacgactacggcagcagaaccggcagcatcagcagcagcgtgagcgtgcccgccaagcccgagagaagacccagcctgccccccagcaagcaggccaacaagaacctgatcctgaaggccatcagcgaggcccaggagagcgtgaccaagaccaccaactacagcaccgtgccccagaagcagaccctgcccgtggcccccagaaccagaaccagccaggaggagctgctggccgaggtggtgcagggccagagcagaacccccagaatcagcccccccatcaaggaggaggagaccaagggcgacagcgtggagaagaaccaggccgagatgagcgagctgagcgtggcccagaagcccgagaagctgctggagagatgcaagtactggcccgcctgcaagaacggcgacgagtgcgcctaccaccaccccatcagcccctgcaaggccttccccaactgcaagttcgccgagaagtgcctgttcgtgcaccccaactgcaagtacgacgccaagtgcaccaagcccgactgccccttcacccacgtgagcagaagaatccccgtgctgagccccaagcccgtggccccccccgccccccccagcagcagccagctgtgcagatacttccccgcctgcaagaagatggagtgccccttctaccaccccaagcactgcagattcaacacccagtgcaccagacccgactgcaccttctaccaccccaccatcaacgtgccccccagacacgccctgaagtggatcagaccccagaccagcgagtag

SEQ ID NO: 105603 - DNA, 921 bp, synthetic construct
  misc_feature 1..921: note = Description of Artificial Sequence: Synthetic coding sequence
  source 1..921: mol_type = other DNA
atgagaatgagcagcaagttccccagcccccccctgcccatcttcctgccccccgagcccgtggacctgggcagcatcaccagcagcagctgcagcctgaacgagctggacaacatcagccacctgctgagaaagatcagcgccgacatcaacgagatcaagggcatgaaggccgccatcctgaccgtggaggccaacctgttcgacctgaacgtgagagtgagcaagaacgaggccaagatcagcagcctggaggtgaagatgaacgagtacagcaccacctacgagtgcaacagacagttcgaggaccaggaggaggacaccgagagccagagcagaaccaccgacgtgaagatcatcggcttcctgagaaacgtggagaagggcacccagcagagacagctgctgagcagactgcagatcgaccccgtgatggccgagaccctgcagatgagccaggccgagatgagcgagctgagcgtggcccagaagcccgagaagctgctggagagatgcaagtactggcccgcctgcaagaacggcgacgagtgcgcctaccaccaccccatcagcccctgcaaggccttccccaactgcaagttcgccgagaagtgcctgttcgtgcaccccaactgcaagtacgacgccaagtgcaccaagcccgactgccccttcacccacgtgagcagaagaatccccgtgctgagccccaagcccgtggccccccccgccccccccagcagcagccagctgtgcagatacttccccgcctgcaagaagatggagtgccccttctaccaccccaagcactgcagattcaacacccagtgcaccagacccgactgcaccttctaccaccccaccatcaacgtgccccccagacacgccctgaagtggatcagaccccagaccagcgagtag

SEQ ID NO: 105604 - DNA, 1716 bp, synthetic construct
  misc_feature 1..1716: note = Description of Artificial Sequence: Synthetic coding sequence
  source 1..1716: mol_type = other DNA
atggtgatggtggccaacaagaagagccaggaccagatgaccgaggacctgagcctgttcctgggcaacaacaccatcagattcaccgtgtggctgcacggcgtgctggacaagctgagaagcgtgaccaccgagcccagcagcctgaagagcagcgacaccaacatcttcgacagcaacgtgcccagcaacaagagcaacttcagcagaggcgacgagagaagacacgaggccgccgtgccccccctggccatccccagcgccagacccgagaagagagacagcagagtgagcaccagcagccaggagagcaagaccaccaacgtgagacagacctacgacgacggcgccgccaccagactgatgagcaccgtgaagcccctgagagagcccgcccccagcgaggacgtgatcgacatcaagcccgagcccgacgacctgatcgacgaggacctgaacttcgtgcaggagaaccccctgagccagaagaagcccaccgtgaccctgacctacggcagcagcagacccagcatcgagatctacagaccccccgccagcagaaacgccgacagcggcgtgcacctgaacagactgcagttccagcagcagcagaacagcatccacgccgccaagcagctggacatgcagagcagctgggtgtacgagaccggcagactgtgcgagcccgaggtgctgaacagcctggaggagacctacagccccttcttcagaaacaacagcgagaagatgagcatggaggacgagaacttcagaaagagaaagctgcccgtggtgagcagcgtggtgaaggtgaagaagttcaaccacgacggcgaggaggaggaggaggacgacgactacggcagcagaaccggcagcatcagcagcagcgtgagcgtgcccgccaagcccgagagaagacccagcctgccccccagcaagcaggccaacaagaacctgatcctgaaggccatcagcgaggcccaggagagcgtgaccaagaccaccaactacagcaccgtgccccagaagcagaccctgcccgtggcccccagaaccagaaccagccaggaggagctgctggccgaggtggtgcagggccagagcagaacccccagaatcagcccccccatcaaggaggaggagaccaagggcgacagcgtggagaagaaccagggcacccagcagagacagctgctgagcagactgcagatcgaccccgtgatggccgagaccctgcagatgagccaggccgagatgagcgagctgagcgtggcccagaagcccgagaagctgctggagagatgcaagtactggcccgcctgcaagaacggcgacgagtgcgcctaccaccaccccatcagcccctgcaaggccttccccaactgcaagttcgccgagaagtgcctgttcgtgcaccccaactgcaagtacgacgccaagtgcaccaagcccgactgccccttcacccacgtgagcagaagaatccccgtgctgagccccaagcccgccgtggccccccccgccccccccagcagcagccagctgtgcagatacttccccgcctgcaagaagatggagtgccccttctaccaccccaagcactgcagattcaacacccagtgcaccagacccgactgcaccttctaccaccccaccatcaacgtgccccccagacacgccctgaagtggatcagaccccagaccagcgagtag

SEQ ID NO: 105605 - DNA, 2022 bp, synthetic construct
  misc_feature 1..2022: note = Description of Artificial Sequence: Synthetic coding sequence
  source 1..2022: mol_type = other DNA
atggagatcggcaccgagatcagcagaaagatcagaagcgccatcaagggcaagctgcaggagctgggcgcctacatcgacgaggagctgcccgactacatcatggtgatggtggccaacaagaagagccaggaccagatgaccgaggacctgagcctgttcctgggcaacaacaccatcagattcaccgtgtggctgcacggcgtgctggacaagctgagaagcgtgaccaccgagcccagcagcctgaagagcagcgacaccaacatcttcgacagcaacgtgcccagcaacaagagcaacttcagcagaggcgacgagagaagacacgaggccgccgtgccccccctggccatccccagcgccagacccgagaagagagacagcagagtgagcaccagcagccaggagagcaagaccaccaacgtgagacagacctacgacgacggcgccgccaccagactgatgagcaccgtgaagcccctgagagagcccgcccccagcgaggacgtgatcgacatcaagcccgagcccgacgacctgatcgacgaggacctgaacttcgtgcaggagaaccccctgagccagaagaagcccaccgtgaccctgacctacggcagcagcagacccagcatcgagatctacagaccccccgccagcagaaacgccgacagcggcgtgcacctgaacagactgcagttccagcagcagcagaacagcatccacgccgccaagcagctggacatgcagagcagctgggtgtacgagaccggcagactgtgcgagcccgaggtgctgaacagcctggaggagacctacagccccttcttcagaaacaacagcgagaagatgagcatggaggacgagaacttcagaaagagaaagctgcccgtggtgagcagcgtggtgaaggtgaagaagttcaaccacgacggcgaggaggaggaggaggacgacgactacggcagcagaaccggcagcatcagcagcagcgtgagcgtgcccgccaagcccgagagaagacccagcctgccccccagcaagcaggccaacaagaacctgatcctgaaggccatcagcgaggcccaggagagcgtgaccaagaccaccaactacagcaccgtgccccagaagcagaccctgcccgtggcccccagaaccagaaccagccaggaggagctgctggccgaggtggtgcagggccagagcagaacccccagaatcagcccccccatcaaggaggaggagaccaagggcgacagcgtggagaagaaccagggcacccagcagagacagctgctgagcagactgcagatcgaccccgtgatggccgagaccctgcagatgagccaggactactacgacatggagagcatggtgcacgccgacaccagaagcttcatcctgaagaagcccaagctgagcgaggaggtggtggtggcccccaaccaggagagcggcatgaagaccgccgacagcctgagagtgctgagcggccacctgatgcagaccagagacctggtgcagcccgacaagcccgccagccccaagttcatcgtgaccctggacggcgtgcccagcccccccggctacatgagcgaccaggaggaggacatgtgcttcgagggcatgaagcccgtgaaccagaccgccgccagcaacaagggcctgagaggcctgctgcacccccagcagctgcacctgctgagcagacagctggaggaccccaactgcaagtacgacgccaagtgcaccaagcccgactgccccttcacccacgtgagcagaagaatccccgtgctgagccccaagcccgccgtggccccccccgccccccccagcagcagccagctgtgcagatacttccccgcctgcaagaagatggagtgccccttctaccaccccaagcactgcagattcaacacccagtgcaccagacccgactgcaccttctaccaccccaccatcaacgtgccccccagacacgccctgaagtggatcagaccccagaccagcgagtag

SEQ ID NO: 105606 - DNA, 1716 bp, synthetic construct; identical to SEQ ID NO: 105604
  misc_feature 1..1716: note = Description of Artificial Sequence: Synthetic coding sequence
  source 1..1716: mol_type = other DNA

SEQ ID NO: 105607 - DNA, 1758 bp, synthetic construct
  misc_feature 1..1758: note = Description of Artificial Sequence: Synthetic coding sequence
  source 1..1758: mol_type = other DNA
atggagatcggcaccgagatcagcagaaagatcagaagcgccatcaagggcaagctgcaggagctgggcgcctacgtggacgaggagctgcccgactacatcatggtgatggtggccaacaagaagagccaggaccagatgaccgaggacctgagcctgttcctgggcaacaacaccatcagattcaccgtgtggctgcacggcgtgctggacaagctgagaagcgtgaccaccgagcccagcagcctgaagagcagcgacaccaacatcttcgacagcaacgtgccccccctggccatccccagcgccagacccgagaagagagacagcagagtgagcaccagcagccaggagagcaagaccaccaacgtgagacagacctacgacgacggcgccgccaccagactgatgagcaccgtgaagcccctgagagagcccgcccccagcgaggacgtgatcgacatcaagcccgagcccgacgacctgatcgacgaggacctgaacttcgtgcaggagaaccccctgagccagaagaagcccaccgtgaccctgacctacggcagcagcagacccagcatcgagatctacagaccccccgccagcagaaacgccgacagcggcgtgcacctgaacagactgcagttccagcagcagcagaacagcatccacgccgccaagcagctggacatgcagagcagctgggtgtacgagaccggcagactgtgcgagcccgaggtgctgaacagcctggaggagacctacagccccttcttcagaaacaacagcgagaagatgagcatggaggacgagaacttcagaaagagaaagctgcccgtggtgagcagcgtggtgaaggtgaagaagttcaaccacgacggcgaggaggaggaggaggacgacgactacggcagcagaaccggcagcatcagcagcagcgtgagcgtgcccgccaagcccgagagaagacccagcctgccccccagcaagcaggccaacaagaacctgatcctgaaggccatcagcgaggcccaggagagcgtgaccaagaccaccaactacagcaccgtgccccagaagcagaccctgcccgtggcccccagaaccagaaccagccaggaggagctgctggccgaggtggtgcagggccagagcagaacccccagaatcagcccccccatcaaggaggaggagaccaagggcgacagcgtggagaagaaccagggcacccagcagagacagctgctgagcagactgcagatcgaccccgtgatggccgagaccctgcagatgagccaggccgagatgagcgagctgagcgtggcccagaagcccgagaagctgctggagagatgcaagtactggcccgcctgcaagaacggcgacgagtgcgcctaccaccaccccatcagcccctgcaaggccttccccaactgcaagttcgccgagaagtgcctgttcgtgcaccccaactgcaagtacgacgccaagtgcaccaagcccgactgccccttcacccacgtgagcagaagaatccccgtgctgagccccaagcccgtggccccccccgccccccccagcagcagccagctgtgcagatacttccccgcctgcaagaagatggagtgccccttctaccaccccaagcactgcagattcaacacccagtgcaccagacccgactgcaccttctaccaccccaccatcaacgtgccccccagacacgccctgaagtggatcagaccccagaccagcgagtag

SEQ ID NO: 105608 - DNA, 2136 bp, synthetic construct
  misc_feature 1..2136: note = Description of Artificial Sequence: Synthetic coding sequence
  source 1..2136: mol_type = other DNA
atggagatcggcaccgagatcagcagaaagatcagaagcgccatcaagggcaagctgcaggagctgggcgcctacgtggacgaggagctgcccgactacatcatggtgatggtggccaacaagaagagccaggaccagatgaccgaggacctgagcctgttcctgggcaacaacaccatcagattcaccgtgtggctgcacggcgtgctggacaagctgagaagcgtgaccaccgagcccagcagcctgaagagcagcgacaccaacatcttcgacagcaacgtgcccagcaacaagagcaacttcagcagaggcgacgagagaagacacgaggccgccgtgccccccctggccatccccagcgccagacccgagaagagagacagcagagtgagcaccagcagccaggagagcaagaccaccaacgtgagacagacctacgacgacggcgccgccaccagactgatgagcaccgtgaagcccctgagagagcccgcccccagcgaggacgtgatcgacatcaagcccgagcccgacgacctgatcgacgaggacctgaacttcgtgcaggagaaccccctgagccagaagaagcccaccgtgaccctgacctacggcagcagcagacccagcatcgagatctacagaccccccgccagcagaaacgccgacagcggcgtgcacctgaacagactgcagttccagcagcagcagaacagcatccacgccgccaagcagctggacatgcagagcagctgggtgtacgagaccggcagactgtgcgagcccgaggtgctgaacagcctggaggagacctacagccccttcttcagaaacaacagcgagaagatgagcatggaggacgagaacttcagaaagagaaagctgcccgtggtgagcagcgtggtgaaggtgaagaagttcaaccacgacggcgaggaggaggaggaggacgacgactacggcagcagaaccggcagcatcagcagcagcgtgagcgtgcccgccaagcccgagagaagacccagcctgccccccagcaagcaggccaacaagaacctgatcctgaaggccatcagcgaggcccaggagagcgtgaccaagaccaccaactacagcaccgtgccccagaagcagaccctgcccgtggcccccagaaccagaaccagccaggaggagctgctggccgaggtggtgcagggccagagcagaacccccagaatcagcccccccatcaaggaggaggagaccaagggcgacagcgtggagaagaaccaggactactacgacatggagagcatggtgcacgccgacaccagaagcttcatcctgaagaagcccaagctgagcgaggaggtggtggtggcccccaaccaggagagcggcatgaagaccgccgacagcctgagagtgctgagcggccacctgatgcagaccagagacctggtgcagcccgacaagcccgccagccccaagttcatcgtgaccctggacggcgtgcccagcccccccggctacatgagcgaccaggaggaggacatgtgcttcgagggcatgaagcccgtgaaccagaccgccgccagcaacaagggcctgagaggcctgctgcacccccagcagctgcacctgctgagcagacagctggaggaccccaacggcagcttcagcaacgccgagatgagcgagctgagcgtggcccagaagcccgagaagctgctggagagatgcaagtactggcccgcctgcaagaacggcgacgagtgcgcctaccaccaccccatcagcccctgcaaggccttccccaactgcaagttcgccgagaagtgcctgttcgtgcaccccaactgcaagtacgacgccaagtgcaccaagcccgactgccccttcacccacgtgagcagaagaatccccgtgctgagccccaagcccgccgtggccccccccgccccccccagcagcagccagctgtgcagatacttccccgcctgcaagaagatggagtgccccttctaccaccccaagcactgcagattcaacacccagtgcaccagacccgactgcaccttctaccaccccaccatcaacgtgccccccagacacgccctgaagtggatcagaccccagaccagcgagtag

SEQ ID NO: 105609 - DNA, 2136 bp, synthetic construct
  misc_feature 1..2136: note = Description of Artificial Sequence: Synthetic coding sequence
  source 1..2136: mol_type = other DNA
atggagatcggcaccgagatcagcagaaagatcagaagcgccatcaagggcaagctgcaggagctgggcgcctacatcgacgaggagctgcccgactacatcatggtgatggtggccaacaagaagagccaggaccagatgaccgaggacctgagcctgttcctgggcaacaacaccatcagattcaccgtgtggctgcacggcgtgctggacaagctgagaagcgtgaccaccgagcccagcagcctgaagagcagcgacaccaacatcttcgacagcaacgtgcccagcaacaagagcaacttcagcagaggcgacgagagaagacacgaggccgccgtgccccccctggccatccccagcgccagacccgagaagagagacagcagagtgagcaccagcagccaggagagcaagaccaccaacgtgagacagacctacgacgacggcgccgccaccagactgatgagcaccgtgaagcccctgagagagcccgcccccagcgaggacgtgatcgacatcaagcccgagcccgacgacctgatcgacgaggacctgaacttcgtgcaggagaaccccctgagccagaagaagcccaccgtgaccctgacctacggcagcagcagacccagcatcgagatctacagaccccccgccagcagaaacgccgacagcggcgtgcacctgaacagactgcagttccagcagcagcagaacagcatccacgccgccaagcagctggacatgcagagcagctgggtgtacgagaccggcagactgtgcgagcccgaggtgctgaacagcctggaggagacctacagccccttcttcagaaacaacagcgagaagatgagcatggaggacgagaacttcagaaagagaaagctgcccgtggtgagcagcgtggtgaaggtgaagaagttcaaccacgacggcgaggaggaggaggaggacgacgactacggcagcagaaccggcagcatcagcagcagcgtgagcgtgcccgccaagcccgagagaagacccagcctgccccccagcaagcaggccaacaagaacctgatcctgaaggccatcagcgaggcccaggagagcgtgaccaagaccaccaactacagcaccgtgccccagaagcagaccctgcccgtggcccccagaaccagaaccagccaggaggagctgctggccgaggtggtgcagggccagagcagaacccccagaatcagcccccccatcaaggaggaggagaccaagggcgacagcgtggagaagaaccaggactactacgacatggagagcatggtgcacgccgacaccagaagcttcatcctgaagaagcccaagctgagcgaggaggtggtggtggcccccaaccaggagagcggcatgaagaccgccgacagcctgagagtgctgagcggccacctgatgcagaccagagacctggtgcagcccgacaagcccgccagccccaagttcatcgtgaccctggacggcgtgcccagcccccccggctacatgagcgaccaggaggaggacatgtgcttcgagggcatgaagcccgtgaaccagaccgccgccagcaacaagggcctgagaggcctgctgcacccccagcagctgcacctgctgagcagacagctggaggaccccaacggcagcttcagcaacgccgagatgagcgagctgagcgtggcccagaagcccgagaagctgctggagagatgcaagtactggcccgcctgcaagaacggcgacgagtgcgcctaccaccaccccatcagcccctgcaaggccttccccaactgcaagttcgccgagaagtgcctgttcgtgcaccccaactgcaagtacgacgccaagtgcaccaagcccgactgccccttcacccacgtgagcagaagaatccccgtgctgagccccaagcccgccgtggccccccccgccccccccagcagcagccagctgtgcagatacttccccgcctgcaagaagatggagtgccccttctaccaccccaagcactgcagattcaacacccagtgcaccagacccgactgcaccttctaccaccccaccatcaacgtgccccccagacacgccctgaagtggatcagaccccagaccagcgagtag

SEQ ID NO: 105610 - DNA, 849 bp, synthetic construct
  misc_feature 1..849: note = Description of Artificial Sequence: Synthetic coding sequence
  source 1..849: mol_type = other DNA
atgagaatgagcagcaagttccccagcccccccctgcccatcttcctgccccccgagcccgtggacctgggcagcatcaccagcagcagctgcagcctgaacgagctggacaacatcagccacctgctgagaaagatcagcgccgacatcaacgagatcaagggcatgaaggccgccatcctgaccgtggaggccaacctgttcgacctgaacgtgagagtgagcaagaacgaggccaagatcagcagcctggaggtgaagatgaacgagtacagcaccacctacgagtgcaacagacagttcgaggaccaggaggaggacaccgagagccagagcagaaccaccgacgtgaagatcatcggcttcctgagaaacgtggagaaggccgagatgagcgagctgagcgtggcccagaagcccgagaagctgctggagagatgcaagtactggcccgcctgcaagaacggcgacgagtgcgcctaccaccaccccatcagcccctgcaaggccttccccaactgcaagttcgccgagaagtgcctgttcgtgcaccccaactgcaagtacgacgccaagtgcaccaagcccgactgccccttcacccacgtgagcagaagaatccccgtgctgagccccaagcccgccgtggccccccccgccccccccagcagcagccagctgtgcagatacttccccgcctgcaagaagatggagtgccccttctaccaccccaagcactgcagattcaacacccagtgcaccagacccgactgcaccttctaccaccccaccatcaacgtgccccccagacacgccctgaagtggatcagaccccagaccagcgagtag

SEQ ID NO: 105611 - DNA, 219 bp, synthetic construct
  misc_feature 1..219: note = Description of Artificial Sequence: Synthetic coding sequence
  source 1..219: mol_type = other DNA
atggtgatggtggccaacaagaagagccaggaccagatgaccgaggacctgagcctgttcctgggcaacaacaccatcagattcaccgtgtggctgcacggcgtgctggacaagctgagaagcgtgaccaccgagcccagcagcctgaagagcagcgacaccaacatcttcgacagcaacgtgcccagcaacaagagcaacttcagcagaggcgactag

SEQ ID NO: 105612 - DNA, 285 bp, synthetic construct
  misc_feature 1..285: note = Description of Artificial Sequence: Synthetic coding sequence
  source 1..285: mol_type = other DNA
atggtgatggtggccaacaagaagagccaggaccagatgaccgaggacctgagcctgttcctgggcaacaacaccatcagattcaccgtgtggctgcacggcgtgctggacaagctgagaagcgtgaccaccgagcccagcagcctgaagagcagcgacaccaacatcttcgacagcaacgtgcccagcaacaagagcaacttcagcagaggcgacgagagaagacacgaggccgccgtgccccccctggccatccccagcgccagacccgagaagagagactag

SEQ ID NO: 105613 - DNA, 648 bp, synthetic construct
  misc_feature 1..648: note = Description of Artificial Sequence: Synthetic coding sequence
  source 1..648: mol_type = other DNA
atggtgatggtggccaacaagaagagccaggaccagatgaccgaggacctgagcctgttcctgggcaacaacaccatcagattcaccgtgtggctgcacggcgtgctggacaagctgagaagcgtgaccaccgagcccagcagcctgaagagcagcgacaccaacatcttcgacagcaacgtgcccagcaacaagagcaacttcagcagaggcgacgagagaagacacgaggccgccgtgccccccctggccatccccagcgccagacccgagaagagagacagcagagtgagcaccagcagccaggagagcaagaccaccaacgtgagacagacctacgacgacggcgccgccaccagactgatgagcaccgtgaagcccctgagagagcccgcccccagcgaggacgtgatcgacatcaagcccgagcccgacgacctgatcgacgaggacctgaacttcgtgcaggagaaccccctgagccagaagaagcccaccgtgaccctgacctacggcagcagcagacccagcatcgagatctacagaccccccgccagcagaaacgccgacagcggcgtgcacctgaacagactgcagttccagcagcagcagaacagcatccacgccgccaagcagctggacatgtag

SEQ ID NO: 105614 - DNA, 1956 bp, synthetic construct
  misc_feature 1..1956: note = Description of Artificial Sequence: Synthetic coding sequence
  source 1..1956: mol_type = other DNA
tgaagcgacaccaacatcttcgacagcaacgtgcccagcaacaagagcaacttcagcagaggcgacgagagaagacacgaggccgccgtgccccccctggccatccccagcgccagacccgagaagagagacagcagagtgagcaccagcagccaggagagcaagaccaccaacgtgagacagacctacgacgacggcgccgccaccagactgatgagcaccgtgaagcccctgagagagcccgcccccagcgaggacgtgatcgacatcaagcccgagcccgacgacctgatcgacgaggacctgaacttcgtgcaggagaaccccctgagccagaagaagcccaccgtgaccctgacctacggcagcagcagacccagcatcgagatctacagaccccccgccagcagaaacgccgacagcggcgtgcacctgaacagactgcagttccagcagcagcagaacagcatccacgccgccaagcagctggacatgcagagcagctgggtgtacgagaccggcagactgtgcgagcccgaggtgctgaacagcctggaggagacctacagccccttcttcagaaacaacagcgagaagatgagcatggaggacgagaacttcagaaagagaaagctgcccgtggtgagcagcgtggtgaaggtgaagaagttcaaccacgacggcgaggaggaggaggaggacgacgactacggcagcagaaccggcagcatcagcagcagcgtgagcgtgcccgccaagcccgagagaagacccagcctgccccccagcaagcaggccaacaagaacctgatcctgaaggccatcagcgaggcccaggagagcgtgaccaagaccaccaactacagcaccgtgccccagaagcagaccctgcccgtggcccccagaaccagaaccagccaggaggagctgctggccgaggtggtgcagggccagagcagaacccccagaatcagcccccccatcaaggaggaggagaccaagggcgacagcgtggagaagaaccagggcacccagcagagacagctgctgagcagactgcagatcgaccccgtgatggccgagaccctgcagatgagccaggactactacgacatggagagcatggtgcacgccgacaccagaagcttcatcctgaagaagcccaagctgagcgaggaggtggtggtggcccccaaccaggagagcggcatgaagaccgccgacagcctgagagtgctgagcggccacctgatgcagaccagagacctggtgcagcccgacaagcccgccagccccaagttcatcgtgaccctggacggcgtgcccagcccccccggctacatgagcgaccaggaggaggacatgtgcttcgagggcatgaagcccgtgaaccagaccgccgccagcaacaagggcctgagaggcctgctgcacccccagcagctgcacctgctgagcagacagctggaggaccccaacggcagcttcagcaacgccgagatgagcgagctgagcgtggcccagaagcccgagaagctgctggagagatgcaagtactggcccgcctgcaagaacggcgacgagtgcgcctaccaccaccccatcagcccctgcaaggccttccccaactgcaagttcgccgagaagtgcctgttcgtgcaccccaactgcaagtacgacgccaagtgcaccaagcccgactgccccttcacccacgtgagcagaagaatccccgtgctgagccccaagcccgtggccccccccgccccccccagcagcagccagctgtgcagatacttccccgcctgcaagaagatggagtgccccttctaccaccccaagcactgcagattcaacacccagtgcaccagacccgactgcaccttctaccaccccaccatcaacgtgccccccagacacgccctgaagtggatcagaccccagaccagcgagtag

SEQ ID NO: 105615 - DNA, 402 bp, synthetic construct
  misc_feature 1..402: note = Description of Artificial Sequence: Synthetic coding sequence
  source 1..402: mol_type = other DNA
atggtgatggtggccaacaagaagagccaggaccagatgaccgaggacctgagcctgttcctgggcaacaacaccatcagattcaccgtgtggctgcacggcgtgctggacaagctgagaagcgtgaccaccgagcccagcagcctgaagagcagcgacaccaacatcttcgacagcaacgtgcccagcaacaagagcaacttcagcagaggcgacgagagaagacacgaggccgccgtgccccccctggccatccccagcgccagacccgagaagagagacagcagagtgagcaccagcagccaggagagcaagaccaccaacgtgagacagacctacgacgacggcgccgccaccagactgatgagcaccgtgaagcccctgagagagcccgccccctag

SEQ ID NO: 105616 - DNA, 2193 bp, synthetic construct
  misc_feature 1..2193: note = Description of Artificial Sequence: Synthetic coding sequence
  source 1..2193: mol_type = other DNA
atggagatcggcaccgagatcagcagaaagatcagaagcgccatcaagggcaagctgcaggagctgggcgcctacgtggacgaggagctgcccgactacatcatggtgatggtggccaacaagaagagccaggaccagatgaccgaggacctgagcctgttcctgggcaacaacaccatcagattcaccgtgtggctgcacggcgtgctggacaagctgagaagcgtgaccaccgagcccagcagcctgaagagcagcgacaccaacatcttcgacagcaacgtgcccagcaacaagagcaacttcagcagaggcgacgagagaagacacgaggccgccgtgccccccctggccatccccagcgccagacccgagaagagagacagcagagtgagcaccagcagccaggagagcaagaccaccaacgtgagacagacctacgacgacggcgccgccaccagactgatgagcaccgtgaagcccctgagagagcccgcccccagcgaggacgtgatcgacatcaagcccgagcccgacgacctgatcgacgaggacctgaacttcgtgcaggagaaccccctgagccagaagaagcccaccgtgaccctgacctacggcagcagcagacccagcatcgagatctacagaccccccgccagcagaaacgccgacagcggcgtgcacctgaacagactgcagttccagcagcagcagaacagcatccacgccgccaagcagctggacatgcagagcagctgggtgtacgagaccggcagactgtgcgagcccgaggtgctgaacagcctggaggagacctacagccccttcttcagaaacaacagcgagaagatgagcatggaggacgagaacttcagaaagagaaagctgcccgtggtgagcagcgtggtgaaggtgaagaagttcaaccacgacggcgaggaggaggaggaggacgacgactacggcagcagaaccggcagcatcagcagcagcgtgagcgtgcccgccaagcccgagagaagacccagcctgccccccagcaagcaggccaacaagaacctgatcctgaaggccatcagcgaggcccaggagagcgtgaccaagaccaccaactacagcaccgtgccccagaagcagaccctgcccgtggcccccagaaccagaaccagccaggaggagctgctggccgaggtggtgcagggccagagcagaacccccagaatcagcccccccatcaaggaggaggagaccaagggcgacagcgtggagaagaaccagggcacccagcagagacagctgctgagcagactgcagatcgaccccgtgatggccgagaccctgcagatgagccaggactactacgacatggagagcatggtgcacgccgacaccagaagcttcatcctgaagaagcccaagctgagcgaggaggtggtggtggcccccaaccaggagagcggcatgaagaccgccgacagcctgagagtgctgagcggccacctgatgcagaccagagacctggtgcagcccgacaagcccgccagccccaagttcatcgtgaccctggacggcgtgcccagcccccccggctacatgagcgaccaggaggaggacatgtgcttcgagggcatgaagcccgtgaaccagaccgccgccagcaacaagggcctgagaggcctgctgcacccccagcagctgcacctgctgagcagacagctggaggaccccaacgccgagatgagcgagctgagcgtggcccagaagcccgagaagctgctggagagatgcaagtactggcccgcctgcaagaacggcgacgagtgcgcctaccaccaccccatcagcccctgcaaggccttccccaactgcaagttcgccgagaagtgcctgttcgtgcaccccaactgcaagtacgacgccaagtgcaccaagcccgactgccccttcacccacgtgagcagaagaatccccgtgctgagccccaagcccgtggccccccccgccccccccagcagcagccagctgtgcagatacttccccgcctgcaagaagatggagtgccccttctaccaccccaagcactgcagattcaacacccagtgcaccagacccgactgcaccttctaccaccccaccatcaacgtgccccccagacacgccctgaagtggatcagaccccagaccagcgagtag

SEQ ID NO: 105617 - DNA, 2709 bp, synthetic construct
  misc_feature 1..2709: note = Description of Artificial Sequence: Synthetic coding sequence
  source 1..2709: mol_type = other DNA
atggccgaccccgaggtgtgctgcttcatcaccaagatcctgtgcgcccacggcggcagaatggccctggacgccctgctgcaggagatcgccctgagcgagccccagctgtgcgaggtgctgcaggtggccggccccgacagattcgtggtgctggagaccggcggcgaggccggcatcaccagaagcgtggtggccaccaccagagccagagtgtgcagaagaaagtactgccagagaccctgcgacaacctgcacctgtgcaagctgaacctgctgggcagatgcaactacagccagagcgagagaaacctgtgcaagtacagccacgaggtgctgagcgaggagaacttcaaggtgctgaagaaccacgagctgagcggcctgaacaaggaggagctggccgtgctgctgctgcagagcgaccccttcttcatgcccgagatctgcaagagctacaagggcgagggcagacagcagatctgcaaccagcagcccccctgcagcagactgcacatctgcgaccacttcaccagaggcaactgcagattccccaactgcctgagaagccacaacctgatggacagaaaggtgctggccatcatgagagagcacggcctgaaccccgacgtggtgcagaacatccaggacatctgcaacagcaagcacatgcagaagaacccccccggccccagagcccccagcagccacagaagaaacatggcctacagagccagaagcaagagcagagacagattcttccagggcagccaggagttcctggccagcgccagcgccagcgccgagagaagctgcacccccagccccgaccagatcagccacagagccagcctggaggacgcccccgtggacgacctgaccagaaagttcacctacctgggcagccaggacagagccagaccccccagcggcagcagcaaggccaccgacctgggcggcaccagccaggccggcaccagccagagattcctggagaacggcagccaggaggacctgctgcacggcaaccccggcagcacctacctggccagcaacagcaccagcgcccccaactggaagagcctgaccagctggaccaacgaccagggcgccagaagaaagaccgtgttcagccccaccctgcccgccgccagaagcagcctgggcagcctgcagacccccgaggccgtgaccaccagaaagggcaccggcctgctgagcagcgactacagaatcatcaacggcaagagcggcacccaggacatccagcccggccccctgttcaacaacaacgccgacggcgtggccaccgacatcaccagcaccagaagcctgaactacaagagcaccagcagcggccacagagagatcagcagccccagaatccaggacgccggccccgccagcagagacgtgcaggccaccggcagaatcgccgacgacgccgaccccagagtggccctggtgaacgacagcctgagcgacgtgaccagcaccaccagcagcagagtggacgaccacgacagcgaggagatctgcctggaccacctgtgcaagggctgccccctgaacggcagctgcagcaaggtgcacttccacctgccctacagatggcagatgctgatcggcaagacctggaccgacttcgagcacatggagaccatcgagaagggctactgcaaccccggcatccacctgtgcagcgtgggcagctacaccatcaacttcagagtgatgagctgcgacagcttccccatcagaagactgagcacccccagcagcgtgaccaagcccgccaacagcgtgttcaccaccaagtggatctggtactggaagaacgagagcggcacctggatccagtacggcgaggagaaggacaagagaaagaacagcaacgtggacagcagctacctggagagcctgtaccagagctgccccagaggcgtggtgcccttccaggccggcagcagaaactacgagctgagcttccagggcatgatccagaccaacatcgccagcaagacccagaaggacgtgatcagaagacccaccttcgtgccccagtggtacgtgcagcagatgaagagaggccccgaccaccagcccgccaagaccagcagcgtgagcctgaccgccaccttcagaccccaggaggacttctgcttcctgagcagcaagaagtacaagctgagcgagatccaccacctgcaccccgagtacgtgagagtgagcgagcacttcaaggccagcatgaagaacttcaagatcgagaagatcaagaagatcgagaacagcgagctgctggacaagttcacctggaagaagagccagatgaaggaggagggcaagctgctgttctacgccaccagcagagcctacgtggagagcatctgcagcaacaacttcgacagcttcctgcacgagacccacgagaacaagtacggcaagggcatctacttcgccaaggacgccatctacagccacaagaactgcccctacgacgccaagaacgtggtgatgttcgtggcccaggtgctggtgggcaagttcaccgagggcaacatcacctacaccagcccccccccccagttcgacagctgcgtggacaccagaagcaaccccagcgtgttcgtgatcttccagaaggaccaggtgtacccccagtacgtgatcgagtacaccgaggacaaggcctgcgtgatcagctag

SEQ ID NO: 105618 - DNA, 2100 bp, synthetic construct
  misc_feature 1..2100: note = Description of Artificial Sequence: Synthetic coding sequence
  source 1..2100: mol_type = other DNA
atggccgaccccgaggtgtgctgcttcatcaccaagatcctgtgcgcccacggcggcagaatggccctggacgccctgctgcaggagatcgccctgagcgagccccagctgtgcgaggtgctgcaggtggccggccccgacagattcgtggtgctggagaccggcggcgaggccggcatcaccagaagcgtggtggccaccaccagagccagagtgtgcagaagaaagtactgccagagaccctgcgacaacctgcacctgtgcaagctgaacctgctgggcagatgcaactacagccagagcgagagaaacctgtgcaagtacagccacgaggtgctgagcgaggagaacttcaaggtgctgaagaaccacgagctgagcggcctgaacaaggaggagctggccgtgctgctgctgcagagcgaccccttcttcatgcccgagatctgcaagagctacaagggcgagggcagacagcagatctgcaaccagcagcccccctgcagcagactgcacatctgcgaccacttcaccagaggcaactgcagattccccaactgcctgagaagccacaacctgatggacagaaaggtgctggccatcatgagagagcacggcctgaaccccgacgtggtgcagaacatccaggacatctgcaacagcaagcacatgcagaagaacccccccggccccagagcccccagcagccacagaagaaacatggcctacagagccagaagcaagagcagagacagattcttccagggcagccaggagttcctggccagcgccagcgccagcgccgagagaagctgcacccccagccccgaccagatcagccacagagccagcctggaggacgcccccgtggacgacctgaccagaaagttcacctacctgggcagccaggacagagccagaccccccagcggcagcagcaaggccaccgacctgggcggcaccagccaggccggcaccagccagagattcctggagaacggcagccaggaggacctgctgcacggcaaccccggcagcacctacctggccagcaacagcaccagcgcccccaactggaagagcctgaccagctggaccaacgaccagggcgccagaagaaagaccgtgttcagccccaccctgcccgccgccagaagcagcctgggcagcctgcagacccccgaggccgtgaccaccagaaagggcaccggcctgctgagcagcgactacagaatcatcaacggcaagagcggcacccaggacatccagcccggccccctgttcaacaacaacgccgacggcgtggccaccgacatcaccagcaccagaagcctgaactacaagagcaccagcagcggccacagagagatcagcagccccagaatccaggacgccggccccgccagcagagacgtgcaggccaccggcagaatcgccgacgacgccgaccccagagtggccctggtgaacgacagcctgagcgacgtgaccagcaccaccagcagcagagtggacgaccacgacagcgaggagatctgcctggaccacctgtgcaagggctgccccctgaacggcagctgcagcaaggtgcacttccacctgccctacagatggcagatgctgatcggcaagacctggaccgacttcgagcacatggagaccatcgagaagggctactgcaaccccggcatccacctgtgcagcgtgggcagctacaccatcaacttcagagtgatgagctgcgacagcttccccatcagaagactgagcacccccagcagcgtgaccaagcccgccaacagcgtgttcaccaccaagtggatctggtactggaagaacgagagcggcacctggatccagtacggcgaggagaaggacaagagaaagaacagcaacgtggacagcagctacctggagagcctgtaccagagctgccccagaggcgtggtgcccttccaggccggcagcagaaactacgagctgagcttccagggcatgatccagaccaacatcgccagcaagacccagaaggacgtgatcagaagacccaccttcgtgccccagtggtacgtgcagcagatgaagagaggccccgagtag

SEQ ID NO: 105619 - DNA, 1521 bp, synthetic construct
  misc_feature 1..1521: note = Description of Artificial Sequence: Synthetic coding sequence
  source 1..1521: mol_type = other DNA
atggcctacagagccagaagcaagagcagagacagattcttccagggcagccaggagttcctggccagcgccagcgccagcgccgagagaagctgcacccccagccccgaccagatcagccacagagccagcctggaggacgcccccgtggacgacctgaccagaaagttcacctacctgggcagccaggacagagccagaccccccagcggcagcagcaaggccaccgacctgggcggcaccagccaggccggcaccagccagagattcctggagaacggcagccaggaggacctgctgcacggcaaccccggcagcacctacctggccagcaacagcaccagcgcccccaactggaagagcctgaccagctggaccaacgaccagggcgccagaagaaagaccgtgttcagccccaccctgcccgccgccagaagcagcctgggcagcctgcagacccccgaggccgtgaccaccagaaagggcaccggcctgctgagcagcgactacagaatcatcaacggcaagagcggcacccaggacatccagcccggccccctgttcaacaacaacgccgacggcgtggccaccgacatcaccagcaccagaagcctgaactacaagagcaccagcagcggccacagagagatcagcagccccagaatccaggacgccggccccgccagcagagacgtgcaggccaccggcagaatcgccgacgacgccgaccccagagtggccctggtgaacgacagcctgagcgacgtgaccagcaccaccagcagcagagtggacgaccacgacagcgaggagatctgcctggaccacctgtgcaagggctgccccctgaacggcagctgcagcaaggtgcacttccacctgccctacagatggcagatgctgatcggcaagacctggaccgacttcgagcacatggagaccatcgagaagggctactgcaaccccggcatccacctgtgcagcgtgggcagctacaccatcaacttcagagtgatgagctgcgacagcttccccatcagaagactgagcacccccagcagcgtgaccaagcccgccaacagcgtgttcaccaccaagtggatctggtactggaagaacgagagcggcacctggatccagtacggcgaggagaaggacaagagaaagaacagcaacgtggacagcagctacctggagagcctgtaccagagctgccccagaggcgtggtgcccttccaggccggcagcagaaactacgagctgagcttccagggcatgatccagaccaacatcgccagcaagacccagaaggacgtgatcagaagacccaccttcgtgccccagtggtacgtgcaggaggagagagccagagtgagcgtgctgaagcagctgttcgccgacagatgcctgagatgcagctgccccggcctgatcaagagcctggtgaacctggagcccgtgttcctgaagagcagctgcctgcactacagcgccgtgagcatctgcatcatcgacgagtag

SEQ ID NO: 105620 - DNA, 654 bp, synthetic construct
  misc_feature 1..654: note = Description of Artificial Sequence: Synthetic coding sequence
  source 1..654: mol_type = other DNA
atgagcggcggcctggcccccagcaagagcaccgtgtacgtgagcaacctgcccttcagcctgaccaacaacgacctgtacagaatcttcagcaagtacggcaaggtggtgaaggtgaccatcatgaaggacaaggacaccagaaagagcaagggcgtggccttcatcctgttcctggacaaggacagcgcccagaactgcaccagagccatcaacaacaagcagctgttcggcagagtgatcaaggccagcatcgccatcgacaacggcagagccgccgagttcatcagaagaagaaactacttcgacaagagcaagtgctacgagtgcggcgagagcggccacctgagctacgcctgccccaagaacatgctgggcgagagagagccccccaagaagaaggagaagaagaagaagaagaaggcccccgagcccgaggaggagatcgaggaggtggaggagagcgaggacgagggcgaggaccccgccctggacagcctgagccaggccatcgccttccagcaggccaagatcgaggaggagcagaagaagtggaagcccagcagcggcgtgcccagcaccagcgacgacagcagaagacccagaatcaagaagagcacctacttcagcgacgaggaggagctgagcgactag

SEQ ID NO: 105621 - DNA, 501 bp, synthetic construct
  misc_feature 1..501: note = Description of Artificial Sequence: Synthetic coding sequence
  source 1..501: mol_type = other DNA
atggccatgagccaggagagcctgaccttcaaggacgtgttcgtggacttcaccctggaggagtggcagcagctggacagcgcccagaagaacctgtacagagacgtgatgctggagaactacagccacctggtgagcgtgggctacctggtggccaagcccgacgtgatcttcagactgggccccggcgaggagagctggatggccgacggcggcacccccgtgagaacctgcgccgaggtgtggcaggtggacgagcagatcgaccactacaaggagagccaggacaagctgccctggcaggccgccttcatcggcaaggagaccctgaaggacgagagcggccaggagagcagaacctgcagaaagagcatctacctgagcaccgagttcgacagcgtgagacagagactgcccaagtactacagctgggagaaggccttcaagaccagcttcaagctgagctggagcaagtggaagctgtgcaagaaggagagatag

SEQ ID NO: 105622 - DNA, 516 bp, synthetic construct
  misc_feature 1..516: note = Description of Artificial Sequence: Synthetic coding sequence
  source 1..516: mol_type = other DNA
atggccatgagccaggagagcctgaccttcaaggacgtgttcgtggacttcaccctggaggagtggcagcagctggacagcgcccagaagaacctgtacagagacgtgatgctggagaactacagccacctggtgagcgtgggctacctggtggccaagcccgacgtgatcttcagactgggccccggcgaggagagctggatggccgacggcggcacccccgtgagaacctgcgccggcgaggacagacccgaggtgtggcaggtggacgagcagatcgaccactacaaggagagccaggacaagctgccctggcaggccgccttcatcggcaaggagaccctgaaggacgagagcggccaggagagcagaacctgcagaaagagcatctacctgagcaccgagttcgacagcgtgagacagagactgcccaagtactacagctgggagaaggccttcaagaccagcttcaagctgagctggagcaagtggaagctgtgcaagaaggagagatag

SEQ ID NO: 105623 - DNA, 297 bp, synthetic construct
  misc_feature 1..297: note = Description of Artificial Sequence: Synthetic coding sequence
  source 1..297: mol_type = other DNA
atggccatgagccaggagagcctgaccttcaaggacgtgttcgtggacttcaccctggaggagtggcagcagctggacagcgcccagaagaacctgtacagagacgtgatgctggagaactacagccacctggtgagcgtgggctacctggtggccaagcccgacgtgatcttcagactgggccccggcgaggagagctggatggccgacggcggcacccccgtgagaacctgcgccggcgaggacagacccgacgtgagcatcttcgccagctgcatcctgaagtgctgctactag

SEQ ID NO: 105624 - DNA, 297 bp, synthetic construct; identical to SEQ ID NO: 105623
  misc_feature 1..297: note = Description of Artificial Sequence: Synthetic coding sequence
  source 1..297: mol_type = other DNA

SEQ ID NO: 105625 - DNA, 516 bp, synthetic construct
  misc_feature 1..516: note = Description of Artificial Sequence: Synthetic coding sequence
  source 1..516: mol_type = other DNA
gtggccatgagccaggagagcctgaccttcaaggacgtgttcgtggacttcaccctggaggagtggcagcagctggacagcgcccagaagaacctgtacagagacgtgatgctggagaactacagccacctggtgagcgtgggctacctggtggccaagcccgacgtgatcttcagactgggccccggcgaggagagctggatggccgacggcggcacccccgtgagaacctgcgccggcgaggacagacccgaggtgtggcaggtggacgagcagatcgaccactacaaggagagccaggacaagctgccctggcaggccgccttcatcggcaaggagaccctgaaggacgagagcggccaggagagcagaacctgcagaaagagcatctacctgagcaccgagttcgacagcgtgagacagagactgcccaagtactacagctgggagaaggccttcaagaccagcttcaagctgagctggagcaagtggaagctgtgcaagaaggagagatag

SEQ ID NO: 105626 - DNA, 297 bp, synthetic construct; identical to SEQ ID NO: 105623
  misc_feature 1..297: note = Description of Artificial Sequence: Synthetic coding sequence
  source 1..297: mol_type = other DNA

SEQ ID NO: 105627 - DNA, 864 bp, synthetic construct
  misc_feature 1..864: note = Description of Artificial Sequence: Synthetic coding sequence
  source 1..864: mol_type = other DNA
atgatgaacagattcagaaagtggctgtacaagcccaagagaagcgacccccagctgctggccagattctactacgccgacgaggagctgaaccaggtggccgccgagctggacagcctggacggcagaaaggacccccagagatgcaccctgctggtgagccagttcagaagctgccaggacaacgtgctgaacatcatcaaccagatcatggacgagtgcatcccccaggacagagcccccagagacttctgcgtgaagttccccgaggagatcagacacgacaacctggccggccagctgtggttcggcgccgagtgcctggccgccggcagcatcatcatgaacagagagctggagagcatggccatgagacccctggccaaggagctgaccagaagcctggaggacgtgagaggcgccctgagagaccaggccctgagagacctgaacacctacaccgagaagatgagagaggccctgagacacttcgacgtgctgttcgccgagttcgagctgagctacgtgagcgccatggtgcccgtgaagagccccagagagtactacgtgcagcaggaggtgatcgtgctgttctgcgagaccgtggagagagccctggacttcggctacctgacccaggacatgatcgacgactacgagcccgccctgatgttcagcatccccagactggccatcgtgtgccccctgctgcccgcccaccccagaaccagagccggcgccaccgcccacgtggcctgcagaatggtggccggcagcagcagcggcgccctgacccacccccccgtgagcaagcagggcgtgatcagcgccctgctgagacccctgcccgagctgcccccctag

SEQ ID NO: 105628 - DNA, 519 bp, synthetic construct
  misc_feature 1..519: note = Description of Artificial Sequence: Synthetic coding sequence
  source 1..519: mol_type = other DNA
atgatgaacagattcagaaagtggctgtacaagcccaaggacaacgtgctgaacatcatcaaccagatcatggacgagtgcatcccccaggacagagcccccagagacttctgcgtgaagttccccgaggagatcagacacgacaacctggccggccagctgtggttcggcgccgagtgcctggccgccggcagcatcatcatgaacagagagctggagagcatggccatgagacccctggccaaggagctgaccagaagcctggaggacgtgagaggcgccctgagagaccaggccctgagagacctgaacacctacaccgagaagatgagagaggccctgagacacttcgacgtgctgttcgccgagttcgagctgagctacgtgagcgccatggtgcccgtgaagagccccagagagtactacgtgcagcaggaggtgatcgtgctgttctgcgagaccgtggagagaaacggcaagggcgtgctgaagttcatgtggaactgcaacggcccctag

SEQ ID NO: 105629 - DNA, 492 bp, synthetic construct
  misc_feature 1..492: note = Description of Artificial Sequence: Synthetic coding sequence
  source 1..492: mol_type = other DNA
atggacgagtgcatcccccaggacagagcccccagagacttctgcgtgaagttccccgaggagatcagacacgacaacctggccggccagctgtggttcggcgccgagtgcctggccgccggcagcatcatcatgaacagagagctggagagcatggccatgagacccctggccaaggagctgaccagaagcctggaggacgtgagaggcgccctgagagaccaggccctgagagacctgaacacctacaccgagaagatgagagaggccctgagacacttcgacgtgctgttcgccgagttcgagctgagctacgtgagcgccatggtgcccgtgaagagccccagagagtactacgtgcagcaggaggtgatcgtgctgttctgcgagaccgtggagagagccctggacttcggctacctgacccaggacatgatcgacgactacgagcccgccctgatgttcagcatccccagactggccatcgtgtag

SEQ ID NO: 105630 - DNA, 11112 bp, synthetic construct
  misc_feature 1..11112: note = Description of Artificial Sequence: Synthetic coding sequence
  source 1..11112: mol_type = other DNA
atggagggctgcgacagccccgtggtgagcggcaaggacaacggctgcggcatcccccagcaccagcagtggaccgagctgaacagcacccacctgcccgacaagcccagcagcatggagcagagcaccggcgagagccacggccccctggacagcctgagagcccccttcaacgagagactggccgagagcaccgccagcgccggcccccccagcgagcccgccagcaaggaggtgacctgcaacgagtgcagcgccagcttcgccagcctgcagacctacatggagcaccactgccccagcgccagaccccccccccccctgagagaggagagcgccagcgacaccggcgaggagggcgacgaggagagcgacgtggagaacctggccggcgagatcgtgtaccagcccgacggcagcgcctacatcgtggagagcctgagccagctgacccagggcggcggcgcctgcggcagcggcagcggcagcggccccctgcccagcctgttcctgaacagcctgcccggcgccggcggcaagcagggcgaccccagctgcgccgcccccgtgtacccccagatcatcaacaccttccacatcgccagcagcttcggcaagtggttcgagggccccgaccaggccttccccaacaccagcgccctggccggcctgagccccgtgctgcacagcttcagagtgttcgacgtgagacacaagagcaacaaggactacctgaacagcgacggcagcgccaagagcagctgcgtgagcaaggacgtgcccaacaacgtggacctgagcaagttcgacggcttcgtgctgtacggcaagagaaagcccatcctgatgtgcttcctgtgcaagctgagcttcggctacgtgagaagcttcgtgacccacgccgtgcacgaccacagaatgaccctgagcgaggacgagagaaagatcctgagcaacaagaacatcagcgccatcatccagggcatcggcaaggacaaggagcccctggtgagcttcctggagcccaagaacaagaacttccagcaccccctggtgagcaccgccaacctgatcggccccggccacagcttctacggcaagttcagcggcatcagaatggagggcgaggaggccctgcccgccggcagcgccgccggccccgagcagccccaggccggcctgctgacccccagcaccctgctgaacctgggcggcctgaccagcagcgtgctgaagacccccatcaccagcgtgcccctgggccccctggccagcagccccaccaagagcagcgagggcaaggacagcggcgccgccgagggcgagaagcaggaggtgggcgacggcgactgcttcagcgagaaggtggagcccgccgaggaggaggccgaggaggaggaggaggaggaggaggccgaggaggaggaggaggaggaggaggaggaggaggaggaggaggaggacgagggctgcaagggcctgttccccagcgagctggacgaggagctggaggacagaccccacgaggagcccggcgccgccgccggcagcagcagcaagaaggacctggccctgagcaaccagagcatcagcaacagccccctgatgcccaacgtgctgcagaccctgagcagaggcaccgccagcaccagcagcaacagcgccagcagcttcgtggtgttcgacggcgccaacagaagaaacagactgagcttcaacagcgagggcgtgagagccaacgtggccgagggcggcagaagactggacttcgccgacgagagcgccaacaaggacaacgccaccgcccccgagcccaacgagagcaccgagggcgacgacggcggcttcgtgccccaccaccagcacgccggcagcctgtgcgagctgggcgtgggcgagtgccccagcggcagcggcgtggagtgccccaagtgcgacaccgtgctgggcagcagcagaagcctgggcggccacatgaccatgatgcacagcagaaacagctgcaagaccctgaagtgccccaagtgcaactggcactacaagtaccagcagaccctggaggcccacatgaaggagaagcaccccgagcccggcggcagctgcgtgtactgcaagagcggccagccccaccccagactggccagaggcgagagctacacctgcggctacaagcccttcagatgcgaggtgtgcaactacagcaccaccaccaagggcaacctgagcatccacatgcagagcgacaagcacctgaacaacatgcagaacctgcagaacggcggcggcgagcaggtgttcagccacaccgccggcgccgccgccgccgccgtggccgccgccgccgccgccgccaacatcagcagcagctgcggcgcccccagccccaccaagcccaagaccaagcccacctggagatgcgaggtgtgcgactacgagaccaacgtggccagaaacctgagaatccacatgaccagcgagaagcacatgcacaacatgatgctgctgcagcagaacatgacccagatccagcacaacagacacctgggcctgggcagcctgcccagccccgccgaggccgagctgtaccagtactacctggcccagaacatgaacctgcccaacctgaagatggacagcgccgccagcgacgcccagttcatgatgagcggcttccagctggaccccgccggccccatggccgccatgacccccgccctggtgggcggcgagatccccctggacatgagactgggcggcggccagctggtgagcgaggagctgatgaacctgggcgagagcttcatccagaccaacgaccccagcctgaagctgttccagtgcgccgtgtgcaacaagttcaccaccgacaacctggacatgctgggcctgcacatgaacgtggagagaagcctgagcgaggacgagtggaaggccgtgatgggcgacagctaccagtgcaagctgtgcagatacaacacccagctgaaggccaacttccagctgcactgcaagaccgacaagcacgtgcagaagtaccagctggtggcccacatcaaggagggcggcaaggccaacgagtggagactgaagtgcgtggccatcggcaaccccgtgcacctgaagtgcaacgcctgcgactactacaccaacagcctggagaagctgagactgcacaccgtgaacagcagacacgaggccagcctgaagctgtacaagcacctgcagcagcacgagagcggcgtggagggcgagagctgctactaccactgcgtgctgtgcaactacagcaccaaggccaagctgaacctgatccagcacgtgagaagcatgaagcaccagagaagcgagagcctgagaaagctgcagagactgcagaagggcctgcccgaggaggacgaggacctgggccagatcttcaccatcagaagatgccccagcaccgaccccgaggaggccatcgaggacgtggagggccccagcgagaccgccgccgaccccgaggagctggccaaggaccaggagggcggcgccagcagcagccaggccgagaaggagctgaccgacagccccgccaccagcaagagaatcagcttccccggcagcagcgagagccccctgagcagcaagagacccaagaccgccgaggagatcaagcccgagcagatgtaccagtgcccctactgcaagtacagcaacgccgacgtgaacagactgagagtgcacgccatgacccagcacagcgtgcagcccatgctgagatgccccctgtgccaggacatgctgaacaacaagatccacctgcagctgcacctgacccacctgcacagcgtggcccccgactgcgtggagaagctgatcatgaccgtgaccacccccgagatggtgatgcccagcagcatgttcctgcccgccgccgtgcccgacagagacggcaacagcaacctggaggaggccggcaagcagcccgagaccagcgaggacctgggcaagaacatcctgcccagcgccagcaccgagcagagcggcgacctgaagcccagccccgccgaccccggcagcgtgagagaggacagcggcttcatctgctggaagaagggctgcaaccaggtgttcaagaccagcgccgccctgcagacccacttcaacgaggtgcacgccaagagaccccagctgcccgtgagcgacagacacgtgtacaagtacagatgcaaccagtgcagcctggccttcaagaccatcgagaagctgcagctgcacagccagtaccacgtgatcagagccgccaccatgtgctgcctgtgccagagaagcttcagaaccttccaggccctgaagaagcacctggagaccagccacctggagctgagcgaggccgacatccagcagctgtacggcggcctgctggccaacggcgacctgctggccatgggcgaccccaccctggccgaggaccacaccatcatcgtggaggaggacaaggaggaggagagcgacctggaggacaagcagagccccaccggcagcgacagcggcagcgtgcaggaggacagcggcagcgagcccaagagagccctgcccttcagaaagggccccaacttcaccatggagaagttcctggaccccagcagaccctacaagtgcaccgtgtgcaaggagagcttcacccagaagaacatcctgctggtgcactacaacagcgtgagccacctgcacaagctgaagagagccctgcaggagagcgccaccggccagcccgagcccaccagcagccccgacaacaagcccttcaagtgcaacacctgcaacgtggcctacagccagagcagcaccctggagatccacatgagaagcgtgctgcaccagaccaaggccagagccgccaagctggaggccgccagcggcagcagcaacggcaccggcaacagcagcagcatcagcctgagcagcagcacccccagccccgtgagcaccagcggcagcaacaccttcaccaccagcaaccccagcagcgccggcatcgcccccagcagcaacctgctgagccaggtgcccaccgagagcgtgggcatgccccccctgggcaaccccatcggcgccaacatcgccagccccagcgagcccaaggaggccaacagaaagaagctggccgacatgatcgccagcagacagcagcagcagcagcagcagcagcagcagcagcagcagcagcagcagcagcagcaggcccagaccctggcccaggcccaggcccaggtgcaggcccacctgcagcaggagctgcagcagcaggccgccctgatccagagccagctgttcaaccccaccctgctgccccacttccccatgaccaccgagaccctgctgcagctgcagcagcagcagcacctgctgttccccttctacatccccagcgccgagttccagctgaaccccgaggtgagcctgcccgtgaccagcggcgccctgaccctgaccggcaccggccccggcctgctggaggacctgaaggcccaggtgcaggtgccccagcagagccaccagcagatcctgccccagcagcagcagaaccagctgagcatcgcccagagccacagcgccctgctgcagcccagccagcaccccgagaagaagaacaagctggtgatcaaggagaaggagaaggagagccagagagagagagacagcgccgagggcggcgagggcaacaccggccccaaggagaccctgcccgacgccctgaaggccaaggagaagaaggagctggcccccggcggcggcagcgagcccagcatgctgccccccagaatcgccagcgacgccagaggcaacgccaccaaggccctgctggagaacttcggcttcgagctggtgatccagtacaacgagaacaagcagaaggtgcagaagaagaacggcaagaccgaccagggcgagaacctggagaagctggagtgcgacagctgcggcaagctgttcagcaacatcctgatcctgaagagccaccaggagcacgtgcaccagaactacttccccttcaagcagctggagagattcgccaagcagtacagagaccactacgacaagctgtaccccctgagaccccagacccccgagccccccccccccccccccccccccccccccccccccctgcccgccgcccccccccagcccgccagcacccccgccatccccgccagcgccccccccatcaccagccccaccatcgcccccgcccagcccagcgtgcccctgacccagctgagcatgcccatggagctgcccatcttcagccccctgatgatgcagaccatgcccctgcagaccctgcccgcccagctgcccccccagctgggccccgtggagcccctgcccgccgacctggcccagctgtaccagcaccagctgaaccccaccctgctgcagcagcagaacaagagacccagaaccagaatcaccgacgaccagctgagagtgctgagacagtacttcgacatcaacaacagccccagcgaggagcagatcaaggagatggccgacaagagcggcctgccccagaaggtgatcaagcactggttcagaaacaccctgttcaaggagagacagagaaacaaggacagcccctacaacttcagcaacccccccatcaccagcctggaggagctgaagatcgacagcagaccccccagccccgagccccccaagcaggagtactggggcagcaagagaagcagcagaaccagattcaccgactaccagctgagagtgctgcaggacttcttcgacgccaacgcctaccccaaggacgacgagttcgagcagctgagcaacctgctgaacctgcccaccagagtgatcgtggtgtggttccagaacgccagacagaaggccagaaagaactacgagaaccagggcgagggcaaggacggcgagagaagagagctgaccaacgacagatacatcagaaccagcaacctgaactaccagtgcaagaagtgcagcctggtgttccagagaatcttcgacctgatcaagcaccagaagaagctgtgctacaaggacgaggacgaggagggccaggacgacagccagaacgaggacagcatggacgccatggagatcctgacccccaccagcagcagctgcagcacccccatgcccagccaggcctacagcgcccccgcccccagcgccaacaacaccgccagcagcgccttcctgcagctgaccgccgaggccgaggagctggccaccttcaacagcaagaccgaggccggcgacgagaagcccaagctggccgaggcccccagcgcccagcccaaccagacccaggagaagcagggccagcccaagcccgagctgcagcagcaggagcagcccgagcagaagaccaacaccccccagcagaagctgccccagctggtgagcctgcccagcctgccccagccccccccccaggccccccccccccagtgccccctgccccagagcagccccagccccagccagctgagccacctgcccctgaagcccctgcacaccagcaccccccagcagctggccaacctgcccccccagctgatcccctaccagtgcgaccagtgcaagctggccttccccagcttcgagcactggcaggagcaccagcagctgcacttcctgagcgcccagaaccagttcatccacccccagttcctggacagaagcctggacatgcccttcatgctgttcgaccccagcaaccccctgctggccagccagctgctgagcggcgccatcccccagatccccgccagcagcgccaccagccccagcacccccaccagcaccatgaacaccctgaagagaaagctggaggagaaggccagcgccagccccggcgagaacgacagcggcaccggcggcgaggagccccagagagacaagagactgagaaccaccatcacccccgagcagctggagatcctgtaccagaagtacctgctggacagcaaccccaccagaaagatgctggaccacatcgcccacgaggtgggcctgaagaagagagtggtgcaggtgtggttccagaacaccagagccagagagagaaagggccagttcagagccgtgggccccgcccaggcccacagaagatgccccttctgcagagccctgttcaaggccaagaccgccctggaggcccacatcagaagcagacactggcacgaggccaagagagccggctacaacctgaccctgagcgccatgctgctggactgcgacggcggcctgcagatgaagggcgacatcttcgacggcaccagcttcagccacctgccccccagcagcagcgacggccagggcgtgcccctgagccccgtgagcaagaccatggagctgagccccagaaccctgctgagccccagcagcatcaaggtggagggcatcgaggacttcgagagccccagcatgagcagcgtgaacctgaacttcgaccagaccaagctggacaacgacgactgcagcagcgtgaacaccgccatcaccgacaccaccaccggcgacgagggcaacgccgacaacgacagcgccaccggcatcgccaccgagaccaagagcagcagcgcccccaacgagggcctgaccaaggccgccatgatggccatgagcgagtacgaggacagactgagcagcggcctggtgagccccgcccccagcttctacagcaaggagtacgacaacgagggcaccgtggactacagcgagaccagcagcctggccgacccctgcagccccagccccggcgccagcggcagcgccggcaagagcggcgacagcggcgacagacccggccagaagagattcagaacccagatgaccaacctgcagctgaaggtgctgaagagctgcttcaacgactacagaacccccaccatgctggagtgcgaggtgctgggcaacgacatcggcctgcccaagagagtggtgcaggtgtggttccagaacgccagagccaaggagaagaagagcaagctgagcatggccaagcacttcggcatcaaccagaccagctacgagggccccaagaccgagtgcaccctgtgcggcatcaagtacagcgccagactgagcgtgagagaccacatcttcagccagcagcacatcagcaaggtgaaggacaccatcggcagccagctggacaaggagaaggagtacttcgaccccgccaccgtgagacagctgatggcccagcaggagctggacagaatcaagaaggccaacgaggtgctgggcctggccgcccagcagcagggcatgttcgacaacacccccctgcaggccctgaacctgcccaccgcctaccccgccctgcagggcatcccccccgtgctgctgcccggcctgaacagccccagcctgcccggcttcacccccagcaacaccgccctgaccagccccaagcccaacctgatgggcctgcccagcaccaccgtgcccagccccggcctgcccaccagcggcctgcccaacaagcccagcagcgccagcctgagcagccccacccccgcccaggccaccatggccatgggcccccagcagcccccccagcagcagcagcagcagcagcagccccaggtgcagcagcccccccccccccccgccgcccagcccccccccaccccccagctgcccctgcagcagcagcagcagagaaaggacaaggacagcgagaaggtgaaggagaaggagaaggcccacaagggcaagggcgagcccctgcccgtgcccaagaaggagaagggcgaggcccccaccgccaccgccgccaccatcagcgcccccctgcccaccatggagtacgccgtggaccccgcccagctgcaggccctgcaggccgccctgaccagcgaccccaccgccctgctgaccagccagttcctgccctacttcgtgcccggcttcagcccctactacgccccccagatccccggcgccctgcagagcggctacctgcagcccatgtacggcatggagggcctgttcccctacagccccgccctgagccaggccctgatgggcctgagccccggcagcctgctgcagcagtaccagcagtaccagcagagcctgcaggaggccatccagcagcagcagcagagacagctgcagcagcagcagcagcagaaggtgcagcagcagcagcccaaggccagccagacccccgtgccccccggcgcccccagccccgacaaggaccccgccaaggagagccccaagcccgaggagcagaagaacacccccagagaggtgagccccctgctgcccaagctgcccgaggagcccgaggccgagagcaagagcgccgacagcctgtacgaccccttcatcgtgcccaaggtgcagtacaagctggtgtgcagaaagtgccaggccggcttcagcgacgaggaggccgccagaagccacctgaagagcctgtgcttcttcggccagagcgtggtgaacctgcaggagatggtgctgcacgtgcccaccggcggcggcggcggcggcagcggcggcggcggcggcggcggcggcggcggcggcggcggcggcagctaccactgcctggcctgcgagagcgccctgtgcggcgaggaggccctgagccagcacctggagagcgccctgcacaagcacagaaccatcaccagagccgccagaaacgccaaggagcaccccagcctgctgccccacagcgcctgcttccccgaccccagcaccgccagcaccagccagagcgccgcccacagcaacgacagcccccccccccccagcgccgccgcccccagcagcgccagcccccacgccagcagaaagagctggccccaggtggtgagcagagccagcgccgccaagccccccagcttcccccccctgagcagcagcagcaccgtgaccagcagcagctgcagcaccagcggcgtgcagcccagcatgcccaccgacgactacagcgaggagagcgacaccgacctgagccagaagagcgacggccccgccagccccgtggagggccccaaggaccccagctgccccaaggacagcggcctgaccagcgtgggcaccgacaccttcagactgtag

SEQ ID NO: 105631 - DNA, 8370 bp, synthetic construct
  misc_feature 1..8370: note = Description of Artificial Sequence: Synthetic coding sequence
  source 1..8370: mol_type = other DNA
atgagactgggcggcggccagctggtgagcgaggagctgatgaacctgggcgagagcttcatccagaccaacgaccccagcctgaagctgttccagtgcgccgtgtgcaacaagttcaccaccgacaacctggacatgctgggcctgcacatgaacgtggagagaagcctgagcgaggacgagtggaaggccgtgatgggcgacagctaccagtgcaagctgtgcagatacaacacccagctgaaggccaacttccagctgcactgcaagaccgacaagcacgtgcagaagtaccagctggtggcccacatcaaggagggcggcaaggccaacgagtggagactgaagtgcgtggccatcggcaaccccgtgcacctgaagtgcaacgcctgcgactactacaccaacagcctggagaagctgagactgcacaccgtgaacagcagacacgaggccagcctgaagctgtacaagcacctgcagcagcacgagagcggcgtggagggcgagagctgctactaccactgcgtgctgtgcaactacagcaccaaggccaagctgaacctgatccagcacgtgagaagcatgaagcaccagagaagcgagagcctgagaaagctgcagagactgcagaagggcctgcccgaggaggacgaggacctgggccagatcttcaccatcagaagatgccccagcaccgaccccgaggaggccatcgaggacgtggagggccccagcgagaccgccgccgaccccgaggagctggccaaggaccaggagggcggcgccagcagcagccaggccgagaaggagctgaccgacagccccgccaccagcaagagaatcagcttccccggcagcagcgagagccccctgagcagcaagagacccaagaccgccgaggagatcaagcccgagcagatgtaccagtgcccctactgcaagtacagcaacgccgacgtgaacagactgagagtgcacgccatgacccagcacagcgtgcagcccatgctgagatgccccctgtgccaggacatgctgaacaacaagatccacctgcagctgcacctgacccacctgcacagcgtggcccccgactgcgtggagaagctgatcatgaccgtgaccacccccgagatggtgatgcccagcagcatgttcctgcccgccgccgtgcccgacagagacggcaacagcaacctggaggaggccggcaagcagcccgagaccagcgaggacctgggcaagaacatcctgcccagcgccagcaccgagcagagcggcgacctgaagcccagccccgccgaccccggcagcgtgagagaggacagcggcttcatctgctggaagaagggctgcaaccaggtgttcaagaccagcgccgccctgcagacccacttcaacgaggtgcacgccaagagaccccagctgcccgtgagcgacagacacgtgtacaagtacagatgcaaccagtgcagcctggccttcaagaccatcgagaagctgcagctgcacagccagtaccacgtgatcagagccgccaccatgtgctgcctgtgccagagaagcttcagaaccttccaggccctgaagaagcacctggagaccagccacctggagctgagcgaggccgacatccagcagctgtacggcggcctgctggccaacggcgacctgctggccatgggcgaccccaccctggccgaggaccacaccatcatcgtggaggaggacaaggaggaggagagcgacctggaggacaagcagagccccaccggcagcgacagcggcagcgtgcaggaggacagcggcagcgagcccaagagagccctgcccttcagaaagggccccaacttcaccatggagaagttcctggaccccagcagaccctacaagtgcaccgtgtgcaaggagagcttcacccagaagaacatcctgctggtgcactacaacagcgtgagccacctgcacaagctgaagagagccctgcaggagagcgccaccggccagcccgagcccaccagcagccccgacaacaagcccttcaagtgcaacacctgcaacgtggcctacagccagagcagcaccctggagatccacatgagaagcgtgctgcaccagaccaaggccagagccgccaagctggaggccgccagcggcagcagcaacggcaccggcaacagcagcagcatcagcctgagcagcagcacccccagccccgtgagcaccagcggcagcaacaccttcaccaccagcaaccccagcagcgccggcatcgcccccagcagcaacctgctgagccaggtgcccaccgagagcgtgggcatgccccccctgggcaaccccatcggcgccaacatcgccagccccagcgagcccaaggaggccaacagaaagaagctggccgacatgatcgccagcagacagcagcagcagcagcagcagcagcagcagcagcagcagcagcagcagcagcagcaggcccagaccctggcccaggcccaggcccaggtgcaggcccacctgcagcaggagctgcagcagcaggccgccctgatccagagccagctgttcaaccccaccctgctgccccacttccccatgaccaccgagaccctgctgcagctgcagcagcagcagcacctgctgttccccttctacatccccagcgccgagttccagctgaaccccgaggtgagcctgcccgtgaccagcggcgccctgaccctgaccggcaccggccccggcctgctggaggacctgaaggcccaggtgcaggtgccccagcagagccaccagcagatcctgccccagcagcagcagaaccagctgagcatcgcccagagccacagcgccctgctgcagcccagccagcaccccgagaagaagaacaagctggtgatcaaggagaaggagaaggagagccagagagagagagacagcgccgagggcggcgagggcaacaccggccccaaggagaccctgcccgacgccctgaaggccaaggagaagaaggagctggcccccggcggcggcagcgagcccagcatgctgccccccagaatcgccagcgacgccagaggcaacgccaccaaggccctgctggagaacttcggcttcgagctggtgatccagtacaacgagaacaagcagaaggtgcagaagaagaacggcaagaccgaccagggcgagaacctggagaagctggagtgcgacagctgcggcaagctgttcagcaacatcctgatcctgaagagccaccaggagcacgtgcaccagaactacttccccttcaagcagctggagagattcgccaagcagtacagagaccactacgacaagctgtaccccctgagaccccagacccccgagccccccccccccccccccccccccccccccccccccctgcccgccgcccccccccagcccgccagcacccccgccatccccgccagcgccccccccatcaccagccccaccatcgcccccgcccagcccagcgtgcccctgacccagctgagcatgcccatggagctgcccatcttcagccccctgatgatgcagaccatgcccctgcagaccctgcccgcccagctgcccccccagctgggccccgtggagcccctgcccgccgacctggcccagctgtaccagcaccagctgaaccccaccctgctgcagcagcagaacaagagacccagaaccagaatcaccgacgaccagctgagagtgctgagacagtacttcgacatcaacaacagccccagcgaggagcagatcaaggagatggccgacaagagcggcctgccccagaaggtgatcaagcactggttcagaaacaccctgttcaaggagagacagagaaacaaggacagcccctacaacttcagcaacccccccatcaccagcctggaggagctgaagatcgacagcagaccccccagccccgagccccccaagcaggagtactggggcagcaagagaagcagcagaaccagattcaccgactaccagctgagagtgctgcaggacttcttcgacgccaacgcctaccccaaggacgacgagttcgagcagctgagcaacctgctgaacctgcccaccagagtgatcgtggtgtggttccagaacgccagacagaaggccagaaagaactacgagaaccagggcgagggcaaggacggcgagagaagagagctgaccaacgacagatacatcagaaccagcaacctgaactaccagtgcaagaagtgcagcctggtgttccagagaatcttcgacctgatcaagcaccagaagaagctgtgctacaaggacgaggacgaggagggccaggacgacagccagaacgaggacagcatggacgccatggagatcctgacccccaccagcagcagctgcagcacccccatgcccagccaggcctacagcgcccccgcccccagcgccaacaacaccgccagcagcgccttcctgcagctgaccgccgaggccgaggagctggccaccttcaacagcaagaccgaggccggcgacgagaagcccaagctggccgaggcccccagcgcccagcccaaccagacccaggagaagcagggccagcccaagcccgagctgcagcagcaggagcagcccgagcagaagaccaacaccccccagcagaagctgccccagctggtgagcctgcccagcctgccccagccccccccccaggccccccccccccagtgccccctgccccagagcagccccagccccagccagctgagccacctgcccctgaagcccctgcacaccagcaccccccagcagctggccaacctgcccccccagctgatcccctaccagtgcgaccagtgcaagctggccttccccagcttcgagcactggcaggagcaccagcagctgcacttcctgagcgcccagaaccagttcatccacccccagttcctggacagaagcctggacatgcccttcatgctgttcgaccccagcaaccccctgctggccagccagctgctgagcggcgccatcccccagatccccgccagcagcgccaccagccccagcacccccaccagcaccatgaacaccctgaagagaaagctggaggagaaggccagcgccagccccggcgagaacgacagcggcaccggcggcgaggagccccagagagacaagagactgagaaccaccatcacccccgagcagctggagatcctgtaccagaagtacctgctggacagcaaccccaccagaaagatgctggaccacatcgcccacgaggtgggcctgaagaagagagtggtgcaggtgtggttccagaacaccagagccagagagagaaagggccagttcagagccgtgggccccgcccaggcccacagaagatgccccttctgcagagccctgttcaaggccaagaccgccctggaggcccacatcagaagcagacactggcacgaggccaagagagccggctacaacctgaccctgagcgccatgctgctggactgcgacggcggcctgcagatgaagggcgacatcttcgacggcaccagcttcagccacctgccccccagcagcagcgacggccagggcgtgcccctgagccccgtgagcaagaccatggagctgagccccagaaccctgctgagccccagcagcatcaaggtggagggcatcgaggacttcgagagccccagcatgagcagcgtgaacctgaacttcgaccagaccaagctggacaacgacgactgcagcagcgtgaacaccgccatcaccgacaccaccaccggcgacgagggcaacgccgacaacgacagcgccaccggcatcgccaccgagaccaagagcagcagcgcccccaacgagggcctgaccaaggccgccatgatggccatgagcgagtacgaggacagactgagcagcggcctggtgagccccgcccccagcttctacagcaaggagtacgacaacgagggcaccgtggactacagcgagaccagcagcctggccgacccctgcagccccagccccggcgccagcggcagcgccggcaagagcggcgacagcggcgacagacccggccagaagagattcagaacccagatgaccaacctgcagctgaaggtgctgaagagctgcttcaacgactacagaacccccaccatgctggagtgcgaggtgctgggcaacgacatcggcctgcccaagagagtggtgcaggtgtggttccagaacgccagagccaaggagaagaagagcaagctgagcatggccaagcacttcggcatcaaccagaccagctacgagggccccaagaccgagtgcaccctgtgcggcatcaagtacagcgccagactgagcgtgagagaccacatcttcagccagcagcacatcagcaaggtgaaggacaccatcggcagccagctggacaaggagaaggagtacttcgaccccgccaccgtgagacagctgatggcccagcaggagctggacagaatcaagaaggccaacgaggtgctgggcctggccgcccagcagcagggcatgttcgacaacacccccctgcaggccctgaacctgcccaccgcctaccccgccctgcagggcatcccccccgtgctgctgcccggcctgaacagccccagcctgcccggcttcacccccagcaacaccgccctgaccagccccaagcccaacctgatgggcctgcccagcaccaccgtgcccagccccggcctgcccaccagcggcctgcccaacaagcccagcagcgccagcctgagcagccccacccccgcccaggccaccatggccatgggcccccagcagcccccccagcagcagcagcagcagcagcagccccaggtgcagcagcccccccccccccccgccgcccagcccccccccaccccccagctgcccctgcagcagcagcagcagagaaaggacaaggacagcgagaaggtgaaggagaaggagaaggcccacaagggcaagggcgagcccctgcccgtgcccaagaaggagaagggcgaggcccccaccgccaccgccgccaccatcagcgcccccctgcccaccatggagtacgccgtggaccccgcccagctgcaggccctgcaggccgccctgaccagcgaccccaccgccctgctgaccagccagttcctgccctacttcgtgcccggcttcagcccctactacgccccccagatccccggcgccctgcagagcggctacctgcagcccatgtacggcatggagggcctgttcccctacagccccgccctgagccaggccctgatgggcctgagccccggcagcctgctgcagcagtaccagcagtaccagcagagcctgcaggaggccatccagcagcagcagcagagacagctgcagcagcagcagcagcagaaggtgcagcagcagcagcccaaggccagccagacccccgtgccccccggcgcccccagccccgacaaggaccccgccaaggagagccccaagcccgaggagcagaagaacacccccagagaggtgagccccctgctgcccaagctgcccgaggagcccgaggccgagagcaagagcgccgacagcctgtacgaccccttcatcgtgcccaaggtgcagtacaagctggtgtgcagaaagtgccaggccggcttcagcgacgaggaggccgccagaagccacctgaagagcctgtgcttcttcggccagagcgtggtgaacctgcaggagatggtgctgcacgtgcccaccggcggcggcggcggcggcagcggcggcggcggcggcggcggcggcggcggcggcggcggcggcagctaccactgcctggcctgcgagagcgccctgtgcggcgaggaggccctgagccagcacctggagagcgccctgcacaagcacagaaccatcaccagagccgccagaaacgccaaggagcaccccagcctgctgccccacagcgcctgcttccccgaccccagcaccgccagcaccagccagagcgccgcccacagcaacgacagcccccccccccccagcgccgccgcccccagcagcgccagcccccacgccagcagaaagagctggccccaggtggtgagcagagccagcgccgccaagccccccagcttcccccccctgagcagcagcagcaccgtgaccagcagcagctgcagcaccagcggcgtgcagcccagcatgcccaccgacgactacagcgaggagagcgacaccgacctgagccagaagagcgacggccccgccagccccgtggagggccccaaggaccccagctgccccaaggacagcggcctgaccagcgtgggcaccgacaccttcagactgtag

SEQ ID NO: 105632 - DNA, 10704 bp, synthetic construct
  misc_feature 1..10704: note = Description of Artificial Sequence: Synthetic coding sequence
  source 1..10704: mol_type = other DNA
atggagacctgcgacagcccccccatcagcagacaggagaacggccagagcaccagcaagctgtgcggcaccacccagctggacaacgaggtgcccgagaaggtggccggcatggagcccgacagagagaacagcagcaccgacgacaacctgaagaccgacgagagaaagagcgaggccctgctgggcttcagcgtggagaacgccgccgccacccaggtgaccagcgccaaggagatcccctgcaacgagtgcgccaccagcttccccagcctgcagaagtacatggagcaccactgccccaacgccagactgcccgtgctgaaggacgacaacgagagcgagatcagcgagctggaggacagcgacgtggagaacctgaccggcgagatcgtgtaccagcccgacggcagcgcctacatcatcgaggacagcaaggagagcggccagaacgcccagaccggcgccaacagcaagctgttcagcaccgccatgttcctggacagcctggccagcgccggcgagaagagcgaccagagcgccagcgcccccatgagcttctacccccagatcatcaacaccttccacatcgccagcagcctgggcaagcccttcaccgccgaccaggccttccccaacaccagcgccctggccggcgtgggccccgtgctgcacagcttcagagtgtacgacctgagacacaagagagagaaggactacctgaccagcgacggcagcgccaagaacagctgcgtgagcaaggacgtgcccaacaacgtggacctgagcaagttcgacggctgcgtgagcgacggcaagagaaagcccgtgctgatgtgcttcctgtgcaagctgagcttcggctacatcagaagcttcgtgacccacgccgtgcacgaccacagaatgaccctgaacgacgaggagcagaagctgctgagcaacaagtgcgtgagcgccatcatccagggcatcggcaaggacaaggagcccctgatcagcttcctggagcccaagaagagcaccagcgtgtacccccacttcagcaccaccaacctgatcggccccgaccccaccttcagaggcctgtggagcgccttccacgtggagaacggcgacagcctgcccgccggcttcgccttcctgaagggcagcgccagcaccagcagcagcgccgagcagcccctgggcatcacccagatgcccaaggccgaggtgaacctgggcggcctgagcagcctggtggtgaacacccccatcaccagcgtgagcctgagccacagcagcagcgagagcagcaagatgagcgagagcaaggaccaggagaacaactgcgagagacccaaggagagcaacgtgctgcaccccaacggcgagtgccccgtgaagagcgagcccaccgagcccggcgacgaggacgaggaggacgcctacagcaacgagctggacgacgaggaggtgctgggcgagctgaccgacagcatcggcaacaaggacttccccctgctgaaccagagcatcagccccctgagcagcagcgtgctgaagttcatcgagaagggcaccagcagcagcagcgccaccgtgagcgacgacaccgagaagaagaagcagaccgccgccgtgagagccagcggcagcgtggccagcaactacggcatcagcggcaaggacttcgccgacgccagcgccagcaaggacagcgccaccgccgcccaccccagcgagatcgccagaggcgacgaggacagcagcgccaccccccaccagcacggcttcacccccagcacccccggcacccccggccccggcggcgacggcagccccggcagcggcatcgagtgccccaagtgcgacaccgtgctgggcagcagcagaagcctgggcggccacatgaccatgatgcacagcagaaacagctgcaagaccctgaagtgccccaagtgcaactggcactacaagtaccagcagaccctggaggcccacatgaaggagaagcaccccgagcccggcggcagctgcgtgtactgcaagaccggccagccccaccccagactggccagaggcgagagctacacctgcggctacaagcccttcagatgcgaggtgtgcaactacagcaccaccaccaagggcaacctgagcatccacatgcagagcgacaagcacctgaacaacgtgcagaacctgcagaacggcaacggcgagcaggtgttcggccacagcgcccccgcccccaacaccagcctgagcggctgcggcacccccagccccagcaagcccaagcagaagcccacctggagatgcgaggtgtgcgactacgagaccaacgtggccagaaacctgagaatccacatgaccagcgagaagcacatgcacaacatgatgctgctgcagcagaacatgaagcagatccagcacaacctgcacctgggcctggcccccgccgaggccgagctgtaccagtactacctggcccagaacatcggcctgaccggcatgaagctggagaaccccgccgacccccagctgatgatcaaccccttccagctggaccccgccaccgccgccgccctggcccccggcctgggcgagctgagcccctacatcagcgaccccgccctgaagctgttccagtgcgccgtgtgcaacaagttcaccagcgacagcctggaggccctgagcgtgcacgtgagcagcgagagaagcctgcccgaggaggagtggagagccgtgatcggcgacatctaccagtgcaagctgtgcaactacaacacccagctgaaggccaacttccagctgcactgcaagaccgacaagcacatgcagaagtaccagctggtggcccacatcaaggagggcggcaagagcaacgagtggagactgaagtgcatcgccatcggcaaccccgtgcacctgaagtgcaacgcctgcgactactacaccaacagcgtggacaagctgagactgcacaccaccaaccacagacacgaggccgccctgaagctgtacaagcacctgcagaagcaggagggcgccgtgaaccccgagagctgctactactactgcgccgtgtgcgactacaccaccaaggtgaagctgaacctggtgcagcacgtgagaagcgtgaagcaccagcagaccgagggcctgagaaagctgcagctgcaccagcagggcctggcccccgaggaggacaacctgagcgagatcttcttcgtgaaggactgcccccccaacgagctggagaccgccagcctgggcgccagaacctgcgacgacgacctgaccgagcagcacgaggaggccgagggcgccatcaagcccaccgccgtggccgaggacgacgagaaggacaccagcgagagagacaacagcgagggcaagaacagcaacaaggacagcgtgagcgtggccggcggcacccagcccctgctgctggccaaggaggaggacgtggccaccaagagaagcaagcccaccgaggacaacaagttctgccacgagcagttctaccagtgcccctactgcaactacaacagcagagaccagagcagaatccagatgcacgtgctgagccagcacagcgtgcagcccgtgatctgctgccccctgtgccaggacgtgctgagcaacaagatgcacctgcagctgcacctgacccacctgcacagcgtgagccccgactgcgtggagaagctgctgatgaccgtgcccgtgcccgacgtgatgatgcccaacagcatgctgctgcccgccgccgccagcgagaagagcgagagagacacccccgccgccgtgaccgccgagggcagcggcaagtacagcggcgagagccccatggacgacaagagcatggccggcctggaggacagcaaggccaacgtggaggtgaagaacgaggagcagaagcccaccaaggagcccctggaggtgagcgagtggaacaagaacagcagcaaggacgtgaagatccccgacaccctgcaggaccagctgaacgagcagcagaagagacagcccctgagcgtgagcgacagacacgtgtacaagtacagatgcaaccactgcagcctggccttcaagaccatgcagaagctgcagatccacagccagtaccacgccatcagagccgccaccatgtgcaacctgtgccagagaagcttcagaaccttccaggccctgaagaagcacctggaggccggccaccccgagctgagcgaggccgagctgcagcagctgtacgccagcctgcccgtgaacggcgagctgtgggccgagagcgagaccatgagccaggacgaccacggcctggagcaggagatggagagagagtacgaggtggaccacgagggcaaggccagccccgtgggcagcgacagcagcagcatccccgacgacatgggcagcgagcccaagagaaccctgcccttcagaaagggccccaacttcaccatggagaagttcctggaccccagcagaccctacaagtgcaccgtgtgcaaggagagcttcacccagaagaacatcctgctggtgcactacaacagcgtgagccacctgcacaagctgaagaaggtgctgcaggaggccagcagccccgtgccccaggagaccaacagcaacaccgacaacaagccctacaagtgcagcatctgcaacgtggcctacagccagagcagcaccctggagatccacatgagaagcgtgctgcaccagaccaaggccagagccgccaagctggagcccagcggccacgtggccggcggccacagcatcgccgccaacgtgaacagccccggccagggcatgctggacagcatgagcctggccgccgtgaacagcaaggacacccacctggacgccaaggagctgaacaagaagcagacccccgacctgatcagcgcccagcccgcccaccaccccccccagagccccgcccagatccagatgcagctgcagcacgagctgcagcagcaggccgccttcttccagccccagttcctgaaccccgccttcctgccccacttccccatgacccccgaggccctgctgcagttccagcagccccagttcctgttccccttctacatccccggcaccgagttcagcctgggccccgacctgggcctgcccggcagcgccaccttcggcatgcccggcatgaccggcatggccggcagcctgctggaggacctgaagcagcagatccagacccagcaccacgtgggccagacccagctgcagatcctgcagcagcaggcccagcagtaccaggccacccagccccagctgcagccccagaagcagcagcagcagcccccccccccccagcagcagcagcagcagcaggccagcaagctgctgaagcaggagcagagcaacatcgtgagcgccgactgccagatcatgaaggacgtgcccagctacaaggaggccgaggacatcagcgagaagcccgagaagcccaagcaggagttcatcagcgagggcgagggcctgaaggagggcaaggacaccaagaagcagaagagcctggagcccagcatccccccccccagaatcgccagcggcgccagaggcaacgccgccaaggccctgctggagaacttcggcttcgagctggtgatccagtacaacgagaacagacagaaggtgcagaagaagggcaagagcggcgagggcgagaacaccgacaagctggagtgcggcacctgcggcaagctgttcagcaacgtgctgatcctgaagagccaccaggagcacgtgcacggccagttcttcccctacgccgccctggagaagttcgccagacagtacagagaggcctacgacaagctgtaccccatcagccccagcagccccgagacccccccccccccccccccccccccccccctgccccccgcccccccccagcccagcagcatgggccccgtgaagatccccaacaccgtgagcacccccctgcaggcccccccccccaccccccccccccccccccccccccccccccccccccccccccccccccccccccccccccccagcgcccccccccaggtgcagctgcccgtgagcctggacctgcccctgttccccagcatcatgatgcagcccgtgcagcaccccgccctgcccccccagctggccctgcagctgccccagatggacgccctgagcgccgacctgacccagctgtgccagcagcagctgggcctggaccccaacttcctgagacacagccagttcaagagacccagaaccagaatcaccgacgaccagctgaagatcctgagagcctacttcgacatcaacaacagccccagcgaggagcagatccaggagatggccgagaagagcggcctgagccagaaggtgatcaagcactggttcagaaacaccctgttcaaggagagacagagaaacaaggacagcccctacaacttcagcaacccccccatcaccgtgctggaggacatcagaatcgacccccagcccaccagcctggagcactacaagagcgacgccagcttcagcaagagaagcagcagaaccagattcaccgactaccagctgagagtgctgcaggacttcttcgacaccaacgcctaccccaaggacgacgagatcgagcagctgagcaccgtgctgaacctgcccaccagagtgatcgtggtgtggttccagaacgccagacagaaggccagaaagagctacgagaaccaggccgagaccaaggacaacgagaagagagagctgaccaacgagagatacatcagaaccagcaacatgcagtaccagtgcaagaagtgcaacgtggtgttccccagaatcttcgacctgatcacccaccagaagaagcagtgctacaaggacgaggacgacgacgcccaggacgagagccagaccgaggacagcatggacgccaccgaccaggtggtgtacaagcactgcaccgtgagcggccagaccgacgccgccaagaacgccgccgcccccgccgccagcagcggcagcggcaccagcacccccctgatccccagccccaagcccgagcccgagaagaccagccccaagcccgagtaccccgccgagaagcccaagcagagcgaccccagcccccccagccagggcaccaagcccgccctgcccctggccagcaccagcagcgaccccccccaggccagcaccgcccagccccagccccagccccagccccccaagcagccccagctgatcggcagaccccccagcgccagccagacccccgtgcccagcagccccctgcagatcagcatgaccagcctgcagaacagcctgcccccccagctgctgcagtaccagtgcgaccagtgcaccgtggccttccccaccctggagctgtggcaggagcaccagcacatgcacttcctggccgcccagaaccagttcctgcacagccccttcctggagagacccatggacatgccctacatgatcttcgaccccaacaaccccctgatgaccggccagctgctgggcagcagcctgacccagatgcccccccaggccagcagcagccacaccaccgcccccaccaccgtggccgccagcctgaagagaaagctggacgacaaggaggacaacaactgcagcgagaaggagggcggcaacagcggcgaggaccagcacagagacaagagactgagaaccaccatcacccccgagcagctggagatcctgtacgagaagtacctgctggacagcaaccccaccagaaagatgctggaccacatcgccagagaggtgggcctgaagaagagagtggtgcaggtgtggttccagaacaccagagccagagagagaaagggccagttcagagccgtgggccccgcccagagccacaagagatgccccttctgcagagccctgttcaaggccaagagcgccctggagagccacatcagaagcagacactggaacgagggcaagcaggccggctacagcctgccccccagccccctgatcagcaccgaggacggcggcgagagcccccagaagtacatctacttcgactaccccagcctgcccctgaccaagatcgacctgagcagcgagaacgagctggccagcaccgtgagcacccccgtgagcaagaccgccgagctgagccccaagaacctgctgagccccagcagcttcaaggccgagtgcagcgaggacgtggagaacctgaacgccccccccgccgaggccggctacgaccagaacaagaccgacttcgacgagaccagcagcatcaacaccgccatcagcgacgccaccaccggcgacgagggcaacaccgagatggagagcaccaccggcagcagcggcgacgtgaagcccgccctgagccccaaggagcccaagaccctggacaccctgcccaagcccgccaccacccccaccaccgaggtgtgcgacgacaagttcctgttcagcctgaccagccccagcatccacttcaacgacaaggacggcgaccacgaccagagcttctacatcaccgacgaccccgacgacaacgccgacagaagcgagaccagcagcatcgccgaccccagcagccccaaccccttcggcagcagcaaccccttcaagagcaagagcaacgacagacccggccacaagagattcagaacccagatgagcaacctgcagctgaaggtgctgaaggcctgcttcagcgactacagaacccccaccatgcaggagtgcgagatgctgggcaacgagatcggcctgcccaagagagtggtgcaggtgtggttccagaacgccagagccaaggagaagaagttcaagatcaacatcggcaagcccttcatgatcaaccagggcggcaccgagggcaccaagcccgagtgcaccctgtgcggcgtgaagtacagcgccagactgagcatcagagaccacatcttcagcaagcagcacatcagcaaggtgagagagaccgtgggcagccagctggacagagagaaggactacctggcccccaccaccgtgagacagctgatggcccagcaggagctggacagaatcaagaaggccagcgacgtgctgggcctgaccgtgcagcagcccggcatgatggacagcagcagcctgcacggcatcagcctgcccaccgcctaccccggcctgcccggcctgccccccgtgctgctgcccggcatgaacggccccagcagcctgcccggcttcccccagaacagcaacatcgccagcggcatgctgggcttccccaccagcgccaccagcagccccgccctgagcctgagcagcgcccccaccaagcccctgctgcagaccccccccccccccccccccccccccccccccccccccagcagcagcctgagcggccagcagaccgagcagcagaacaaggagagcgagaagaagcagaccaagcccaacaaggtgaagaagatcaaggaggaggagctggaggccaccaagcccgagaagcaccccaagaaggaggagaagatcagcagcgccctgagcgtgctgggcaaggtggtgggcgagacccacgtggaccccatccagctgcaggccctgcagaacgccatcgccggcgaccccgccagcttcatcggcggccagttcctgccctacttcatccccggcttcgccagctacttcaccccccagctgcccggcaccgtgcagggcggctacttcccccccgtgtgcggcatggagagcctgttcccctacggccccaccatgccccagaccctggccggcctgagccccggcgccctgctgcagcagtaccagcagtaccagcagaacctgcaggagagcctgcagaagcagcagaagcagcagcaggagcagcagcagaagcccgtgcaggccaagaccagcaaggtggagagcgaccagccccagaacagcaacgacgccagcgagaccaaggaggacaagagcaccgccaccgagagcaccaaggaggagccccagctggagagcaagagcgccgacttcagcgacacctacgtggtgcccttcgtgaagtacgagttcatctgcagaaagtgccagatgatgttcaccgacgaggacgccgccgtgaaccaccagaagagcttctgctacttcggccagcccctgatcgacccccaggagaccgtgctgagagtgcccgtgagcaagtaccagtgcctggcctgcgacgtggccatcagcggcaacgaggccctgagccagcacctgcagagcagcctgcacaaggagaagaccatcaagcaggccatgagaaacgccaaggagcacgtgagactgctgccccacagcgtgtgcagccccaaccccaacaccaccagcaccagccagagcgccgccagcagcaacaacacctacccccacctgagctgcttcagcatgaagagctggcccaacatcctgttccaggccagcgccagaagagccgccagcccccccagcagcccccccagcctgagcctgcccagcaccgtgaccagcagcctgtgcagcaccagcggcgtgcagaccagcctgcccaccgagagctgcagcgacgagagcgacagcgagctgagccagaagctggaggacctggacaacagcctggaggtgaaggccaagcccgccagcggcctggacggcaacttcaacagcatcagaatggacatgttcagcgtgtag

SEQ ID NO: 105633 - DNA, 10803 bp, synthetic construct
  misc_feature 1..10803: note = Description of Artificial Sequence: Synthetic coding sequence
  source 1..10803: mol_type = other DNA
atggagacctgcgacagcccccccatcagcagacaggagaacggccagagcaccagcaagctgtgcggcaccacccagctggacaacgaggtgcccgagaaggtggccggcatggagcccgacagagagaacagcagcaccgacgacaacctgaagaccgacgagagaaagagcgaggccctgctgggcttcagcgtggagaacgccgccgccacccaggtgaccagcgccaaggagatcccctgcaacgagtgcgccaccagcttccccagcctgcagaagtacatggagcaccactgccccaacgccagactgcccgtgctgaaggacgacaacgagagcgagatcagcgagctggaggacagcgacgtggagaacctgaccggcgagatcgtgtaccagcccgacggcagcgcctacatcatcgaggacagcaaggagagcggccagaacgcccagaccggcgccaacagcaagctgttcagcaccgccatgttcctggacagcctggccagcgccggcgagaagagcgaccagagcgccagcgcccccatgagcttctacccccagatcatcaacaccttccacatcgccagcagcctgggcaagcccttcaccgccgaccaggccttccccaacaccagcgccctggccggcgtgggccccgtgctgcacagcttcagagtgtacgacctgagacacaagagagagaaggactacctgaccagcgacggcagcgccaagaacagctgcgtgagcaaggacgtgcccaacaacgtggacctgagcaagttcgacggctgcgtgagcgacggcaagagaaagcccgtgctgatgtgcttcctgtgcaagctgagcttcggctacatcagaagcttcgtgacccacgccgtgcacgaccacagaatgaccctgaacgacgaggagcagaagctgctgagcaacaagtgcgtgagcgccatcatccagggcatcggcaaggacaaggagcccctgatcagcttcctggagcccaagaagagcaccagcgtgtacccccacttcagcaccaccaacctgatcggccccgaccccaccttcagaggcctgtggagcgccttccacgtggagaacggcgacagcctgcccgccggcttcgccttcctgaagggcagcgccagcaccagcagcagcgccgagcagcccctgggcatcacccagatgcccaaggccgaggtgaacctgggcggcctgagcagcctggtggtgaacacccccatcaccagcgtgagcctgagccacagcagcagcgagagcagcaagatgagcgagagcaaggaccaggagaacaactgcgagagacccaaggagagcaacgtgctgcaccccaacggcgagtgccccgtgaagagcgagcccaccgagcccggcgacgaggacgaggaggacgcctacagcaacgagctggacgacgaggaggtgctgggcgagctgaccgacagcatcggcaacaaggacttccccctgctgaaccagagcatcagccccctgagcagcagcgtgctgaagttcatcgagaagggcaccagcagcagcagcgccaccgtgagcgacgacaccgagaagaagaagcagaccgccgccgtgagagccagcggcagcgtggccagcaactacggcatcagcggcaaggacttcgccgacgccagcgccagcaaggacagcgccaccgccgcccaccccagcgagatcgccagaggcgacgaggacagcagcgccaccccccaccagcacggcttcacccccagcacccccggcacccccggccccggcggcgacggcagccccggcagcggcatcgagtgccccaagtgcgacaccgtgctgggcagcagcagaagcctgggcggccacatgaccatgatgcacagcagaaacagctgcaagaccctgaagtgccccaagtgcaactggcactacaagtaccagcagaccctggaggcccacatgaaggagaagcaccccgagcccggcggcagctgcgtgtactgcaagaccggccagccccaccccagactggccagaggcgagagctacacctgcggctacaagcccttcagatgcgaggtgtgcaactacagcaccaccaccaagggcaacctgagcatccacatgcagagcgacaagcacctgaacaacgtgcagaacctgcagaacggcaacggcgagcaggtgttcggccacagcgcccccgcccccaacaccagcctgagcggctgcggcacccccagccccagcaagcccaagcagaagcccacctggagatgcgaggtgtgcgactacgagaccaacgtggccagaaacctgagaatccacatgaccagcgagaagcacatgcacaacatgatgctgctgcagcagaacatgaagcagatccagcacaacctgcacctgggcctggcccccgccgaggccgagctgtaccagtactacctggcccagaacatcggcctgaccggcatgaagctggagaaccccgccgacccccagctgatgatcaaccccttccagctggaccccgccaccgccgccgccctggcccccggcctggtgaacaacgagctgccccccgagatcagactggccagcggccagctgatgggcgacgacctgagcctgctgaccgccggcgagctgagcccctacatcagcgaccccgccctgaagctgttccagtgcgccgtgtgcaacaagttcaccagcgacagcctggaggccctgagcgtgcacgtgagcagcgagagaagcctgcccgaggaggagtggagagccgtgatcggcgacatctaccagtgcaagctgtgcaactacaacacccagctgaaggccaacttccagctgcactgcaagaccgacaagcacatgcagaagtaccagctggtggcccacatcaaggagggcggcaagagcaacgagtggagactgaagtgcatcgccatcggcaaccccgtgcacctgaagtgcaacgcctgcgactactacaccaacagcgtggacaagctgagactgcacaccaccaaccacagacacgaggccgccctgaagctgtacaagcacctgcagaagcaggagggcgccgtgaaccccgagagctgctactactactgcgccgtgtgcgactacaccaccaaggtgaagctgaacctggtgcagcacgtgagaagcgtgaagcaccagcagaccgagggcctgagaaagctgcagctgcaccagcagggcctggcccccgaggaggacaacctgagcgagatcttcttcgtgaaggactgcccccccaacgagctggagaccgccagcctgggcgccagaacctgcgacgacgacctgaccgagcagcagctgagaagcaccagcgaggagcagagcgaggaggccgagggcgccatcaagcccaccgccgtggccgaggacgacgagaaggacaccagcgagagagacaacagcgagggcaagaacagcaacaaggacagcggcatcatcacccccgagaaggagctgaaggtgagcgtggccggcggcacccagcccctgctgctggccaaggaggaggacgtggccaccaagagaagcaagcccaccgaggacaacaagttctgccacgagcagttctaccagtgcccctactgcaactacaacagcagagaccagagcagaatccagatgcacgtgctgagccagcacagcgtgcagcccgtgatctgctgccccctgtgccaggacgtgctgagcaacaagatgcacctgcagctgcacctgacccacctgcacagcgtgagccccgactgcgtggagaagctgctgatgaccgtgcccgtgcccgacgtgatgatgcccaacagcatgctgctgcccgccgccgccagcgagaagagcgagagagacacccccgccgccgtgaccgccgagggcagcggcaagtacagcggcgagagccccatggacgacaagagcatggccggcctggaggacagcaaggccaacgtggaggtgaagaacgaggagcagaagcccaccaaggagcccctggaggtgagcgagtggaacaagaacagcagcaaggacgtgaagatccccgacaccctgcaggaccagctgaacgagcagcagaagagacagcccctgagcgtgagcgacagacacgtgtacaagtacagatgcaaccactgcagcctggccttcaagaccatgcagaagctgcagatccacagccagtaccacgccatcagagccgccaccatgtgcaacctgtgccagagaagcttcagaaccttccaggccctgaagaagcacctggaggccggccaccccgagctgagcgaggccgagctgcagcagctgtacgccagcctgcccgtgaacggcgagctgtgggccgagagcgagaccatgagccaggacgaccacggcctggagcaggagatggagagagagtacgaggtggaccacgagggcaaggccagccccgtgggcagcgacagcagcagcatccccgacgacatgggcagcgagcccaagagaaccctgcccttcagaaagggccccaacttcaccatggagaagttcctggaccccagcagaccctacaagtgcaccgtgtgcaaggagagcttcacccagaagaacatcctgctggtgcactacaacagcgtgagccacctgcacaagctgaagaaggtgctgcaggaggccagcagccccgtgccccaggagaccaacagcaacaccgacaacaagccctacaagtgcagcatctgcaacgtggcctacagccagagcagcaccctggagatccacatgagaagcgtgctgcaccagaccaaggccagagccgccaagctggagcccagcggccacgtggccggcggccacagcatcgccgccaacgtgaacagccccggccagggcatgctggacagcatgagcctggccgccgtgaacagcaaggacacccacctggacgccaaggagctgaacaagaagcagacccccgacctgatcagcgcccagcccgcccaccaccccccccagagccccgcccagatccagatgcagctgcagcacgagctgcagcagcaggccgccttcttccagccccagttcctgaaccccgccttcctgccccacttccccatgacccccgaggccctgctgcagttccagcagccccagttcctgttccccttctacatccccggcaccgagttcagcctgggccccgacctgggcctgcccggcagcgccaccttcggcatgcccggcatgaccggcatggccggcagcctgctggaggacctgaagcagcagatccagacccagcaccacgtgggccagacccagctgcagatcctgcagcagcaggcccagcagtaccaggccacccagccccagctgcagccccagaagcagcagcagcagcccccccccccccagcagcagcagcagcagcaggccagcaagctgctgaagcaggagcagagcaacatcgtgagcgccgactgccagatcatgaaggacgtgcccagctacaaggaggccgaggacatcagcgagaagcccgagaagcccaagcaggagttcatcagcgagggcgagggcctgaaggagggcaaggacaccaagaagcagaagagcctggagcccagcatccccccccccagaatcgccagcggcgccagaggcaacgccgccaaggccctgctggagaacttcggcttcgagctggtgatccagtacaacgagaacagacagaaggtgcagaagaagggcaagagcggcgagggcgagaacaccgacaagctggagtgcggcacctgcggcaagctgttcagcaacgtgctgatcctgaagagccaccaggagcacgtgcacggccagttcttcccctacgccgccctggagaagttcgccagacagtacagagaggcctacgacaagctgtaccccatcagccccagcagccccgagacccccccccccccccccccccccccccccctgccccccgcccccccccagcccagcagcatgggccccgtgaagatccccaacaccgtgagcacccccctgcaggcccccccccccaccccccccccccccagcgcccccccccaggtgcagctgcccgtgagcctggacctgcccctgttccccagcatcatgatgcagcccgtgcagcaccccgccctgcccccccagctggccctgcagctgccccagatggacgccctgagcgccgacctgacccagctgtgccagcagcagctgggcctggaccccaacttcctgagacacagccagttcaagagacccagaaccagaatcaccgacgaccagctgaagatcctgagagcctacttcgacatcaacaacagccccagcgaggagcagatccaggagatggccgagaagagcggcctgagccagaaggtgatcaagcactggttcagaaacaccctgttcaaggagagacagagaaacaaggacagcccctacaacttcagcaacccccccatcaccgtgctggaggacatcagaatcgacccccagcccaccagcctggagcactacaagagcgacgccagcttcagcaagagaagcagcagaaccagattcaccgactaccagctgagagtgctgcaggacttcttcgacaccaacgcctaccccaaggacgacgagatcgagcagctgagcaccgtgctgaacctgcccaccagagtgatcgtggtgtggttccagaacgccagacagaaggccagaaagagctacgagaaccaggccgagaccaaggacaacgagaagagagagctgaccaacgagagatacatcagaaccagcaacatgcagtaccagtgcaagaagtgcaacgtggtgttccccagaatcttcgacctgatcacccaccagaagaagcagtgctacaaggacgaggacgacgacgcccaggacgagagccagaccgaggacagcatggacgccaccgaccaggtggtgtacaagcactgcaccgtgagcggccagaccgacgccgccaagaacgccgccgcccccgccgccagcagcggcagcggcaccagcacccccctgatccccagccccaagcccgagcccgagaagaccagccccaagcccgagtaccccgccgagaagcccaagcagagcgaccccagcccccccagccagggcaccaagcccgccctgcccctggccagcaccagcagcgaccccccccaggccagcaccgcccagccccagccccagccccagccccccaagcagccccagctgatcggcagaccccccagcgccagccagacccccgtgcccagcagccccctgcagatcagcatgaccagcctgcagaacagcctgcccccccagctgctgcagtaccagtgcgaccagtgcaccgtggccttccccaccctggagctgtggcaggagcaccagcacatgcacttcctggccgcccagaaccagttcctgcacagccccttcctggagagacccatggacatgccctacatgatcttcgaccccaacaaccccctgatgaccggccagctgctgggcagcagcctgacccagatgcccccccaggccagcagcagccacaccaccgcccccaccaccgtggccgccagcctgaagagaaagctggacgacaaggaggacaacaactgcagcgagaaggagggcggcaacagcggcgaggaccagcacagagacaagagactgagaaccaccatcacccccgagcagctggagatcctgtacgagaagtacctgctggacagcaaccccaccagaaagatgctggaccacatcgccagagaggtgggcctgaagaagagagtggtgcaggtgtggttccagaacaccagagccagagagagaaagggccagttcagagccgtgggccccgcccagagccacaagagatgccccttctgcagagccctgttcaaggccaagagcgccctggagagccacatcagaagcagacactggaacgagggcaagcaggccggctacagcctgccccccagccccctgatcagcaccgaggacggcggcgagagcccccagaagtacatctacttcgactaccccagcctgcccctgaccaagatcgacctgagcagcgagaacgagctggccagcaccgtgagcacccccgtgagcaagaccgccgagctgagccccaagaacctgctgagccccagcagcttcaaggccgagtgcagcgaggacgtggagaacctgaacgccccccccgccgaggccggctacgaccagaacaagaccgacttcgacgagaccagcagcatcaacaccgccatcagcgacgccaccaccggcgacgagggcaacaccgagatggagagcaccaccggcagcagcggcgacgtgaagcccgccctgagccccaaggagcccaagaccctggacaccctgcccaagcccgccaccacccccaccaccgaggtgtgcgacgacaagttcctgttcagcctgaccagccccagcatccacttcaacgacaaggacggcgaccacgaccagagcttctacatcaccgacgaccccgacgacaacgccgacagaagcgagaccagcagcatcgccgaccccagcagccccaaccccttcggcagcagcaaccccttcaagagcaagagcaacgacagacccggccacaagagattcagaacccagatgagcaacctgcagctgaaggtgctgaaggcctgcttcagcgactacagaacccccaccatgcaggagtgcgagatgctgggcaacgagatcggcctgcccaagagagtggtgcaggtgtggttccagaacgccagagccaaggagaagaagttcaagatcaacatcggcaagcccttcatgatcaaccagggcggcaccgagggcaccaagcccgagtgcaccctgtgcggcgtgaagtacagcgccagactgagcatcagagaccacatcttcagcaagcagcacatcagcaaggtgagagagaccgtgggcagccagctggacagagagaaggactacctggcccccaccaccgtgagacagctgatggcccagcaggagctggacagaatcaagaaggccagcgacgtgctgggcctgaccgtgcagcagcccggcatgatggacagcagcagcctgcacggcatcagcctgcccaccgcctaccccggcctgcccggcctgccccccgtgctgctgcccggcatgaacggccccagcagcctgcccggcttcccccagaacagcaacaccctgaccccccccggcgccggcatgctgggcttccccaccagcgccaccagcagccccgccctgagcctgagcagcgcccccaccaagcccctgctgcagaccccccccccccccccccccccccccccccccccccccagcagcagcctgagcggccagcagaccgagcagcagaacaaggagagcgagaagaagcagaccaagcccaacaaggtgaagaagatcaaggaggaggagctggaggccaccaagcccgagaagcaccccaagaaggaggagaagatcagcagcgccctgagcgtgctgggcaaggtggtgggcgagacccacgtggaccccatccagctgcaggccctgcagaacgccatcgccggcgaccccgccagcttcatcggcggccagttcctgccctacttcatccccggcttcgccagctacttcaccccccagctgcccggcaccgtgcagggcggctacttcccccccgtgtgcggcatggagagcctgttcccctacggccccaccatgccccagaccctggccggcctgagccccggcgccctgctgcagcagtaccagcagtaccagcagaacctgcaggagagcctgcagaagcagcagaagcagcagcaggagcagcagcagaagcccgtgcaggccaagaccagcaaggtggagagcgaccagccccagaacagcaacgacgccagcgagaccaaggaggacaagagcaccgccaccgagagcaccaaggaggagccccagctggagagcaagagcgccgacttcagcgacacctacgtggtgcccttcgtgaagtacgagttcatctgcagaaagtgccagatgatgttcaccgacgaggacgccgccgtgaaccaccagaagagcttctgctacttcggccagcccctgatcgacccccaggagaccgtgctgagagtgcccgtgagcaagtaccagtgcctggcctgcgacgtggccatcagcggcaacgaggccctgagccagcacctgcagagcagcctgcacaaggagaagaccatcaagcaggccatgagaaacgccaaggagcacgtgagactgctgccccacagcgtgtgcagccccaaccccaacaccaccagcaccagccagagcgccgccagcagcaacaacacctacccccacctgagctgcttcagcatgaagagctggcccaacatcctgttccaggccagcgccagaagagccgccagcccccccagcagcccccccagcctgagcctgcccagcaccgtgaccagcagcctgtgcagcaccagcggcgtgcagaccagcctgcccaccgagagctgcagcgacgagagcgacagcgagctgagccagaagctggaggacctggacaacagcctggaggtgaaggccaagcccgccagcggcctggacggcaacttcaacagcatcagaatggacatgttcagcgtgtag

SEQ ID NO: 105634 - DNA, 10716 bp, synthetic construct
  misc_feature 1..10716: note = Description of Artificial Sequence: Synthetic coding sequence
  source 1..10716: mol_type = other DNA
atggagacctgcgacagcccccccatcagcagacaggagaacggccagagcaccagcaagctgtgcggcaccacccagctggacaacgaggtgcccgagaaggtggccggcatggagcccgacagagagaacagcagcaccgacgacaacctgaagaccgacgagagaaagagcgaggccctgctgggcttcagcgtggagaacgccgccgccacccaggtgaccagcgccaaggagatcccctgcaacgagtgcgccaccagcttccccagcctgcagaagtacatggagcaccactgccccaacgccagactgcccgtgctgaaggacgacaacgagagcgagatcagcgagctggaggacagcgacgtggagaacctgaccggcgagatcgtgtaccagcccgacggcagcgcctacatcatcgaggacagcaaggagagcggccagaacgcccagaccggcgccaacagcaagctgttcagcaccgccatgttcctggacagcctggccagcgccggcgagaagagcgaccagagcgccagcgcccccatgagcttctacccccagatcatcaacaccttccacatcgccagcagcctgggcaagcccttcaccgccgaccaggccttccccaacaccagcgccctggccggcgtgggccccgtgctgcacagcttcagagtgtacgacctgagacacaagagagagaaggactacctgaccagcgacggcagcgccaagaacagctgcgtgagcaaggacgtgcccaacaacgtggacctgagcaagttcgacggctgcgtgagcgacggcaagagaaagcccgtgctgatgtgcttcctgtgcaagctgagcttcggctacatcagaagcttcgtgacccacgccgtgcacgaccacagaatgaccctgaacgacgaggagcagaagctgctgagcaacaagtgcgtgagcgccatcatccagggcatcggcaaggacaaggagcccctgatcagcttcctggagcccaagaagagcaccagcgtgtacccccacttcagcaccaccaacctgatcggccccgaccccaccttcagaggcctgtggagcgccttccacgtggagaacggcgacagcctgcccgccggcttcgccttcctgaagggcagcgccagcaccagcagcagcgccgagcagcccctgggcatcacccagatgcccaaggccgaggtgaacctgggcggcctgagcagcctggtggtgaacacccccatcaccagcgtgagcctgagccacagcagcagcgagagcagcaagatgagcgagagcaaggaccaggagaacaactgcgagagacccaaggagagcaacgtgctgcaccccaacggcgagtgccccgtgaagagcgagcccaccgagcccggcgacgaggacgaggaggacgcctacagcaacgagctggacgacgaggaggtgctgggcgagctgaccgacagcatcggcaacaaggacttccccctgctgaaccagagcatcagccccctgagcagcagcgtgctgaagttcatcgagaagggcaccagcagcagcagcgccaccgtgagcgacgacaccgagaagaagaagcagaccgccgccgtgagagccagcggcagcgtggccagcaactacggcatcagcggcaaggacttcgccgacgccagcgccagcaaggacagcgccaccgccgcccaccccagcgagatcgccagaggcgacgaggacagcagcgccaccccccaccagcacggcttcacccccagcacccccggcacccccggccccggcggcgacggcagccccggcagcggcatcgagtgccccaagtgcgacaccgtgctgggcagcagcagaagcctgggcggccacatgaccatgatgcacagcagaaacagctgcaagaccctgaagtgccccaagtgcaactggcactacaagtaccagcagaccctggaggcccacatgaaggagaagcaccccgagcccggcggcagctgcgtgtactgcaagaccggccagccccaccccagactggccagaggcgagagctacacctgcggctacaagcccttcagatgcgaggtgtgcaactacagcaccaccaccaagggcaacctgagcatccacatgcagagcgacaagcacctgaacaacgtgcagaacctgcagaacggcaacggcgagcaggtgttcggccacagcgcccccgcccccaacaccagcctgagcggctgcggcacccccagccccagcaagcccaagcagaagcccacctggagatgcgaggtgtgcgactacgagaccaacgtggccagaaacctgagaatccacatgaccagcgagaagcacatgcacaacatgatgctgctgcagcagaacatgaagcagatccagcacaacctgcacctgggcctggcccccgccgaggccgagctgtaccagtactacctggcccagaacatcggcctgaccggcatgaagctggagaaccccgccgacccccagctgatgatcaaccccttccagctggaccccgccaccgccgccgccctggcccccggcctgggcgagctgagcccctacatcagcgaccccgccctgaagctgttccagtgcgccgtgtgcaacaagttcaccagcgacagcctggaggccctgagcgtgcacgtgagcagcgagagaagcctgcccgaggaggagtggagagccgtgatcggcgacatctaccagtgcaagctgtgcaactacaacacccagctgaaggccaacttccagctgcactgcaagaccgacaagcacatgcagaagtaccagctggtggcccacatcaaggagggcggcaagagcaacgagtggagactgaagtgcatcgccatcggcaaccccgtgcacctgaagtgcaacgcctgcgactactacaccaacagcgtggacaagctgagactgcacaccaccaaccacagacacgaggccgccctgaagctgtacaagcacctgcagaagcaggagggcgccgtgaaccccgagagctgctactactactgcgccgtgtgcgactacaccaccaaggtgaagctgaacctggtgcagcacgtgagaagcgtgaagcaccagcagaccgagggcctgagaaagctgcagctgcaccagcagggcctggcccccgaggaggacaacctgagcgagatcttcttcgtgaaggactgcccccccaacgagctggagaccgccagcctgggcgccagaacctgcgacgacgacctgaccgagcagcacgaggaggccgagggcgccatcaagcccaccgccgtggccgaggacgacgagaaggacaccagcgagagagacaacagcgagggcaagaacagcaacaaggacagcgtgagcgtggccggcggcacccagcccctgctgctggccaaggaggaggacgtggccaccaagagaagcaagcccaccgaggacaacaagttctgccacgagcagttctaccagtgcccctactgcaactacaacagcagagaccagagcagaatccagatgcacgtgctgagccagcacagcgtgcagcccgtgatctgctgccccctgtgccaggacgtgctgagcaacaagatgcacctgcagctgcacctgacccacctgcacagcgtgagccccgactgcgtggagaagctgctgatgaccgtgcccgtgcccgacgtgatgatgcccaacagcatgctgctgcccgccgccgccagcgagaagagcgagagagacacccccgccgccgtgaccgccgagggcagcggcaagtacagcggcgagagccccatggacgacaagagcatggccggcctggaggacagcaaggccaacgtggaggtgaagaacgaggagcagaagcccaccaaggagcccctggaggtgagcgagtggaacaagaacagcagcaaggacgtgaagatccccgacaccctgcaggaccagctgaacgagcagcagaagagacagcccctgagcgtgagcgacagacacgtgtacaagtacagatgcaaccactgcagcctggccttcaagaccatgcagaagctgcagatccacagccagtaccacgccatcagagccgccaccatgtgcaacctgtgccagagaagcttcagaaccttccaggccctgaagaagcacctggaggccggccaccccgagctgagcgaggccgagctgcagcagctgtacgccagcctgcccgtgaacggcgagctgtgggccgagagcgagaccatgagccaggacgaccacggcctggagcaggagatggagagagagtacgaggtggaccacgagggcaaggccagccccgtgggcagcgacagcagcagcatccccgacgacatgggcagcgagcccaagagaaccctgcccttcagaaagggccccaacttcaccatggagaagttcctggaccccagcagaccctacaagtgcaccgtgtgcaaggagagcttcacccagaagaacatcctgctggtgcactacaacagcgtgagccacctgcacaagctgaagaaggtgctgcaggaggccagcagccccgtgccccaggagaccaacagcaacaccgacaacaagccctacaagtgcagcatctgcaacgtggcctacagccagagcagcaccctggagatccacatgagaagcgtgctgcaccagaccaaggccagagccgccaagctggagcccagcggccacgtggccggcggccacagcatcgccgccaacgtgaacagccccggccagggcatgctggacagcatgagcctggccgccgtgaacagcaaggacacccacctggacgccaaggagctgaacaagaagcagacccccgacctgatcagcgcccagcccgcccaccaccccccccagagccccgcccagatccagatgcagctgcagcacgagctgcagcagcaggccgccttcttccagccccagttcctgaaccccgccttcctgccccacttccccatgacccccgaggccctgctgcagttccagcagccccagttcctgttccccttctacatccccggcaccgagttcagcctgggccccgacctgggcctgcccggcagcgccaccttcggcatgcccggcatgaccggcatggccggcagcctgctggaggacctgaagcagcagatccagacccagcaccacgtgggccagacccagctgcagatcctgcagcagcaggcccagcagtaccaggccacccagccccagctgcagccccagaagcagcagcagcagcccccccccccccagcagcagcagcagcagcaggccagcaagctgctgaagcaggagcagagcaacatcgtgagcgccgactgccagatcatgaaggacgtgcccagctacaaggaggccgaggacatcagcgagaagcccgagaagcccaagcaggagttcatcagcgagggcgagggcctgaaggagggcaaggacaccaagaagcagaagagcctggagcccagcatccccccccccagaatcgccagcggcgccagaggcaacgccgccaaggccctgctggagaacttcggcttcgagctggtgatccagtacaacgagaacagacagaaggtgcagaagaagggcaagagcggcgagggcgagaacaccgacaagctggagtgcggcacctgcggcaagctgttcagcaacgtgctgatcctgaagagccaccaggagcacgtgcacggccagttcttcccctacgccgccctggagaagttcgccagacagtacagagaggcctacgacaagctgtaccccatcagccccagcagccccgagacccccccccccccccccccccccccccccctgccccccgcccccccccagcccagcagcatgggccccgtgaagatccccaacaccgtgagcacccccctgcaggcccccccccccaccccccccccccccccccccccccccccccccccccccccccccccccccccccccccccccagcgcccccccccaggtgcagctgcccgtgagcctggacctgcccctgttccccagcatcatgatgcagcccgtgcagcaccccgccctgcccccccagctggccctgcagctgccccagatggacgccctgagcgccgacctgacccagctgtgccagcagcagctgggcctggaccccaacttcctgagacacagccagttcaagagacccagaaccagaatcaccgacgaccagctgaagatcctgagagcctacttcgacatcaacaacagccccagcgaggagcagatccaggagatggccgagaagagcggcctgagccagaaggtgatcaagcactggttcagaaacaccctgttcaaggagagacagagaaacaaggacagcccctacaacttcagcaacccccccatcaccgtgctggaggacatcagaatcgacccccagcccaccagcctggagcactacaagagcgacgccagcttcagcaagagaagcagcagaaccagattcaccgactaccagctgagagtgctgcaggacttcttcgacaccaacgcctaccccaaggacgacgagatcgagcagctgagcaccgtgctgaacctgcccaccagagtgatcgtggtgtggttccagaacgccagacagaaggccagaaagagctacgagaaccaggccgagaccaaggacaacgagaagagagagctgaccaacgagagatacatcagaaccagcaacatgcagtaccagtgcaagaagtgcaacgtggtgttccccagaatcttcgacctgatcacccaccagaagaagcagtgctacaaggacgaggacgacgacgcccaggacgagagccagaccgaggacagcatggacgccaccgaccaggtggtgtacaagcactgcaccgtgagcggccagaccgacgccgccaagaacgccgccgcccccgccgccagcagcggcagcggcaccagcacccccctgatccccagccccaagcccgagcccgagaagaccagccccaagcccgagtaccccgccgagaagcccaagcagagcgaccccagcccccccagccagggcaccaagcccgccctgcccctggccagcaccagcagcgaccccccccaggccagcaccgcccagccccagccccagccccagccccccaagcagccccagctgatcggcagaccccccagcgccagccagacccccgtgcccagcagccccctgcagatcagcatgaccagcctgcagaacagcctgcccccccagctgctgcagtaccagtgcgaccagtgcaccgtggccttccccaccctggagctgtggcaggagcaccagcacatgcacttcctggccgcccagaaccagttcctgcacagccccttcctggagagacccatggacatgccctacatgatcttcgaccccaacaaccccctgatgaccggccagctgctgggcagcagcctgacccagatgcccccccaggccagcagcagccacaccaccgcccccaccaccgtggccgccagcctgaagagaaagctggacgacaaggaggacaacaactgcagcgagaaggagggcggcaacagcggcgaggaccagcacagagacaagagactgagaaccaccatcacccccgagcagctggagatcctgtacgagaagtacctgctggacagcaaccccaccagaaagatgctggaccacatcgccagagaggtgggcctgaagaagagagtggtgcaggtgtggttccagaacaccagagccagagagagaaagggccagttcagagccgtgggccccgcccagagccacaagagatgccccttctgcagagccctgttcaaggccaagagcgccctggagagccacatcagaagcagacactggaacgagggcaagcaggccggctacagcctgccccccagccccctgatcagcaccgaggacggcggcgagagcccccagaagtacatctacttcgactaccccagcctgcccctgaccaagatcgacctgagcagcgagaacgagctggccagcaccgtgagcacccccgtgagcaagaccgccgagctgagccccaagaacctgctgagccccagcagcttcaaggccgagtgcagcgaggacgtggagaacctgaacgccccccccgccgaggccggctacgaccagaacaagaccgacttcgacgagaccagcagcatcaacaccgccatcagcgacgccaccaccggcgacgagggcaacaccgagatggagagcaccaccggcagcagcggcgacgtgaagcccgccctgagccccaaggagcccaagaccctggacaccctgcccaagcccgccaccacccccaccaccgaggtgtgcgacgacaagttcctgttcagcctgaccagccccagcatccacttcaacgacaaggacggcgaccacgaccagagcttctacatcaccgacgaccccgacgacaacgccgacagaagcgagaccagcagcatcgccgaccccagcagccccaaccccttcggcagcagcaaccccttcaagagcaagagcaacgacagacccggccacaagagattcagaacccagatgagcaacctgcagctgaaggtgctgaaggcctgcttcagcgactacagaacccccaccatgcaggagtgcgagatgctgggcaacgagatcggcctgcccaagagagtggtgcaggtgtggttccagaacgccagagccaaggagaagaagttcaagatcaacatcggcaagcccttcatgatcaaccagggcggcaccgagggcaccaagcccgagtgcaccctgtgcggcgtgaagtacagcgccagactgagcatcagagaccacatcttcagcaagcagcacatcagcaaggtgagagagaccgtgggcagccagctggacagagagaaggactacctggcccccaccaccgtgagacagctgatggcccagcaggagctggacagaatcaagaaggccagcgacgtgctgggcctgaccgtgcagcagcccggcatgatggacagcagcagcctgcacggcatcagcctgcccaccgcctaccccggcctgcccggcctgccccccgtgctgctgcccggcatgaacggccccagcagcctgcccggcttcccccagaacagcaacaccctgaccccccccggcgccggcatgctgggcttccccaccagcgccaccagcagccccgccctgagcctgagcagcgcccccaccaagcccctgctgcagaccccccccccccccccccccccccccccccccccccccagcagcagcctgagcggccagcagaccgagcagcagaacaaggagagcgagaagaagcagaccaagcccaacaaggtgaagaagatcaaggaggaggagctggaggccaccaagcccgagaagcaccccaagaaggaggagaagatcagcagcgccctgagcgtgctgggcaaggtggtgggcgagacccacgtggaccccatccagctgcaggccctgcagaacgccatcgccggcgaccccgccagcttcatcggcggccagttcctgccctacttcatccccggcttcgccagctacttcaccccccagctgcccggcaccgtgcagggcggctacttcccccccgtgtgcggcatggagagcctgttcccctacggccccaccatgccccagaccctggccggcctgagccccggcgccctgctgcagcagtaccagcagtaccagcagaacctgcaggagagcctgcagaagcagcagaagcagcagcaggagcagcagcagaagcccgtgcaggccaagaccagcaaggtggagagcgaccagccccagaacagcaacgacgccagcgagaccaaggaggacaagagcaccgccaccgagagcaccaaggaggagccccagctggagagcaagagcgccgacttcagcgacacctacgtggtgcccttcgtgaagtacgagttcatctgcagaaagtgccagatgatgttcaccgacgaggacgccgccgtgaaccaccagaagagcttctgctacttcggccagcccctgatcgacccccaggagaccgtgctgagagtgcccgtgagcaagtaccagtgcctggcctgcgacgtggccatcagcggcaacgaggccctgagccagcacctgcagagcagcctgcacaaggagaagaccatcaagcaggccatgagaaacgccaaggagcacgtgagactgctgccccacagcgtgtgcagccccaaccccaacaccaccagcaccagccagagcgccgccagcagcaacaacacctacccccacctgagctgcttcagcatgaagagctggcccaacatcctgttccaggccagcgccagaagagccgccagcccccccagcagcccccccagcctgagcctgcccagcaccgtgaccagcagcctgtgcagcaccagcggcgtgcagaccagcctgcccaccgagagctgcagcgacgagagcgacagcgagctgagccagaagctggaggacctggacaacagcctggaggtgaaggccaagcccgccagcggcctggacggcaacttcaacagcatcagaatggacatgttcagcgtgtag

SEQ ID NO: 105635 - DNA, 468 bp, synthetic construct
  misc_feature 1..468: note = Description of Artificial Sequence: Synthetic coding sequence
  source 1..468: mol_type = other DNA
atggagacctgcgacagcccccccatcagcagacaggagaacggccagagcaccagcaagctgtgcggcaccacccagctggacaacgaggtgcccgagaaggtggccggcatggagcccgacagagagaacagcagcaccgacgacaacctgaagaccgacgagagaaagagcgaggccctgctgggcttcagcgtggagaacgccgccgccacccaggtgaccagcgccaaggagatcccctgcaacgagtgcgccaccagcttccccagcctgcagaagtacatggagcaccactgccccaacgccagactgcccgtgctgaaggacgacaacgagagcgagatcagcgagctggaggacagcgacgtggagaacctgaccggcgagatcgtgtaccagcccgacggcagcgcctacatcatcgaggacagcaaggagagcggccagaacgcccagaccggctag

SEQ ID NO: 105636 - DNA, 10773 bp, synthetic construct
  misc_feature 1..10773: note = Description of Artificial Sequence: Synthetic coding sequence
  source 1..10773: mol_type = other DNA
atggagacctgcgacagcccccccatcagcagacaggagaacggccagagcaccagcaagctgtgcggcaccacccagctggacaacgaggtgcccgagaaggtggccggcatggagcccgacagagagaacagcagcaccgacgacaacctgaagaccgacgagagaaagagcgaggccctgctgggcttcagcgtggagaacgccgccgccacccaggtgaccagcgccaaggagatcccctgcaacgagtgcgccaccagcttccccagcctgcagaagtacatggagcaccactgccccaacgccagactgcccgtgctgaaggacgacaacgagagcgagatcagcgagctggaggacagcgacgtggagaacctgaccggcgagatcgtgtaccagcccgacggcagcgcctacatcatcgaggacagcaaggagagcggccagaacgcccagaccggcgccaacagcaagctgttcagcaccgccatgttcctggacagcctggccagcgccggcgagaagagcgaccagagcgccagcgcccccatgagcttctacccccagatcatcaacaccttccacatcgccagcagcctgggcaagcccttcaccgccgaccaggccttccccaacaccagcgccctggccggcgtgggccccgtgctgcacagcttcagagtgtacgacctgagacacaagagagagaaggactacctgaccagcgacggcagcgccaagaacagctgcgtgagcaaggacgtgcccaacaacgtggacctgagcaagttcgacggctgcgtgagcgacggcaagagaaagcccgtgctgatgtgcttcctgtgcaagctgagcttcggctacatcagaagcttcgtgacccacgccgtgcacgaccacagaatgaccctgaacgacgaggagcagaagctgctgagcaacaagtgcgtgagcgccatcatccagggcatcggcaaggacaaggagcccctgatcagcttcctggagcccaagaagagcaccagcgtgtacccccacttcagcaccaccaacctgatcggccccgaccccaccttcagaggcctgtggagcgccttccacgtggagaacggcgacagcctgcccgccggcttcgccttcctgaagggcagcgccagcaccagcagcagcgccgagcagcccctgggcatcacccagatgcccaaggccgaggtgaacctgggcggcctgagcagcctggtggtgaacacccccatcaccagcgtgagcctgagccacagcagcagcgagagcagcaagatgagcgagagcaaggaccaggagaacaactgcgagagacccaaggagagcaacgtgctgcaccccaacggcgagtgccccgtgaagagcgagcccaccgagcccggcgacgaggacgaggaggacgcctacagcaacgagctggacgacgaggaggtgctgggcgagctgaccgacagcatcggcaacaaggacttccccctgctgaaccagagcatcagccccctgagcagcagcgtgctgaagttcatcgagaagggcaccagcagcagcagcgccaccgtgagcgacgacaccgagaagaagaagcagaccgccgccgtgagagccagcggcagcgtggccagcaactacggcatcagcggcaaggacttcgccgacgccagcgccagcaaggacagcgccaccgccgcccaccccagcgagatcgccagaggcgacgaggacagcagcgccaccccccaccagcacggcttcacccccagcacccccggcacccccggccccggcggcgacggcagccccggcagcggcatcgagtgccccaagtgcgacaccgtgctgggcagcagcagaagcctgggcggccacatgaccatgatgcacagcagaaacagctgcaagaccctgaagtgccccaagtgcaactggcactacaagtaccagcagaccctggaggcccacatgaaggagaagcaccccgagcccggcggcagctgcgtgtactgcaagaccggccagccccaccccagactggccagaggcgagagctacacctgcggctacaagcccttcagatgcgaggtgtgcaactacagcaccaccaccaagggcaacctgagcatccacatgcagagcgacaagcacctgaacaacgtgcagaacctgcagaacggcaacggcgagcaggtgttcggccacagcgcccccgcccccaacaccagcctgagcggctgcggcacccccagccccagcaagcccaagcagaagcccacctggagatgcgaggtgtgcgactacgagaccaacgtggccagaaacctgagaatccacatgaccagcgagaagcacatgcacaacatgatgctgctgcagcagaacatgaagcagatccagcacaacctgcacctgggcctggcccccgccgaggccgagctgtaccagtactacctggcccagaacatcggcctgaccggcatgaagctggagaaccccgccgacccccagctgatgatcaaccccttccagctggaccccgccaccgccgccgccctggcccccggcctgggcgagctgagcccctacatcagcgaccccgccctgaagctgttccagtgcgccgtgtgcaacaagttcaccagcgacagcctggaggccctgagcgtgcacgtgagcagcgagagaagcctgcccgaggaggagtggagagccgtgatcggcgacatctaccagtgcaagctgtgcaactacaacacccagctgaaggccaacttccagctgcactgcaagaccgacaagcacatgcagaagtaccagctggtggcccacatcaaggagggcggcaagagcaacgagtggagactgaagtgcatcgccatcggcaaccccgtgcacctgaagtgcaacgcctgcgactactacaccaacagcgtggacaagctgagactgcacaccaccaaccacagacacgaggccgccctgaagctgtacaagcacctgcagaagcaggagggcgccgtgaaccccgagagctgctactactactgcgccgtgtgcgactacaccaccaaggtgaagctgaacctggtgcagcacgtgagaagcgtgaagcaccagcagaccgagggcctgagaaagctgcagctgcaccagcagggcctggcccccgaggaggacaacctgagcgagatcttcttcgtgaaggactgcccccccaacgagctggagaccgccagcctgggcgccagaacctgcgacgacgacctgaccgagcagcagctgagaagcaccagcgaggagcagagcgaggaggccgagggcgccatcaagcccaccgccgtggccgaggacgacgagaaggacaccagcgagagagacaacagcgagggcaagaacagcaacaaggacagcggcatcatcacccccgagaaggagctgaaggtgagcgtggccggcggcacccagcccctgctgctggccaaggaggaggacgtggccaccaagagaagcaagcccaccgaggacaacaagttctgccacgagcagttctaccagtgcccctactgcaactacaacagcagagaccagagcagaatccagatgcacgtgctgagccagcacagcgtgcagcccgtgatctgctgccccctgtgccaggacgtgctgagcaacaagatgcacctgcagctgcacctgacccacctgcacagcgtgagccccgactgcgtggagaagctgctgatgaccgtgcccgtgcccgacgtgatgatgcccaacagcatgctgctgcccgccgccgccagcgagaagagcgagagagacacccccgccgccgtgaccgccgagggcagcggcaagtacagcggcgagagccccatggacgacaagagcatggccggcctggaggacagcaaggccaacgtggaggtgaagaacgaggagcagaagcccaccaaggagcccctggaggtgagcgagtggaacaagaacagcagcaaggacgtgaagatccccgacaccctgcaggaccagctgaacgagcagcagaagagacagcccctgagcgtgagcgacagacacgtgtacaagtacagatgcaaccactgcagcctggccttcaagaccatgcagaagctgcagatccacagccagtaccacgccatcagagccgccaccatgtgcaacctgtgccagagaagcttcagaaccttccaggccctgaagaagcacctggaggccggccaccccgagctgagcgaggccgagctgcagcagctgtacgccagcctgcccgtgaacggcgagctgtgggccgagagcgagaccatgagccaggacgaccacggcctggagcaggagatggagagagagtacgaggtggaccacgagggcaaggccagccccgtgggcagcgacagcagcagcatccccgacgacatgggcagcgagcccaagagaaccctgcccttcagaaagggccccaacttcaccatggagaagttcctggaccccagcagaccctacaagtgcaccgtgtgcaaggagagcttcacccagaagaacatcctgctggtgcactacaacagcgtgagccacctgcacaagctgaagaaggtgctgcaggaggccagcagccccgtgccccaggagaccaacagcaacaccgacaacaagccctacaagtgcagcatctgcaacgtggcctacagccagagcagcaccctggagatccacatgagaagcgtgctgcaccagaccaaggccagagccgccaagctggagcccagcggccacgtggccggcggccacagcatcgccgccaacgtgaacagccccggccagggcatgctggacagcatgagcctggccgccgtgaacagcaaggacacccacctggacgccaaggagctgaacaagaagcagacccccgacctgatcagcgcccagcccgcccaccaccccccccagagccccgcccagatccagatgcagctgcagcacgagctgcagcagcaggccgccttcttccagccccagttcctgaaccccgccttcctgccccacttccccatgacccccgaggccctgctgcagttccagcagccccagttcctgttccccttctacatccccggcaccgagttcagcctgggccccgacctgggcctgcccggcagcgccaccttcggcatgcccggcatgaccggcatggccggcagcctgctggaggacctgaagcagcagatccagacccagcaccacgtgggccagacccagctgcagatcctgcagcagcaggcccagcagtaccaggccacccagccccagctgcagccccagaagcagcagcagcagcccccccccccccagcagcagcagcagcagcaggccagcaagctgctgaagcaggagcagagcaacatcgtgagcgccgactgccagatcatgaaggacgtgcccagctacaaggaggccgaggacatcagcgagaagcccgagaagcccaagcaggagttcatcagcgagggcgagggcctgaaggagggcaaggacaccaagaagcagaagagcctggagcccagcatccccccccccagaatcgccagcggcgccagaggcaacgccgccaaggccctgctggagaacttcggcttcgagctggtgatccagtacaacgagaacagacagaaggtgcagaagaagggcaagagcggcgagggcgagaacaccgacaagctggagtgcggcacctgcggcaagctgttcagcaacgtgctgatcctgaagagccaccaggagcacgtgcacggccagttcttcccctacgccgccctggagaagttcgccagacagtacagagaggcctacgacaagctgtaccccatcagccccagcagccccgagacccccccccccccccccccccccccccccctgccccccgcccccccccagcccagcagcatgggccccgtgaagatccccaacaccgtgagcacccccctgcaggcccccccccccaccccccccccccccccccccccccccccccccccccccccccccccccccccccccccccccagcgcccccccccaggtgcagctgcccgtgagcctggacctgcccctgttccccagcatcatgatgcagcccgtgcagcaccccgccctgcccccccagctggccctgcagctgccccagatggacgccctgagcgccgacctgacccagctgtgccagcagcagctgggcctggaccccaacttcctgagacacagccagttcaagagacccagaaccagaatcaccgacgaccagctgaagatcctgagagcctacttcgacatcaacaacagccccagcgaggagcagatccaggagatggccgagaagagcggcctgagccagaaggtgatcaagcactggttcagaaacaccctgttcaaggagagacagagaaacaaggacagcccctacaacttcagcaacccccccatcaccgtgctggaggacatcagaatcgacccccagcccaccagcctggagcactacaagagcgacgccagcttcagcaagagaagcagcagaaccagattcaccgactaccagctgagagtgctgcaggacttcttcgacaccaacgcctaccccaaggacgacgagatcgagcagctgagcaccgtgctgaacctgcccaccagagtgatcgtggtgtggttccagaacgccagacagaaggccagaaagagctacgagaaccaggccgagaccaaggacaacgagaagagagagctgaccaacgagagatacatcagaaccagcaacatgcagtaccagtgcaagaagtgcaacgtggtgttccccagaatcttcgacctgatcacccaccagaagaagcagtgctacaaggacgaggacgacgacgcccaggacgagagccagaccgaggacagcatggacgccaccgaccaggtggtgtacaagcactgcaccgtgagcggccagaccgacgccgccaagaacgccgccgcccccgccgccagcagcggcagcggcaccagcacccccctgatccccagccccaagcccgagcccgagaagaccagccccaagcccgagtaccccgccgagaagcccaagcagagcgaccccagcccccccagccagggcaccaagcccgccctgcccctggccagcaccagcagcgaccccccccaggccagcaccgcccagccccagccccagccccagccccccaagcagccccagctgatcggcagaccccccagcgccagccagacccccgtgcccagcagccccctgcagatcagcatgaccagcctgcagaacagcctgcccccccagctgctgcagtaccagtgcgaccagtgcaccgtggccttccccaccctggagctgtggcaggagcaccagcacatgcacttcctggccgcccagaaccagttcctgcacagccccttcctggagagacccatggacatgccctacatgatcttcgaccccaacaaccccctgatgaccggccagctgctgggcagcagcctgacccagatgcccccccaggccagcagcagccacaccaccgcccccaccaccgtggccgccagcctgaagagaaagctggacgacaaggaggacaacaactgcagcgagaaggagggcggcaacagcggcgaggaccagcacagagacaagagactgagaaccaccatcacccccgagcagctggagatcctgtacgagaagtacctgctggacagcaaccccaccagaaagatgctggaccacatcgccagagaggtgggcctgaagaagagagtggtgcaggtgtggttccagaacaccagagccagagagagaaagggccagttcagagccgtgggccccgcccagagccacaagagatgccccttctgcagagccctgttcaaggccaagagcgccctggagagccacatcagaagcagacactggaacgagggcaagcaggccggctacagcctgccccccagccccctgatcagcaccgaggacggcggcgagagcccccagaagtacatctacttcgactaccccagcctgcccctgaccaagatcgacctgagcagcgagaacgagctggccagcaccgtgagcacccccgtgagcaagaccgccgagctgagccccaagaacctgctgagccccagcagcttcaaggccgagtgcagcgaggacgtggagaacctgaacgccccccccgccgaggccggctacgaccagaacaagaccgacttcgacgagaccagcagcatcaacaccgccatcagcgacgccaccaccggcgacgagggcaacaccgagatggagagcaccaccggcagcagcggcgacgtgaagcccgccctgagccccaaggagcccaagaccctggacaccctgcccaagcccgccaccacccccaccaccgaggtgtgcgacgacaagttcctgttcagcctgaccagccccagcatccacttcaacgacaaggacggcgaccacgaccagagcttctacatcaccgacgaccccgacgacaacgccgacagaagcgagaccagcagcatcgccgaccccagcagccccaaccccttcggcagcagcaaccccttcaagagcaagagcaacgacagacccggccacaagagattcagaacccagatgagcaacctgcagctgaaggtgctgaaggcctgcttcagcgactacagaacccccaccatgcaggagtgcgagatgctgggcaacgagatcggcctgcccaagagagtggtgcaggtgtggttccagaacgccagagccaaggagaagaagttcaagatcaacatcggcaagcccttcatgatcaaccagggcggcaccgagggcaccaagcccgagtgcaccctgtgcggcgtgaagtacagcgccagactgagcatcagagaccacatcttcagcaagcagcacatcagcaaggtgagagagaccgtgggcagccagctggacagagagaaggactacctggcccccaccaccgtgagacagctgatggcccagcaggagctggacagaatcaagaaggccagcgacgtgctgggcctgaccgtgcagcagcccggcatgatggacagcagcagcctgcacggcatcagcctgcccaccgcctaccccggcctgcccggcctgccccccgtgctgctgcccggcatgaacggccccagcagcctgcccggcttcccccagaacagcaacaccctgaccccccccggcgccggcatgctgggcttccccaccagcgccaccagcagccccgccctgagcctgagcagcgcccccaccaagcccctgctgcagaccccccccccccccccccccccccccccccccccccccagcagcagcctgagcggccagcagaccgagcagcagaacaaggagagcgagaagaagcagaccaagcccaacaaggtgaagaagatcaaggaggaggagctggaggccaccaagcccgagaagcaccccaagaaggaggagaagatcagcagcgccctgagcgtgctgggcaaggtggtgggcgagacccacgtggaccccatccagctgcaggccctgcagaacgccatcgccggcgaccccgccagcttcatcggcggccagttcctgccctacttcatccccggcttcgccagctacttcaccccccagctgcccggcaccgtgcagggcggctacttcccccccgtgtgcggcatggagagcctgttcccctacggccccaccatgccccagaccctggccggcctgagccccggcgccctgctgcagcagtaccagcagtaccagcagaacctgcaggagagcctgcagaagcagcagaagcagcagcaggagcagcagcagaagcccgtgcaggccaagaccagcaaggtggagagcgaccagccccagaacagcaacgacgccagcgagaccaaggaggacaagagcaccgccaccgagagcaccaaggaggagccccagctggagagcaagagcgccgacttcagcgacacctacgtggtgcccttcgtgaagtacgagttcatctgcagaaagtgccagatgatgttcaccgacgaggacgccgccgtgaaccaccagaagagcttctgctacttcggccagcccctgatcgacccccaggagaccgtgctgagagtgcccgtgagcaagtaccagtgcctggcctgcgacgtggccatcagcggcaacgaggccctgagccagcacctgcagagcagcctgcacaaggagaagaccatcaagcaggccatgagaaacgccaaggagcacgtgagactgctgccccacagcgtgtgcagccccaaccccaacaccaccagcaccagccagagcgccgccagcagcaacaacacctacccccacctgagctgcttcagcatgaagagctggcccaacatcctgttccaggccagcgccagaagagccgccagcccccccagcagcccccccagcctgagcctgcccagcaccgtgaccagcagcctgtgcagcaccagcggcgtgcagaccagcctgcccaccgagagctgcagcgacgagagcgacagcgagctgagccagaagctggaggacctggacaacagcctggaggtgaaggccaagcccgccagcggcctggacggcaacttcaacagcatcagaatggacatgttcagcgtgtag

SEQ ID NO: 105637 - DNA, 468 bp, synthetic construct; identical to SEQ ID NO: 105635
  misc_feature 1..468: note = Description of Artificial Sequence: Synthetic coding sequence
  source 1..468: mol_type = other DNA

SEQ ID NO: 105638 - DNA, 10851 bp, synthetic construct
  misc_feature 1..10851: note = Description of Artificial Sequence: Synthetic coding sequence
  source 1..10851: mol_type = other DNA
atggagacctgcgacagcccccccatcagcagacaggagaacggccagagcaccagcaagctgtgcggcaccacccagctggacaacgaggtgcccgagaaggtggccggcatggagcccgacagagagaacagcagcaccgacgacaacctgaagaccgacgagagaaagagcgaggccctgctgggcttcagcgtggagaacgccgccgccacccaggtgaccagcgccaaggagatcccctgcaacgagtgcgccaccagcttccccagcctgcagaagtacatggagcaccactgccccaacgccagactgcccgtgctgaaggacgacaacgagagcgagatcagcgagctggaggacagcgacgtggagaacctgaccggcgagatcgtgtaccagcccgacggcagcgcctacatcatcgaggacagcaaggagagcggccagaacgcccagaccggcgccaacagcaagctgttcagcaccgccatgttcctggacagcctggccagcgccggcgagaagagcgaccagagcgccagcgcccccatgagcttctacccccagatcatcaacaccttccacatcgccagcagcctgggcaagcccttcaccgccgaccaggccttccccaacaccagcgccctggccggcgtgggccccgtgctgcacagcttcagagtgtacgacctgagacacaagagagagaaggactacctgaccagcgacggcagcgccaagaacagctgcgtgagcaaggacgtgcccaacaacgtggacctgagcaagttcgacggctgcgtgagcgacggcaagagaaagcccgtgctgatgtgcttcctgtgcaagctgagcttcggctacatcagaagcttcgtgacccacgccgtgcacgaccacagaatgaccctgaacgacgaggagcagaagctgctgagcaacaagtgcgtgagcgccatcatccagggcatcggcaaggacaaggagcccctgatcagcttcctggagcccaagaagagcaccagcgtgtacccccacttcagcaccaccaacctgatcggccccgaccccaccttcagaggcctgtggagcgccttccacgtggagaacggcgacagcctgcccgccggcttcgccttcctgaagggcagcgccagcaccagcagcagcgccgagcagcccctgggcatcacccagatgcccaaggccgaggtgaacctgggcggcctgagcagcctggtggtgaacacccccatcaccagcgtgagcctgagccacagcagcagcgagagcagcaagatgagcgagagcaaggaccaggagaacaactgcgagagacccaaggagagcaacgtgctgcaccccaacggcgagtgccccgtgaagagcgagcccaccgagcccggcgacgaggacgaggaggacgcctacagcaacgagctggacgacgaggaggtgctgggcgagctgaccgacagcatcggcaacaaggacttccccctgctgaaccagagcatcagccccctgagcagcagcgtgctgaagttcatcgagaagggcaccagcagcagcagcgccaccgtgagcgacgacaccgagaagaagaagcagaccgccgccgtgagagccagcggcagcgtggccagcaactacggcatcagcggcaaggacttcgccgacgccagcgccagcaaggacagcgccaccgccgcccaccccagcgagatcgccagaggcgacgaggacagcagcgccaccccccaccagcacggcttcacccccagcacccccggcacccccggccccggcggcgacggcagccccggcagcggcatcgagtgccccaagtgcgacaccgtgctgggcagcagcagaagcctgggcggccacatgaccatgatgcacagcagaaacagctgcaagaccctgaagtgccccaagtgcaactggcactacaagtaccagcagaccctggaggcccacatgaaggagaagcaccccgagcccggcggcagctgcgtgtactgcaagaccggccagccccaccccagactggccagaggcgagagctacacctgcggctacaagcccttcagatgcgaggtgtgcaactacagcaccaccaccaagggcaacctgagcatccacatgcagagcgacaagcacctgaacaacgtgcagaacctgcagaacggcaacggcgagcaggtgttcggccacagcgcccccgcccccaacaccagcctgagcggctgcggcacccccagccccagcaagcccaagcagaagcccacctggagatgcgaggtgtgcgactacgagaccaacgtggccagaaacctgagaatccacatgaccagcgagaagcacatgcacaacatgatgctgctgcagcagaacatgaagcagatccagcacaacctgcacctgggcctggcccccgccgaggccgagctgtaccagtactacctggcccagaacatcggcctgaccggcatgaagctggagaaccccgccgacccccagctgatgatcaaccccttccagctggaccccgccaccgccgccgccctggcccccggcctggtgaacaacgagctgccccccgagatcagactggccagcggccagctgatgggcgacgacctgagcctgctgaccgccggcgagctgagcccctacatcagcgaccccgccctgaagctgttccagtgcgccgtgtgcaacaagttcaccagcgacagcctggaggccctgagcgtgcacgtgagcagcgagagaagcctgcccgaggaggagtggagagccgtgatcggcgacatctaccagtgcaagctgtgcaactacaacacccagctgaaggccaacttccagctgcactgcaagaccgacaagcacatgcagaagtaccagctggtggcccacatcaaggagggcggcaagagcaacgagtggagactgaagtgcatcgccatcggcaaccccgtgcacctgaagtgcaacgcctgcgactactacaccaacagcgtggacaagctgagactgcacaccaccaaccacagacacgaggccgccctgaagctgtacaagcacctgcagaagcaggagggcgccgtgaaccccgagagctgctactactactgcgccgtgtgcgactacaccaccaaggtgaagctgaacctggtgcagcacgtgagaagcgtgaagcaccagcagaccgagggcctgagaaagctgcagctgcaccagcagggcctggcccccgaggaggacaacctgagcgagatcttcttcgtgaaggactgcccccccaacgagctggagaccgccagcctgggcgccagaacctgcgacgacgacctgaccgagcagcagctgagaagcaccagcgaggagcagagcgaggaggccgagggcgccatcaagcccaccgccgtggccgaggacgacgagaaggacaccagcgagagagacaacagcgagggcaagaacagcaacaaggacagcggcatcatcacccccgagaaggagctgaaggtgagcgtggccggcggcacccagcccctgctgctggccaaggaggaggacgtggccaccaagagaagcaagcccaccgaggacaacaagttctgccacgagcagttctaccagtgcccctactgcaactacaacagcagagaccagagcagaatccagatgcacgtgctgagccagcacagcgtgcagcccgtgatctgctgccccctgtgccaggacgtgctgagcaacaagatgcacctgcagctgcacctgacccacctgcacagcgtgagccccgactgcgtggagaagctgctgatgaccgtgcccgtgcccgacgtgatgatgcccaacagcatgctgctgcccgccgccgccagcgagaagagcgagagagacacccccgccgccgtgaccgccgagggcagcggcaagtacagcggcgagagccccatggacgacaagagcatggccggcctggaggacagcaaggccaacgtggaggtgaagaacgaggagcagaagcccaccaaggagcccctggaggtgagcgagtggaacaagaacagcagcaaggacgtgaagatccccgacaccctgcaggaccagctgaacgagcagcagaagagacagcccctgagcgtgagcgacagacacgtgtacaagtacagatgcaaccactgcagcctggccttcaagaccatgcagaagctgcagatccacagccagtaccacgccatcagagccgccaccatgtgcaacctgtgccagagaagcttcagaaccttccaggccctgaagaagcacctggaggccggccaccccgagctgagcgaggccgagctgcagcagctgtacgccagcctgcccgtgaacggcgagctgtgggccgagagcgagaccatgagccaggacgaccacggcctggagcaggagatggagagagagtacgaggtggaccacgagggcaaggccagccccgtgggcagcgacagcagcagcatccccgacgacatgggcagcgagcccaagagaaccctgcccttcagaaagggccccaacttcaccatggagaagttcctggaccccagcagaccctacaagtgcaccgtgtgcaaggagagcttcacccagaagaacatcctgctggtgcactacaacagcgtgagccacctgcacaagctgaagaaggtgctgcaggaggccagcagccccgtgccccaggagaccaacagcaacaccgacaacaagccctacaagtgcagcatctgcaacgtggcctacagccagagcagcaccctggagatccacatgagaagcgtgctgcaccagaccaaggccagagccgccaagctggagcccagcggccacgtggccggcggccacagcatcgccgccaacgtgaacagccccggccagggcatgctggacagcatgagcctggccgccgtgaacagcaaggacacccacctggacgccaaggagctgaacaagaagcagacccccgacctgatcagcgcccagcccgcccaccaccccccccagagccccgcccagatccagatgcagctgcagcacgagctgcagcagcaggccgccttcttccagccccagttcctgaaccccgccttcctgccccacttccccatgacccccgaggccctgctgcagttccagcagccccagttcctgttccccttctacatccccggcaccgagttcagcctgggccccgacctgggcctgcccggcagcgccaccttcggcatgcccggcatgaccggcatggccggcagcctgctggaggacctgaagcagcagatccagacccagcaccacgtgggccagacccagctgcagatcctgcagcagcaggcccagcagtaccaggccacccagccccagctgcagccccagaagcagcagcagcagcccccccccccccagcagcagcagcagcagcaggccagcaagctgctgaagcaggagcagagcaacatcgtgagcgccgactgccagatcatgaaggacgtgcccagctacaaggaggccgaggacatcagcgagaagcccgagaagcccaagcaggagttcatcagcgagggcgagggcctgaaggagggcaaggacaccaagaagcagaagagcctggagcccagcatccccccccccagaatcgccagcggcgccagaggcaacgccgccaaggccctgctggagaacttcggcttcgagctggtgatccagtacaacgagaacagacagaaggtgcagaagaagggcaagagcggcgagggcgagaacaccgacaagctggagtgcggcacctgcggcaagctgttcagcaacgtgctgatcctgaagagccaccaggagcacgtgcacggccagttcttcccctacgccgccctggagaagttcgccagacagtacagagaggcctacgacaagctgtaccccatcagccccagcagccccgagacccccccccccccccccccccccccccccctgccccccgcccccccccagcccagcagcatgggccccgtgaagatccccaacaccgtgagcacccccctgcaggcccccccccccaccccccccccccccccccccccccccccccccccccccccccccccccccccccccccccccagcgcccccccccaggtgcagctgcccgtgagcctggacctgcccctgttccccagcatcatgatgcagcccgtgcagcaccccgccctgcccccccagctggccctgcagctgccccagatggacgccctgagcgccgacctgacccagctgtgccagcagcagctgggcctggaccccaacttcctgagacacagccagttcaagagacccagaaccagaatcaccgacgaccagctgaagatcctgagagcctacttcgacatcaacaacagccccagcgaggagcagatccaggagatggccgagaagagcggcctgagccagaaggtgatcaagcactggttcagaaacaccctgttcaaggagagacagagaaacaaggacagcccctacaacttcagcaacccccccatcaccgtgctggaggacatcagaatcgacccccagcccaccagcctggagcactacaagagcgacgccagcttcagcaagagaagcagcagaaccagattcaccgactaccagctgagagtgctgcaggacttcttcgacaccaacgcctaccccaaggacgacgagatcgagcagctgagcaccgtgctgaacctgcccaccagagtgatcgtggtgtggttccagaacgccagacagaaggccagaaagagctacgagaaccaggccgagaccaaggacaacgagaagagagagctgaccaacgagagatacatcagaaccagcaacatgcagtaccagtgcaagaagtgcaacgtggtgttccccagaatcttcgacctgatcacccaccagaagaagcagtgctacaaggacgaggacgacgacgcccaggacgagagccagaccgaggacagcatggacgccaccgaccaggtggtgtacaagcactgcaccgtgagcggccagaccgacgccgccaagaacgccgccgcccccgccgccagcagcggcagcggcaccagcacccccctgatccccagccccaagcccgagcccgagaagaccagccccaagcccgagtaccccgccgagaagcccaagcagagcgaccccagcccccccagccagggcaccaagcccgccctgcccctggccagcaccagcagcgaccccccccaggccagcaccgcccagccccagccccagccccagccccccaagcagccccagctgatcggcagaccccccagcgccagccagacccccgtgcccagcagccccctgcagatcagcatgaccagcctgcagaacagcctgcccccccagctgctgcagtaccagtgcgaccagtgcaccgtggccttccccaccctggagctgtggcaggagcaccagcacatgcacttcctggccgcccagaaccagttcctgcacagccccttcctggagagacccatggacatgccctacatgatcttcgaccccaacaaccccctgatgaccggccagctgctgggcagcagcctgacccagatgcccccccaggccagcagcagccacaccaccgcccccaccaccgtggccgccagcctgaagagaaagctggacgacaaggaggacaacaactgcagcgagaaggagggcggcaacagcggcgaggaccagcacagagacaagagactgagaaccaccatcacccccgagcagctggagatcctgtacgagaagtacctgctggacagcaaccccaccagaaagatgctggaccacatcgccagagaggtgggcctgaagaagagagtggtgcaggtgtggttccagaacaccagagccagagagagaaagggccagttcagagccgtgggccccgcccagagccacaagagatgccccttctgcagagccctgttcaaggccaagagcgccctggagagccacatcagaagcagacactggaacgagggcaagcaggccggctacagcctgccccccagccccctgatcagcaccgaggacggcggcgagagcccccagaagtacatctacttcgactaccccagcctgcccctgaccaagatcgacctgagcagcgagaacgagctggccagcaccgtgagcacccccgtgagcaagaccgccgagctgagccccaagaacctgctgagccccagcagcttcaaggccgagtgcagcgaggacgtggagaacctgaacgccccccccgccgaggccggctacgaccagaacaagaccgacttcgacgagaccagcagcatcaacaccgccatcagcgacgccaccaccggcgacgagggcaacaccgagatggagagcaccaccggcagcagcggcgacgtgaagcccgccctgagccccaaggagcccaagaccctggacaccctgcccaagcccgccaccacccccaccaccgaggtgtgcgacgacaagttcctgttcagcctgaccagccccagcatccacttcaacgacaaggacggcgaccacgaccagagcttctacatcaccgacgaccccgacgacaacgccgacagaagcgagaccagcagcatcgccgaccccagcagccccaaccccttcggcagcagcaaccccttcaagagcaagagcaacgacagacccggccacaagagattcagaacccagatgagcaacctgcagctgaaggtgctgaaggcctgcttcagcgactacagaacccccaccatgcaggagtgcgagatgctgggcaacgagatcggcctgcccaagagagtggtgcaggtgtggttccagaacgccagagccaaggagaagaagttcaagatcaacatcggcaagcccttcatgatcaaccagggcggcaccgagggcaccaagcccgagtgcaccctgtgcggcgtgaagtacagcgccagactgagcatcagagaccacatcttcagcaagcagcacatcagcaaggtgagagagaccgtgggcagccagctggacagagagaaggactacctggcccccaccaccgtgagacagctgatggcccagcaggagctggacagaatcaagaaggccagcgacgtgctgggcctgaccgtgcagcagcccggcatgatggacagcagcagcctgcacggcatcagcctgcccaccgcctaccccggcctgcccggcctgccccccgtgctgctgcccggcatgaacggccccagcagcctgcccggcttcccccagaacagcaacaccctgaccccccccggcgccggcatgctgggcttccccaccagcgccaccagcagccccgccctgagcctgagcagcgcccccaccaagcccctgctgcagaccccccccccccccccccccccccccccccccccccccagcagcagcctgagcggccagcagaccgagcagcagaacaaggagagcgagaagaagcagaccaagcccaacaaggtgaagaagatcaaggaggaggagctggaggccaccaagcccgagaagcaccccaagaaggaggagaagatcagcagcgccctgagcgtgctgggcaaggtggtgggcgagacccacgtggaccccatccagctgcaggccctgcagaacgccatcgccggcgaccccgccagcttcatcggcggccagttcctgccctacttcatccccggcttcgccagctacttcaccccccagctgcccggcaccgtgcagggcggctacttcccccccgtgtgcggcatggagagcctgttcccctacggccccaccatgccccagaccctggccggcctgagccccggcgccctgctgcagcagtaccagcagtaccagcagaacctgcaggagagcctgcagaagcagcagaagcagcagcaggagcagcagcagaagcccgtgcaggccaagaccagcaaggtggagagcgaccagccccagaacagcaacgacgccagcgagaccaaggaggacaagagcaccgccaccgagagcaccaaggaggagccccagctggagagcaagagcgccgacttcagcgacacctacgtggtgcccttcgtgaagtacgagttcatctgcagaaagtgccagatgatgttcaccgacgaggacgccgccgtgaaccaccagaagagcttctgctacttcggccagcccctgatcgacccccaggagaccgtgctgagagtgcccgtgagcaagtaccagtgcctggcctgcgacgtggccatcagcggcaacgaggccctgagccagcacctgcagagcagcctgcacaaggagaagaccatcaagcaggccatgagaaacgccaaggagcacgtgagactgctgccccacagcgtgtgcagccccaaccccaacaccaccagcaccagccagagcgccgccagcagcaacaacacctacccccacctgagctgcttcagcatgaagagctggcccaacatcctgttccaggccagcgccagaagagccgccagcccccccagcagcccccccagcctgagcctgcccagcaccgtgaccagcagcctgtgcagcaccagcggcgtgcagaccagcctgcccaccgagagctgcagcgacgagagcgacagcgagctgagccagaagctggaggacctggacaacagcctggaggtgaaggccaagcccgccagcggcctggacggcaacttcaacagcatcagaatggacatgttcagcgtgtag

SEQ ID NO: 105639 - DNA, 423 bp, synthetic construct
  misc_feature 1..423: note = Description of Artificial Sequence: Synthetic coding sequence
  source 1..423: mol_type = other DNA
atggagacctgcgacagcccccccatcagcagacaggagaacggccagagcaccagcaagctgtgcggcaccacccagctggacaacgaggtgcccgagaaggtggccggcatggagcccgacagagagaacagcagcaccgacgacaacctgaagaccgacgagagaaagagcgaggccctgctgggcttcagcgtggagaacgccgccgccacccaggtgaccagcgccaaggagatcccctgcaacgagtgcgccaccagcttccccagcctgcagaagtacatggagcaccactgccccaacgccagactgcccgtgctgaaggacgacaacgagagcgagatcagcgagctggaggacagcgacgtggagaacctgaccggcgagatcgtgtaccagcccgacggcagcgcctactag

SEQ ID NO: 105640 - DNA, 306 bp, synthetic construct
  misc_feature 1..306: note = Description of Artificial Sequence: Synthetic coding sequence
  source 1..306: mol_type = other DNA
atggagacctgcgacagcccccccatcagcagacaggagaacggccagagcaccagcaagctgtgcggcaccacccagctggacaacgaggtgcccgagaaggtggccggcatggagcccgacagagagaacagcagcaccgacgacaacctgaagaccgacgagagaaagagcgaggccctgctgggcttcagcgtggagaacgccgccgccacccaggtgaccagcgccaaggagatcccctgcaacgagtgcgccaccagcttccccagcctgcagaagtacatggagcaccactgcccctag

SEQ ID NO: 105641 - DNA, 2253 bp, synthetic construct
  misc_feature 1..2253: note = Description of Artificial Sequence: Synthetic coding sequence
  source 1..2253: mol_type = other DNA
atggagttcgtgagcggctacagagacgagttcctggacttcaccgccctgctgttcggctggttcagaaagttcgtggccgagagaggcgccgtgggcaccagcctggagggcagatgcagacagctggaggcccagatcagaagactgccccaggaccccgccctgtgggtgctgcacgtgctgcccaaccacagcgtgggcatcagcctgggccagggcgccgagcccggccccggccccggcctgggcaccgcctggctgctgggcgacaacccccccctgcacctgagagacctgagcccctacatcagcttcgtgagcctggaggacggcgaggagggcgaggaggaggaggaggaggacgaggaggaggagaagagagaggacggcggcgccggcagcaccgagaaggtggagcccgaggaggacagagagctggcccccaccagcagagagagcccccaggagaccaacccccccggcgagagcgaggaggccgccagagaggccggcggcggcaaggacggctgcagagaggacagagtggagaacgagaccagaccccagaagagaaagggccagagaagcgaggccgcccccctgcacgtgagctgcctgctgctggtgaccgacgagcacggcaccatcctgggcatcgacctgctggtggacggcgcccagggcaccgccagctggggcagcggcaccaaggacctggccccctgggcctacgccctgctgtgccacagcatggcctgccccatgggcagcggcgaccccagaaagcccagacagctgaccgtgggcgacgccagactgcacagagagctggagagcctggtgcccagactgggcgtgaagctggccaagacccccatgagaacctggggccccagacccggcttcaccttcgccagcctgagagccagaacctgccacgtgtgccacagacacagcttcgaggccaagctgaccccctgcccccagtgcagcgccgtgctgtactgcggcgaggcctgcctgagagccgactggcagagatgccccgacgacgtgagccacagattctggtgccccagactggccgccttcatggagagagccggcgagctggccaccctgcccttcacctacaccgccgaggtgaccagcgagaccttcaacaaggaggccttcctggccagcagaggcctgaccagaggctactggacccagctgagcatgctgatccccggccccggcttcagcagacaccccagaggcaacacccccagcctgagcctgctgagaggcggcgacccctaccagctgctgcagggcgacggcaccgccctgatgccccccgtgcccccccacccccccagaggcgtgttcggcagctggcaggactactacacctggagaggcctgagcctggacagccccatcgccgtgctgctgacctaccccctgaccgtgtactacgtgatcacccacctggtgccccagagcttccccgagctgaacatccagaacaagcagagcctgaagatccacgtggtggaggccggcaaggagttcgacctggtgatggtgttctgggagctgctggtgctgctgccccacgtggccctggagctgcagttcgtgggcgacggcctgccccccgagagcgacgagcagcacttcaccctgcagagagacagcctggaggtgagcgtgagacccggcagcggcatcagcgccagacccagcagcggcaccaaggagaagggcggcagaagagacctgcagatcaaggtgagcgccagaccctaccacctgttccagggccccaagcccgacctggtgatcgccagccccagcagcctgagcgccggcttcaacagcggcttcgccctgaaggacacctggctgagaagcctgcccagactgcagagcctgagagtgcccgccttcttcaccgagagcagcgagtacagctgcgtgatggacggccagaccatggccgtggccaccggcggcggcaccagccccccccagcccaaccccttcagaagccccttcagactgagagccgccgacaactgcatgagctggtactgcaacgccttcatcttccacctggtgtacaagcccgcccagggcagcggcgccagacccgcccccggcccccccccccccagccccacccccagcgccccccccgcccccaccagaagaagaagaggcgagaagaagcccggcagaggcgccagaagaagaaagtag

SEQ ID NO: 105642 - DNA, 2112 bp, synthetic construct
  misc_feature 1..2112: note = Description of Artificial Sequence: Synthetic coding sequence
  source 1..2112: mol_type = other DNA
atggagttcgtgagcggctacagagacgagttcctggacttcaccgccctgctgttcggctggttcagaaagttcgtggccgagagaggcgccgtgggcaccagcctggagggcagatgcagacagctggaggcccagatcagaagactgccccaggaccccgccctgtgggtgctgcacgtgctgcccaaccacagcgtgggcatcagcctgggccagggcgccgagcccggccccggccccggcctgggcaccgcctggctgctgggcgacaacccccccctgcacctgagagacctgagcccctacatcagcttcgtgagcctggaggacggcgaggagggcgaggaggaggaggaggaggacgaggaggaggagaagagagaggacggcggcgccggcagcaccgagaaggtggagcccgaggaggacagagagctggcccccaccagcagagagagcccccaggagaccaacccccccggcgagagcgaggaggccgccagagaggccggcggcggcaaggacggctgcagagaggacagagtggagaacgagaccagaccccagaagagaaagggccagagaagcgaggccgcccccctgcacgtgagctgcctgctgctggtgaccgacgagcacggcaccatcctgggcatcgacctgctggtggacggcgcccagggcaccgccagctggggcagcggcaccaaggacctggccccctgggcctacgccctgctgtgccacagcatggcctgccccatgggcagcggcgaccccagaaagcccagacagctgaccgtgggcgacgccagactgcacagagagctggagagcctggtgcccagactgggcgtgaagctggccaagacccccatgagaacctggggccccagacccggcttcaccttcgccagcctgagagccagaacctgccacgtgtgccacagacacagcttcgaggccaagctgaccccctgcccccagtgcagcgccgtgctgtactgcggcgaggcctgcctgagagccgactggcagagatgccccgacgacgtgagccacagattctggtgccccagactggccgccttcatggagagagccggcgagctggccaccctgcccttcacctacaccgccgaggtgaccagcgagaccttcaacaaggaggccttcctggccagcagaggcctgaccagaggctactggacccagctgagcatgctgatccccggccccggcttcagcagacaccccagaggcaacacccccagcctgagcctgctgagaggcggcgacccctaccagctgctgcagggcgacggcaccgccctgatgccccccgtgcccccccacccccccagaggcgtgttcgtgcccgagctgaacatccagaacaagcagagcctgaagatccacgtggtggaggccggcaaggagttcgacctggtgatggtgttctgggagctgctggtgctgctgccccacgtggccctggagctgcagttcgtgggcgacggcctgccccccgagagcgacgagcagcacttcaccctgcagagagacagcctggaggtgagcgtgagacccggcagcggcatcagcgccagacccagcagcggcaccaaggagaagggcggcagaagagacctgcagatcaaggtgagcgccagaccctaccacctgttccagggccccaagcccgacctggtgatcggcttcaacagcggcttcgccctgaaggacacctggctgagaagcctgcccagactgcagagcctgagagtgcccgccttcttcaccgagagcagcgagtacagctgcgtgatggacggccagaccatggccgtggccaccggcggcggcaccagccccccccagcccaaccccttcagaagccccttcagactgagagccgccgacaactgcatgagctggtactgcaacgccttcatcttccacctggtgtacaagcccgcccagggcagcggcgccagacccgcccccggcccccccccccccagccccacccccagcgccccccccgcccccaccagaagaagaagaggcgagaagaagcccggcagaggcgccagaagaagaaagtag

SEQ ID NO: 105643 - DNA, 1722 bp, synthetic construct
  misc_feature 1..1722: note = Description of Artificial Sequence: Synthetic coding sequence
  source 1..1722: mol_type = other DNA
atggacgccaagagcctgaccgcctggagcagaaccctggtgaccttcaaggacgtgttcgtggacttcaccagagaggagtggaagctgctggacaccgcccagcagatcgtgtacagaaacgtgatgctggagaactacaagaacctggtgagcctgggctaccagctgaccaagcccgacgtgatcctgagactggagaagggcgaggagccctggctggtggagagagagatccaccaggagacccaccccgacagcgagaccgccttcgagatcaagagcagcgtgagcagcagaagcatcttcaaggacaagcagagctgcgacatcaagatggagggcatggccagaaacgacctgtggtacctgagcctggaggaggtgtggaagtgcagagaccagctggacaagtaccaggagaaccccgagagacacctgagacaggtggccttcacccagaagaaggtgctgacccaggagagagtgagcgagagcggcaagtacggcggcaactgcctgctgcccgcccagctggtgctgagagagtacttccacaagagagacagccacaccaagagcctgaagcacgacctggtgctgaacggccaccaggacagctgcgccagcaacagcaacgagtgcggccagaccttctgccagaacatccacctgatccagttcgccagaacccacaccggcgacaagagctacaagtgccccgacaacgacaacagcctgacccacggcagcagcctgggcatcagcaagggcatccacagagagaagccctacgagtgcaaggagtgcggcaagttcttcagctggagaagcaacctgaccagacaccagctgatccacaccggcgagaagccctacgagtgcaaggagtgcggcaagagcttcagcagaagcagccacctgatcggccaccagaagacccacaccggcgaggagccctacgagtgcaaggagtgcggcaagagcttcagctggttcagccacctggtgacccaccagagaacccacaccggcgacaagctgtacacctgcaaccagtgcggcaagagcttcgtgcacagcagcagactgatcagacaccagagaacccacaccggcgagaagccctacgagtgccccgagtgcggcaagagcttcagacagagcacccacctgatcctgcaccagagaacccacgtgagagtgagaccctacgagtgcaacgagtgcggcaagagctacagccagagaagccacctggtggtgcaccacagaatccacaccggcctgaagcccttcgagtgcaaggactgcggcaagtgcttcagcagaagcagccacctgtacagccaccagagaacccacaccggcgagaagccctacgagtgccacgactgcggcaagagcttcagccagagcagcgccctgatcgtgcaccagagaatccacaccggcgagaagccctacgagtgctgccagtgcggcaaggccttcatcagaaagaacgacctgatcaagcaccagagaatccacgtgggcgaggagacctacaagtgcaaccagtgcggcatcatcttcagccagaacagccccttcatcgtgcaccagatcgcccacaccggcgagcagttcctgacctgcaaccagtgcggcaccgccctggtgaacaccagcaacctgatcggctaccagaccaaccacatcagagagaacgcctactag

SEQ ID NO: 105644 - DNA, 1722 bp, synthetic construct; identical to SEQ ID NO: 105643
  misc_feature 1..1722: note = Description of Artificial Sequence: Synthetic coding sequence
  source 1..1722: mol_type = other DNA

SEQ ID NO: 105645 - DNA, 219 bp, synthetic construct
  misc_feature 1..219: note = Description of Artificial Sequence: Synthetic coding sequence
  source 1..219: mol_type = other DNA
atggacgccaagagcctgaccgcctggagcagaaccctggtgaccttcaaggacgtgttcgtggacttcaccagagaggagtggaagctgctggacaccgcccagcagatcgtgtacagaaacgtgatgctggagaactacaagaacctggtgagcctgggctaccagctgaccaagcccgacgtgatcctgagactggagaagggcgaggagccctag

SEQ ID NO: 105646 - DNA, 132 bp, synthetic construct
  misc_feature 1..132: note = Description of Artificial Sequence: Synthetic coding sequence
  source 1..132: mol_type = other DNA
atggacgccaagagcctgaccgcctggagcagaaccctggtgaccttcaaggacgtgttcgtggacttcaccagagaggagtggaagctgctggacaccgcccagcagatcgtgtacagaaacgtgatgtag

SEQ ID NO: 105647 - DNA, 144 bp, synthetic construct
  misc_feature 1..144: note = Description of Artificial Sequence: Synthetic coding sequence
  source 1..144: mol_type = other DNA
atggacgccaagagcctgaccgcctggagcagaaccctggtgaccttcaaggacgtgttcgtggacttcaccagagaggagtggaagctgctggacaccgcccagcagatcgtgtacagaaacgtgatgctggagaactactag

SEQ ID NO: 105648 - DNA, 1629 bp, synthetic construct
  misc_feature 1..1629: note = Description of Artificial Sequence: Synthetic coding sequence
  source 1..1629: mol_type = other DNA
atggacgaccccagatacggcatgtgccccctgaagggcgccagcggctgccccggcgccgagagaagcctgctggtgcagagctacttcgagaagggccccctgaccttcagagacgtggccatcgagttcagcctggaggagtggcagtgcctggacagcgcccagcagggcctgtacagaaaggtgatgctggagaactacagaaacctggtgttcctggccggcatcgccctgaccaagcccgacctgatcacctgcctggagcagggcaaggagccctggaacatcaagagacacgagatggtggccaagccccccgtgatctgcagccacttcccccaggacctgtgggccgagcaggacatcaaggacagcttccaggaggccatcctgaagaagtacggcaagtacggccacgacaacctgcagctgcagaagggctgcaagagcgtggacgagtgcaaggtgcacaaggagcacgacaacaagctgaaccagtgcctgatcaccacccagagcaacatcttccagtgcgaccccagcgccaaggtgttccacaccttcagcaacagcaacagacacaagatcagacacaccagaaagaagcccttcaagtgcaagaagtgcgagaagagcttctgcatgctgctgcacctgacccagcacaagagattccacatcaccgagaacagctaccagtgcaaggactgcggcaaggccttcaactggttcagcaccctgaccacccacagaagaatccacaccggcgagaagccctacaagtgcgaggagtgcggcaaggccttcaacagaagcagccacctgaccacccacaagatcatccacaccggcgagaagccctacagatgcgaggagtgcggcaaggccttcaacagaagcagccacctgaccacccacaagagaatccacaccggcgtgaagccctacaagtgcaccgagtgcggcaaggccttcaacagaagcagccacctgaccacccacagaatcatccacaccggcgagaagccctacaagtgcgaggagtgcggcaaggccttcaaccagagcagcaccctgaccacccacaagatcacccacgccggcgagaagccctacaagtgcgaggagtgcggcaaggccttctacagattcagctacctgaccaagcacaagaccagccacaccggcgagaagttctacaagtgcgaggagtgcggcaagggcttcaactggagcagcgccctgaccaagcacaagagaatccacaccggcgagaagccctacaagtgcgaggagtgcggcaaggccttcaacgagagcagcaacctgaccacccacaagatgatccacaccggcgagaagccctacaagtgcgacgagtgcggcaaggccttcaacagaagcagccagctgaccgcccacaagatgatccacaccggcgagaagccctacaagtgcgaggagtgcggcaaggccttcaacagaagcagcaccctgaccaagcacaagatcacccacaccggcgagaagagctacaagtgggaggagtgcggcaaggacttcaaccagagcctgagcctgatcaagcagaacaacagctactggagagagaccctgcagatgtag

SEQ ID NO: 105649 - DNA, 1311 bp, synthetic construct
  misc_feature 1..1311: note = Description of Artificial Sequence: Synthetic coding sequence
  source 1..1311: mol_type = other DNA
atggacagcgtggccttcgaggacgtggccgtgaacttcacccaggaggagtgggccctgctgagccccagccagaagaacctgtacagagacgtgaccctggagaccttcagaaacctggccagcgtgggcatccagtggaaggaccaggacatcgagaacctgtaccagaacctgggcatcaagctgagaagcctggtggagagactgtgcggcagaaaggagggcaacgagcacagagagaccttcagccagatccccgactgccacctgaacaagaagagccagaccggcgtgaagccctgcaagtgcagcgtgtgcggcaaggtgttcctgagacacagcttcctggacagacacatgagagcccacgccggccacaagagaagcgagtgcggcggcgagtggagagagacccccagaaagcagaagcagcacggcaaggccagcatcagccccagcagcggcgccagaagaaccgtgacccccaccagaaagagaccctacgagtgcaaggtgtgcggcaaggccttcaacagccccaacctgttccagatccaccagagaacccacaccggcaagagaagctacaagtgcagagagatcgtgagagccttcaccgtgagcagcttcttcagaaagcacggcaagatgcacaccggcgagaagagatacgagtgcaagtactgcggcaagcccatcgactaccccagcctgttccagatccacgtgagaacccacaccggcgagaagccctacaagtgcaagcagtgcggcaaggccttcatcagcgccggctacctgagaacccacgagatcagaagccacgccctggagaagagccaccagtgccaggagtgcggcaagaagctgagctgcagcagcagcctgcacagacacgagagaacccacagcggcggcaagctgtacgagtgccagaagtgcgccaaggtgttcagatgccccaccagcctgcaggcccacgagagagcccacaccggcgagagaccctacgagtgcaacaagtgcggcaagaccttcaactaccccagctgcttcagaagacacaagaagacccacagcggcgagaagccctacgagtgcaccagatgcggcaaggccttcggctggtgcagcagcctgagaagacacgagatgacccacaccggcgagaagcccttcgactgcaagcagtgcggcaaggtgttcaccttcagcaactacctgagactgcacgagagaacccacctggccggcagaagccagtgcttcggcagaagacagggcgaccacctgagccccggcgtgtag

SEQ ID NO: 105650 - DNA, 1311 bp, synthetic construct; identical to SEQ ID NO: 105649
  misc_feature 1..1311: note = Description of Artificial Sequence: Synthetic coding sequence
  source 1..1311: mol_type = other DNA

SEQ ID NO: 105651 - DNA, 951 bp, synthetic construct
  misc_feature 1..951: note = Description of Artificial Sequence: Synthetic coding sequence
  source 1..951: mol_type = other DNA
atgagagcccacgccggccacaagagaagcgagtgcggcggcgagtggagagagacccccagaaagcagaagcagcacggcaaggccagcatcagccccagcagcggcgccagaagaaccgtgacccccaccagaaagagaccctacgagtgcaaggtgtgcggcaaggccttcaacagccccaacctgttccagatccaccagagaacccacaccggcaagagaagctacaagtgcagagagatcgtgagagccttcaccgtgagcagcttcttcagaaagcacggcaagatgcacaccggcgagaagagatacgagtgcaagtactgcggcaagcccatcgactaccccagcctgttccagatccacgtgagaacccacaccggcgagaagccctacaagtgcaagcagtgcggcaaggccttcatcagcgccggctacctgagaacccacgagatcagaagccacgccctggagaagagccaccagtgccaggagtgcggcaagaagctgagctgcagcagcagcctgcacagacacgagagaacccacagcggcggcaagctgtacgagtgccagaagtgcgccaaggtgttcagatgccccaccagcctgcaggcccacgagagagcccacaccggcgagagaccctacgagtgcaacaagtgcggcaagaccttcaactaccccagctgcttcagaagacacaagaagacccacagcggcgagaagccctacgagtgcaccagatgcggcaaggccttcggctggtgcagcagcctgagaagacacgagatgacccacaccggcgagaagcccttcgactgcaagcagtgcggcaaggtgttcaccttcagcaactacctgagactgcacgagagaacccacctggccggcagaagccagtgcttcggcagaagacagggcgaccacctgagccccggcgtgtag

SEQ ID NO: 105652 - DNA, 1311 bp, synthetic construct; identical to SEQ ID NO: 105649
  misc_feature 1..1311: note = Description of Artificial Sequence: Synthetic coding sequence
  source 1..1311: mol_type = other DNA

SEQ ID NO: 105653 - DNA, 2352 bp, synthetic construct
  misc_feature 1..2352: note = Description of Artificial Sequence: Synthetic coding sequence
  source 1..2352: mol_type = other DNA
atggtggccaagccccccgtgatgagcttccacttcgcccaggacctgtggcccgagcagaacatcaaggacagcttccagaaggtgaccctgagaagatacggcaagtgcgagtacgagaacctgcagctgagaaagggctgcaagcacgtggacgagtgcaccggccacaagggcggccacaacaccgtgaaccagtgcctgaccgccacccccagcaagatcttccagtgcaacaagtacgtgaaggtgttcgacaagttcagcaacagcaacagatacaagagaagacacaccggcaacaagcacttcaagtgcaaggagtgcagcaagagcttctgcgtgctgagccagctgacccagcacagaagaatccacaccagagtgaacagctacaagtgcgaggagtgcggcaaggccttcaactggttcagcaccctgaccaagcacaagagaatccacaccggcgagaagccctacaagtgcgaggagtgcggcaaggccttcaaccagagcagccagctgaccagacacaagatcatccacaccgaggagaagcccaacaagtgcgaggagtgcggcaaggccttcaagcaggccagccacctgaccatccacaagatcatccacaccggcgagaagccctacaagtacgaggagtgcggcaaggtgttcagccagagcagccacctgaccacccagaagatcctgcacaccggcgagaacctgtacaagtgcaaggagtgcggcaaggccttcaacctgttcagcaacctgaccaaccacaagagaatccacgccggcgagaagccctacaagtgcaaggagtgcggcagagccttcaacatcagcagcaacctgaacaagcaggagaagatccacaccggcggcaagctgaacaagtgcgaggagtgcgacaaggccttcaacagaagcctgaagctgaccgcccacaagaagatcctgatggaggagaagccctacaagtgcgaggagtgcggcaaggtgttcaaccagttcagcaccctgaccagacacaagatcatccacaccggcgagaagccctacaagtgcaaggagtgcggcaaggccttcaaccagagcagcaacctgaccgagcacaagaagatccacaccgccgagaagagctacaagtgcgaggagtgcggcaaggccttcaaccagcacagcaacctgatcaaccacagaaagatctacagcggcgagaagccctacaagtgcgaggagtgcggcaaggccttcaacagaagcagcaccctgaccagacacaagaagatccacaccggcgagaagccctacaagtgcgaggagtgcgacagagccttcagccagagcagcaacctgaccgagcacaagaagatccacaccggcgagaagccctacaagtgcgaggagtgcggcaaggccttcaacagattcagcaccctgaccaagcacaagagaatccacaccggcgagaagccctacaagtgcgaggagtgcggcaaggccttcaaccagagctaccagctgaccagacacaagatcgtgcacaccaaggagaagctgaacaagtgcgaggagttcggcaaggccttcaagcagagcagccacagaaccatccacaagatcatccacaccggcgagaagccctacaagtgcgaggagcacggcaaggtgttcaaccagagcagcaacctgaccacccagaagatcatccacaccggcgagaacctgtacaagttcgaggagcacggcaaggccttcaacctgttcagcaacatcaccaaccacaagatcatctacaccggcgagaagccccacaagtgcgaggagtgcggcaaggcctacaacagattcagcaacctgaccatccacaagagaatccacaccggcgagaagccctaccagtgcgccgagtgcggcaaggccttcaactgcagcagcaccctgaacagacacaagatcatccacaccggcgagaagccctacaagtgcaaggagtgcggcaaggccttcaacctgagcagcaccctgaccgcccacaagaagatccacaccggcgagaagccctacaagtgcgaggagtgcggcaaggccttcaaccagagcagcaacctgaccacccacaagaagatccacaccagcgagaagccctacaagtgcgaggagtgcggcaagagcttcaaccagttcagcagcctgaacatccacaagatcatccacaccggcgagaagccctacaagtgcggcgactacggcagagccttcaacctgagcagcaacctgaccacccacaagaagatccacaccggcgagaagccctacaagtgcgagtacggcaagacctag

SEQ ID NO: 105654 - DNA, 276 bp, synthetic construct
  misc_feature 1..276: note = Description of Artificial Sequence: Synthetic coding sequence
  source 1..276: mol_type = other DNA
atggtggccaagccccccgtgatgagcttccacttcgcccaggacctgtggcccgagcagaacatcaaggacagcttccagaaggtgaccctgagaagatacggcaagtgcgagtacgagaacctgcagctgagaaagggctgcaagcacgtggacgagtgcaccggccacaagggcggccacaacaccgtgaaccagtgcctgaccgccacccccagcaagatcttccagtgcaacaagtacgtgaaggtgttcgacaagttcagcaacagctag

SEQ ID NO: 105655 - DNA, 2352 bp, synthetic construct; identical to SEQ ID NO: 105653
  misc_feature 1..2352: note = Description of Artificial Sequence: Synthetic coding sequence
  source 1..2352: mol_type = other DNA

SEQ ID NO: 105656 - DNA, 2352 bp, synthetic construct; identical to SEQ ID NO: 105653
  misc_feature 1..2352: note = Description of Artificial Sequence: Synthetic coding sequence
  source 1..2352: mol_type = other DNA

SEQ ID NO: 105657 - DNA, 453 bp, synthetic construct
  misc_feature 1..453: note = Description of Artificial Sequence: Synthetic coding sequence
  source 1..453: mol_type = other DNA
atggtggccaagccccccgtgatgagcttccacttcgcccaggacctgtggcccgagcagaacatcaaggacagcttccagaaggtgaccctgagaagatacggcaagtgcgagtacgagaacctgcagctgagaaagggctgcaagcacgtggacgagtgcaccggccacaagggcggccacaacaccgtgaaccagtgcctgaccgccacccccagcaagatcttccagtgcaacaagtacgtgaaggtgttcgacaagttcagcaacagcaacagatacaagagaagacacaccggcaacaagcacttcaagtgcaaggagtgcagcaagagcttctgcgtgctgagccagctgacccagcacagaagaatccacaccagagtgaacagctacaagtgcgaggagtgcggcaaggccatcatcatctgcagcgacttcacccagcactag

SEQ ID NO: 105658 - DNA, 1254 bp, synthetic construct
  misc_feature 1..1254: note = Description of Artificial Sequence: Synthetic coding sequence
  source 1..1254: mol_type = other DNA
atgagccaggacagcgtgaccttcgccgacgtggccgtgaacttcaccaaggaggagtggaccctgctggaccccgcccagagaaacctgtacagagacgtgatgctggagaacagcagaaacctggccttcatcgactgggccaccccctgcaagaccaaggacgccaccccccagcccgacatcctgcccaagagaaccttccccgaggccaacagagtgtgcctgaccagcatcagcagccagcacagcaccctgagagaggactggagatgccccaagaccgaggagccccacagacagggcgtgaacaacgtgaagccccccgccgtggcccccgagaaggacgagagccccgtgagcatctgcgaggaccacgagatgagaaaccacagcaagcccacctgcagactggtgcccagccagggcgacagcatcagacagtgcatcctgaccagagacagcagcatcttcaagtacaaccccgtgctgaacgacagccagaagacccacgagaacaacgaggacgacggcgtgctgggctggaacatccagtgggtgccctgcggcagaaagaccgagctgaagagcagcacctggaccggcagccagaacaccgtgcaccacatcagagacgagatcgacaccggcgccaacagacaccagagaaaccccttcggcaaggccttcagagaggacggcagcctgagagcccacaacacccacggcagagagaagatgtacgacttcacccagtgcgagaacaccagcagaaacaacagcatccacgccatgcagatgcagctgtacaccgccgagaccaacaagaaggactgccagaccggcgccaccagcgccaacgcccccaacagcggcagccacaagagccactgcaccggcgagaagacccacaagtgccccgagtgcggcagagccttcttctaccagagcttcctgatgagacacatgaagatccacaccggcgagaagccctacgagtgcggcaagtgcggcaaggccttcagatacagcctgcacctgaacaagcacctgagaaagcacgtggtgcagaagaagccctacgagtgcgaggagtgcggcaaggtgatcagagagagcagcaagtacacccacatcagaagccacaccggcgagaagccctacaagtgcaagacctgcggcaaggacttcgccaagagcagcggcctgaagaagcacctgaagacccacaaggacgagaagccctgcgagtag

SEQ ID NO: 105659 - DNA, 1254 bp, synthetic construct; identical to SEQ ID NO: 105658
  misc_feature 1..1254: note = Description of Artificial Sequence: Synthetic coding sequence
  source 1..1254: mol_type = other DNA

SEQ ID NO: 105660 - DNA, 1452 bp, synthetic construct
  misc_feature 1..1452: note = Description of Artificial Sequence: Synthetic coding sequence
  source 1..1452: mol_type = other DNA
atgaagagacacgagatggtggccaagcacctggtgatgttctactacttcgcccagcacctgtggcccgagcagaacatcagagacagcttccagaaggtgaccctgagaagatacagaaagtgcggctacgagaacctgcagctgagaaagggctgcaagagcgtggtggagtgcaagcagcacaagggcgactacagcggcctgaaccagtgcctgaagaccaccctgagcaagatcttccagtgcaacaagtacgtggaggtgttccacaagatcagcaacagcaacagacacaagatgagacacaccgagaacaagcacttcaagtgcaaggagtgcagaaagaccttctgcatgctgagccacctgacccagcacaagagaatccagaccagagtgaacttctacaagtgcgaggcctacggcagagccttcaactggagcagcaccctgaacaagcacaagagaatccacaccggcgagaagccctacaagtgcaaggagtgcggcaaggccttcaaccagaccagccacctgatcagacacaagagaatccacaccgaggagaagccctacaagtgcgaggagtgcggcaaggccttcaaccagagcagcaccctgaccacccacaacatcatccacaccggcgagatcccctacaagtgcgagaagtgcgtgagagccttcaaccaggccagcaagctgaccgagcacaagctgatccacaccggcgagaagagatacgagtgcgaggagtgcggcaaggccttcaacagaagcagcaagctgaccgagcacaagtacatccacaccggcgagaagctgtacaagtgcgaggagtgcggcaaggccttcaaccagagcagcaccctgaccacccacaagagaatccacagcggcgagaagccctacaagtgcgaggagtgcggcaaggccttcaagcagttcagcaacctgaccgaccacaagaagatccacaccggcgagaagccctacaagtgcgaggagtgcggcaaggccttcaaccagctgagcaacctgaccagacacaaggtgatccacaccggcgagaagccctacaagtgcggcgagtgcggcaaggccttcaaccagagcagcgccctgaacacccacaagatcatccacaccggcgagaacccccacaagtgcagagagagcggcaaggtgttccacctgagcagcaagctgagcacctgcaagaagatccacaccggcgagaagctgtacaagtgcgaggagtgcggcaaggccttcaacagaagcagcaccctgatcggccacaagagaatccacaccggcgagaagccctacaagtgcgaggagtgcggcaaggccttcaaccagagcagcaccctgaccacccacaagatcatccacaccgaggagaagcagtacaagtgcgacgagtgcggcaaggccagcacctag

SEQ ID NO: 105661 - DNA, 1152 bp, synthetic construct
  misc_feature 1..1152: note = Description of Artificial Sequence: Synthetic coding sequence
  source 1..1152: mol_type = other DNA
atgaagagacacgagatggtggccaagcacctggtgatgttctactacttcgcccagcacctgtggcccgagcagaacatcagagacagcttccagaaggtgaccctgagaagatacagaaagtgcggctacgagaacctgcagctgagaaagggctgcaagagcgtggtggagtgcaagcagcacaagggcgactacagcggcctgaaccagtgcctgaagaccaccctgagcaagatcttccagtgcaacaagtacgtggaggtgttccacaagatcagcaacagcaacagacacaagatgagacacaccgagaacaagcacttcaagtgcaaggagtgcagaaagaccttctgcatgctgagccacctgacccagcacaagagaatccagaccagagtgaacttctacaagtgcgaggcctacggcagagccttcaactggagcagcaccctgaacaagcacaagagaatccacaccggcgagaagccctacaagtgcaaggagtgcggcaaggccttcaaccagaccagccacctgatcagacacaagagaatccacaccgaggagaagccctacaagtgcgaggagtgcggcaaggccttcaaccagagcagcaccctgaccacccacaacatcatccacaccggcgagatcccctacaagtgcgagaagtgcgtgagagccttcaaccaggccagcaagctgaccgagcacaagctgatccacaccggcgagaagagatacgagtgcgaggagtgcggcaaggccttcaacagaagcagcaagctgaccgagcacaagtacatccacaccggcgagaagctgtacaagtgcgaggagtgcggcaaggccttcaaccagagcagcaccctgaccacccacaagagaatccacagcggcgagaagccctacaagtgcgaggagtgcggcaaggccttcaagcagttcagcaacctgaccgaccacaagaagatccacaccggcgagaagccctacaagtgcgaggagtgcggcaaggccttcaaccagctgagcaacctgaccagacacaaggtgatccacaccggcgagaagccctacaagtgcggcgagtgcggcaaggccaacctgagcagcaccctgaccccccacaagaccatccacatctag

SEQ ID NO: 105662 - DNA, 1368 bp, synthetic construct
  misc_feature 1..1368: note = Description of Artificial Sequence: Synthetic coding sequence
  source 1..1368: mol_type = other DNA
atgctggagaactacagcaacctggtgagcgtgggctaccacatcatcaagcccgacgtgatcagcaagctggagcagggcgaggagccctggatcgtggagggcgagttcctgctgcagagctaccccgacgaggtgtggcagaccgacgacctgatcgagagaatccaggaggaggagaacaagcccagcagacagaccgtgttcatcgagaccctgatcgaggagagaggcaacgtgcccggcaagaccttcgacgtggagaccaaccccgtgcccagcagaaagatcgcctacaagaacagcctgtgcgacagctgcgagaagtgcctgaccagcgtgagcgagtacatcagcagcgacggcagctacgccagaatgaaggccgacgagtgcagcggctgcggcaagagcctgctgcacatcaagctggagaagacccaccccggcgaccaggcctacgagttcaaccagaacggcgagccctacaccctgaacgaggagagcctgtaccagaagatcagaatcctggagaagcccttcgagtacatcgagtgccagaaggccttccagaaggacaccgtgttcgtgaaccacatggaggagaagccctacaagtggaacggcagcgagatcgccttcctgcagatgagcgacctgaccgtgcaccagaccagccacatggagatgaagccctacgagtgcagcgagtgcggcaagagcttctgcaagaagagcaagttcatcatccaccagagaacccacaccggcgagaagccctacgagtgcaaccagtgcggcaagagcttctgccagaagggcaccctgaccgtgcaccagagaacccacaccggcgagaagccctacgagtgcaacgagtgcggcaagaacttctaccagaagctgcacctgatccagcaccagagaacccacagcggcgagaagccctacgagtgcagctactgcggcaagagcttctgccagaagacccacctgacccagcaccagagaacccacagcggcgagagaccctacgtgtgccacgactgcggccccagcagaagaagccagcacctgatgcaccagaagatccacaccggcgtgaagctgtacaagtgcagcgagtgcggcaagtgcttctgcagaaagagcaccctgaccacccacctgagaacccacaccggcgagaagccctacgagtgcaacgagtgcggcaagttcttcagcagactgagctacctgaccgtgcactacagaacccacagcggcgagaagccctacgagtgcaacgagtgcggcaagaccttctacctgaacagcgccctgatgagacaccagagagtgcacaccggcgagaagccctactag

SEQ ID NO: 105663 - DNA, 1980 bp, synthetic construct
  misc_feature 1..1980: note = Description of Artificial Sequence: Synthetic coding sequence
  source 1..1980: mol_type = other DNA
atgaacaagagcctgggccccgtgagcttcaaggacgtggccgtggacttcacccaggaggagtggcagcagctggaccccgagcagaagatcacctacagagacgtgatgctggagaactacagcaacctggtgagcgtgggctaccacatcatcaagcccgacgtgatcagcaagctggagcagggcgaggagccctggatcgtggagggcgagttcctgctgcagagctaccccgacgaggtgtggcagaccgacgacctgatcgagagaatccaggaggaggagaacaagcccagcagacagaccgtgttcatcgagaccctgatcgaggagagagagtacatcagcagcgacggcagctacgccagaatgaaggccgacgagtgcagcggctgcggcaagagcctgctgcacatcaagctggagaagacccaccccggcgaccaggcctacgagttcaaccagaacggcgagccctacaccctgaacgaggagagcctgtaccagaagatcagaatcctggagaagcccttcgagtacatcgagtgccagaaggccttccagaaggacaccgtgttcgtgaaccacatggaggagaagccctacaagtggaacggcagcgagatcgccttcctgcagatgagcgacctgaccgtgcaccagaccagccacatggagatgaagccctacgagtgcagcgagtgcggcaagagcttctgcaagaagagcaagttcatcatccaccagagaacccacaccggcgagaagccctacgagtgcaaccagtgcggcaagagcttctgccagaagggcaccctgaccgtgcaccagagaacccacaccggcgagaagccctacgagtgcaacgagtgcggcaagaacttctaccagaagctgcacctgatccagcaccagagaacccacagcggcgagaagccctacgagtgcagctactgcggcaagagcttctgccagaagacccacctgacccagcaccagagaacccacagcggcgagagaccctacgtgtgccacgactgcggcaagaccttcagccagaagagcgccctgaacgaccaccagaagatccacaccggcgtgaagctgtacaagtgcagcgagtgcggcaagtgcttctgcagaaagagcaccctgaccacccacctgagaacccacaccggcgagaagccctacgagtgcaacgagtgcggcaagttcttcagcagactgagctacctgaccgtgcactacagaacccacagcggcgagaagccctacgagtgcaacgagtgcggcaagaccttctacctgaacagcgccctgatgagacaccagagagtgcacaccggcgagaagccctacgagtgcaacgagtgcggcaagctgttcagccagctgagctacctgaccatccaccacagaacccacagcggcgtgaagccctacgagtgcagcgagtgcggcaagaccttctaccagaacagcgccctgtgcagacacagaagaatccacaagggcgagaagccctacgagtgctacatctgcggcaagttcttcagccagatgagctacctgaccatccaccacagaatccacagcggcgagaagccctacgagtgcagcgagtgcggcaagaccttctgccagaacagcgccctgaacagacaccagagaacccacaccggcgagaaggcctacgagtgctacgagtgcggcaagtgcttcagccagatgagctacctgaccatccaccacagaatccacagcggcgagaagcccttcgagtgcaacgagtgcggcaaggccttcagcagaatgagctacctgaccgtgcactacagaacccacagcggcgagaagccctacgagtgcaccgagtgcggcaagaagttctaccacaagagcgccttcaacagccaccagagaatccacagaagaggcaacatgaacgtgatcgacgtgggcagactgctgtag

SEQ ID NO: 105664 - DNA, 2268 bp, synthetic construct
  misc_feature 1..2268: note = Description of Artificial Sequence: Synthetic coding sequence
  source 1..2268: mol_type = other DNA
atgagagccaccgccctggtgagatggaccggcagagacctggccagcagaagagcccccgccaccgccatcccccccagacccgtgggcagcggcggcgccgaggccgccgagccccaggaggacctgccccccctgagccagagcagcagattcttccaggagcagcagaagatgaacaagagcctgggccccgtgagcttcaaggacgtggccgtggacttcacccaggaggagtggcagcagctggaccccgagcagaagatcacctacagagacgtgatgctggagaactacagcaacctggtgagcgtgggctaccacatcatcaagcccgacgtgatcagcaagctggagcagggcgaggagccctggatcgtggagggcgagttcctgctgcagagctaccccgacgaggtgtggcagaccgacgacctgatcgagagaatccaggaggaggagaacaagcccagcagacagaccgtgttcatcgagaccctgatcgaggagagaggcaacgtgcccggcaagaccttcgacgtggagaccaaccccgtgcccagcagaaagatcgcctacaagaacagcctgtgcgacagctgcgagaagtgcctgaccagcgtgagcgagtacatcagcagcgacggcagctacgccagaatgaaggccgacgagtgcagcggctgcggcaagagcctgctgcacatcaagctggagaagacccaccccggcgaccaggcctacgagttcaaccagaacggcgagccctacaccctgaacgaggagagcctgtaccagaagatcagaatcctggagaagcccttcgagtacatcgagtgccagaaggccttccagaaggacaccgtgttcgtgaaccacatggaggagaagccctacaagtggaacggcagcgagatcgccttcctgcagatgagcgacctgaccgtgcaccagaccagccacatggagatgaagccctacgagtgcagcgagtgcggcaagagcttctgcaagaagagcaagttcatcatccaccagagaacccacaccggcgagaagccctacgagtgcaaccagtgcggcaagagcttctgccagaagggcaccctgaccgtgcaccagagaacccacaccggcgagaagccctacgagtgcaacgagtgcggcaagaacttctaccagaagctgcacctgatccagcaccagagaacccacagcggcgagaagccctacgagtgcagctactgcggcaagagcttctgccagaagacccacctgacccagcaccagagaacccacagcggcgagagaccctacgtgtgccacgactgcggcaagaccttcagccagaagagcgccctgaacgaccaccagaagatccacaccggcgtgaagctgtacaagtgcagcgagtgcggcaagtgcttctgcagaaagagcaccctgaccacccacctgagaacccacaccggcgagaagccctacgagtgcaacgagtgcggcaagttcttcagcagactgagctacctgaccgtgcactacagaacccacagcggcgagaagccctacgagtgcaacgagtgcggcaagaccttctacctgaacagcgccctgatgagacaccagagagtgcacaccggcgagaagccctacgagtgcaacgagtgcggcaagctgttcagccagctgagctacctgaccatccaccacagaacccacagcggcgtgaagccctacgagtgcagcgagtgcggcaagaccttctaccagaacagcgccctgtgcagacacagaagaatccacaagggcgagaagccctacgagtgctacatctgcggcaagttcttcagccagatgagctacctgaccatccaccacagaatccacagcggcgagaagccctacgagtgcagcgagtgcggcaagaccttctgccagaacagcgccctgaacagacaccagagaacccacaccggcgagaaggcctacgagtgctacgagtgcggcaagtgcttcagccagatgagctacctgaccatccaccacagaatccacagcggcgagaagcccttcgagtgcaacgagtgcggcaaggccttcagcagaatgagctacctgaccgtgcactacagaacccacagcggcgagaagccctacgagtgcaccgagtgcggcaagaagttctaccacaagagcgccttcaacagccaccagagaatccacagaagaggcaacatgaacgtgatcgacgtgggcagactgctgtag

SEQ ID NO: 105665 - DNA, 2094 bp, synthetic construct
  misc_feature 1..2094: note = Description of Artificial Sequence: Synthetic coding sequence
  source 1..2094: mol_type = other DNA
atgaacaagagcctgggccccgtgagcttcaaggacgtggccgtggacttcacccaggaggagtggcagcagctggaccccgagcagaagatcacctacagagacgtgatgctggagaactacagcaacctggtgagcgtgggctaccacatcatcaagcccgacgtgatcagcaagctggagcagggcgaggagccctggatcgtggagggcgagttcctgctgcagagctaccccgacgaggtgtggcagaccgacgacctgatcgagagaatccaggaggaggagaacaagcccagcagacagaccgtgttcatcgagaccctgatcgaggagagaggcaacgtgcccggcaagaccttcgacgtggagaccaaccccgtgcccagcagaaagatcgcctacaagaacagcctgtgcgacagctgcgagaagtgcctgaccagcgtgagcgagtacatcagcagcgacggcagctacgccagaatgaaggccgacgagtgcagcggctgcggcaagagcctgctgcacatcaagctggagaagacccaccccggcgaccaggcctacgagttcaaccagaacggcgagccctacaccctgaacgaggagagcctgtaccagaagatcagaatcctggagaagcccttcgagtacatcgagtgccagaaggccttccagaaggacaccgtgttcgtgaaccacatggaggagaagccctacaagtggaacggcagcgagatcgccttcctgcagatgagcgacctgaccgtgcaccagaccagccacatggagatgaagccctacgagtgcagcgagtgcggcaagagcttctgcaagaagagcaagttcatcatccaccagagaacccacaccggcgagaagccctacgagtgcaaccagtgcggcaagagcttctgccagaagggcaccctgaccgtgcaccagagaacccacaccggcgagaagccctacgagtgcaacgagtgcggcaagaacttctaccagaagctgcacctgatccagcaccagagaacccacagcggcgagaagccctacgagtgcagctactgcggcaagagcttctgccagaagacccacctgacccagcaccagagaacccacagcggcgagagaccctacgtgtgccacgactgcggcaagaccttcagccagaagagcgccctgaacgaccaccagaagatccacaccggcgtgaagctgtacaagtgcagcgagtgcggcaagtgcttctgcagaaagagcaccctgaccacccacctgagaacccacaccggcgagaagccctacgagtgcaacgagtgcggcaagttcttcagcagactgagctacctgaccgtgcactacagaacccacagcggcgagaagccctacgagtgcaacgagtgcggcaagaccttctacctgaacagcgccctgatgagacaccagagagtgcacaccggcgagaagccctacgagtgcaacgagtgcggcaagctgttcagccagctgagctacctgaccatccaccacagaacccacagcggcgtgaagccctacgagtgcagcgagtgcggcaagaccttctaccagaacagcgccctgtgcagacacagaagaatccacaagggcgagaagccctacgagtgctacatctgcggcaagttcttcagccagatgagctacctgaccatccaccacagaatccacagcggcgagaagccctacgagtgcagcgagtgcggcaagaccttctgccagaacagcgccctgaacagacaccagagaacccacaccggcgagaaggcctacgagtgctacgagtgcggcaagtgcttcagccagatgagctacctgaccatccaccacagaatccacagcggcgagaagcccttcgagtgcaacgagtgcggcaaggccttcagcagaatgagctacctgaccgtgcactacagaacccacagcggcgagaagccctacgagtgcaccgagtgcggcaagaagttctaccacaagagcgccttcaacagccaccagagaatccacagaagaggcaacatgaacgtgatcgacgtgggcagactgctgtag

SEQ ID NO: 105666 - DNA, 1173 bp, synthetic construct
  misc_feature 1..1173: note = Description of Artificial Sequence: Synthetic coding sequence
  source 1..1173: mol_type = other DNA
atggccgagatccacaacggcggcgagctgtgcgacttcatggagaacggcgagatcttcagcgagcacagctgcctgaacgcccacatgggcaccgagaacaccggcgacacctacgactgcgacgagtacggcgagaacttccccatgctgcacaacagcgcccccgccggcgagaccctgagcgtgctgaaccagtgcagaaaggccttcagcctgccccccaacgtgcaccagagaacctggatcggcgacaagagcttcgagtacagcgactgcgaggaggccttcgtggaccagagccacctgcaggccaacagaatcacccacaacggcgagaccctgtacgagcagaagcagtgcggcagagccttcacctacagcaccagccacgccgtgagcgtgaagatgcacaccgtggagaagccctacgagtgcaaggagtgcggcaagttcttcagatacagcagctacctgaacagccacatgagaacccacaccggcgagaagccctacgagtgcaaggagtgcggcaagtgcttcaccgtgagcagccacctggtggagcacgtgagaatccacaccggcgagaagccctaccagtgcaaggagtgcggcagagccttcgccggcagaagcggcctgaccaagcacgtgagaatccacaccggcgagaagccctacgagtgcaacgagtgcggcaaggcctacaacagattctacctgctgaccgagcacttcaagacccacaccgaggagaagcccttcgagtgcaaggtgtgcggcaagagcttcagaagcagcagctgcctgaagaaccacttcagaatccacaccggcatcaagccctacaagtgcaaggagtgcggcaaggccttcaccgtgagcagcagcctgcacaaccacgtgaagatccacaccggcgagaagccctacgagtgcaaggactgcggcaaggccttcgccaccagcagccagctgatcgagcacatcagaacccacaccggcgagaagccctacatctgcaaggagtgcggcaagaccttcagagccagcagccacctgcagaagcacgtgagaatccacaccggcgagaagccctacatctgcaacgagtgcggcaaggcctacaacagattctacctgctgaccaagcacctgaagacccactag

SEQ ID NO: 105667 - DNA, 1032 bp, synthetic construct
  misc_feature 1..1032: note = Description of Artificial Sequence: Synthetic coding sequence
  source 1..1032: mol_type = other DNA
atggccgagatccacaacggcggcgagctgtgcgacttcatggagaacggcgagatcttcagcgagcacagctgcctgaacgcccacatgggcaccgagaacaccggcgacacctacgactgcgacgagtacggcgagaacttccccatgctgcacaacagcgcccccgccggcgagaccctgagcgtgctgaaccagtgcagaaaggccttcagcctgccccccaacgtgcaccagagaacctggatcggcgacaagagcttcgagtacagcgactgcgaggaggccttcgtggaccagagccacctgcaggccaacagaatcacccacaacggcgagaccctgtacgagcagaagcagtgcggcagagccttcacctacagcaccagccacgccgtgagcgtgaagatgcacaccgtggagaagccctacgagtgcaaggagtgcggcaagttcttcagatacagcagctacctgaacagccacatgagaacccacaccggcgagaagccctacgagtgcaaggagtgcggcaagtgcttcaccgtgagcagccacctggtggagcacgtgagaatccacaccggcgagaagccctaccagtgcaaggagtgcggcagagccttcgccggcagaagcggcctgaccaagcacgtgagaatccacaccggcgagaagccctacgagtgcaacgagtgcggcaaggcctacaacagattctacctgctgaccgagcacttcaagacccacaccgaggagaagcccttcgagtgcaaggtgtgcggcaagagcttcagaagcagcagctgcctgaagaaccacttcagaatccacaccggcatcaagccctacaagtgcaaggagtgcggcaaggccttcaccgtgagcagcagcctgcacaaccacgtgaagatccacaccggcgagaagccctacgagtgcaaggactgcggcaaggccttcgccaccagcagccagctgatcgagcacatcagaacccacacctgcaaccccagcaccctgagaggctag

SEQ ID NO: 105668 - DNA, 870 bp, synthetic construct
  misc_feature 1..870: note = Description of Artificial Sequence: Synthetic coding sequence
  source 1..870: mol_type = other DNA
atgagcggccaccccggcagctgggagatgaacagcgtggccttcgaggacgtggccgtgaacttcacccaggaggagtgggccctgctggaccccagccagaagaacctgtacagagacgtgatgcaggagaccttcagaaacctggccagcatcggcaacaagggcgaggaccagagcatcgaggaccagtacaagaacagcagcagaaacctgagcagcttccagatccaccagagaaaccacaccggcgagaagccctacgagtgcatggagtgcggcaaggccctgggcttcagcagaagcctgaacagacacaagagaatccacaccggcgagaagagatacgagtgcaagcagtgcggcaaggccttcagcagaagcagccacctgagagaccacgagagaacccacaccggcgagaagccctacgagtgcaagcactgcggcaaggccttcagatacagcaactgcctgcactaccacgagagaacccacaccggcgagaagccctacgtgtgcatggagtgcggcaaggccttcagctgcctgagcagcctgcagggccacatcaaggcccacgccggcgaggagccctacccctgcaagcagtgcggcaaggccttcagatacgccagcagcctgcagaagcacgagaagacccacatcgcccagaagccctacgtgtgcaacaactgcggcaagggcttcagatgcagcagcagcctgagagaccacgagagaacccacaccggcgagaagccctacgagtgccagaagtgcggcaaggccttcagcagagccagcaccctgtggaagcacaagaagacccacaccggcgagaagccctacaagtgcaagaagatgtag

SEQ ID NO: 105669 - DNA, 939 bp, synthetic construct
  misc_feature 1..939: note = Description of Artificial Sequence: Synthetic coding sequence
  source 1..939: mol_type = other DNA
atgcccaacttcaacctgaacaagaagatccccgccagagtgaagccccacgagtgcatcgtgtgcgagaagttcttcatcagacacagcagcctgcacagacacatcatcagccacagcggcaacaacccctacggctgcgaggagtgcggcaagaagccctgcacctgcaagcagtgccagaagaccagcctgagcgtgaccagagtgcacagagacaccgtgatgcacaccggcaacggccactacggctgcaccatctgcgagaaggtgttcaacatccccagcagcttccagatccaccagagaaaccacaccggcgagaagccctacgagtgcatggagtgcggcaaggccctgggcttcagcagaagcctgaacagacacaagagaatccacaccggcgagaagagatacgagtgcaagcagtgcggcaaggccttcagcagaagcagccacctgagagaccacgagagaacccacaccggcgagaagccctacgagtgcaagcactgcggcaaggccttcagatacagcaactgcctgcactaccacgagagaacccacaccggcgagaagccctacgtgtgcatggagtgcggcaaggccttcagctgcctgagcagcctgcagggccacatcaaggcccacgccggcgaggagccctacccctgcaagcagtgcggcaaggccttcagatacgccagcagcctgcagaagcacgagaagacccacatcgcccagaagccctacgtgtgcaacaactgcggcaagggcttcagatgcagcagcagcctgagagaccacgagagaacccacaccggcgagaagccctacgagtgccagaagtgcggcaaggccttcagcagagccagcaccctgtggaagcacaagaagacccacaccggcgagaagccctacaagtgcaagaagatgtag

SEQ ID NO: 105670 - DNA, 468 bp, synthetic construct
  misc_feature 1..468: note = Description of Artificial Sequence: Synthetic coding sequence
  source 1..468: mol_type = other DNA
atgaacgccctgtgcgtgaagaacagcagctaccacagcagcctgcacagacacatcatcagccacagcggcaacaacccctacggctgcgaggagtgcggcaagaagccctgcacctgcaagcagtgccagaagaccagcctgagcgtgaccagagtgcacagagacaccgtgatgcacaccggcaacggccactacggctgcaccatctgcgagaaggtgttcaacatccccagcagcttccagatccaccagagaaaccacaccggcgagaagccctacgagtgcatggagtgcggcaaggccctgggcttcagcagaagcctgaacagacacaagagaatccacaccggcgagaagagatacgagtgcaagaagtgcggcaaggccttcagcagagccagcaccctgtggaagcacaagaagacccacaccggcgagaagccctacaagtgcaagaagatgtag

SEQ ID NO: 105671 - DNA, 888 bp, synthetic construct
  misc_feature 1..888: note = Description of Artificial Sequence: Synthetic coding sequence
  source 1..888: mol_type = other DNA
atgaacgccctgtgcgtgaagaacagcagctaccacagcagcctgcacagacacatcatcagccacagcggcaacaacccctacggctgcgaggagtgcggcaagaagccctgcacctgcaagcagtgccagaagaccagcctgagcgtgaccagagtgcacagagacaccgtgatgcacaccggcaacggccactacggctgcaccatctgcgagaaggtgttcaacatccccagcagcttccagatccaccagagaaaccacaccggcgagaagccctacgagtgcatggagtgcggcaaggccctgggcttcagcagaagcctgaacagacacaagagaatccacaccggcgagaagagatacgagtgcaagcagtgcggcaaggccttcagcagaagcagccacctgagagaccacgagagaacccacaccggcgagaagccctacgagtgcaagcactgcggcaaggccttcagatacagcaactgcctgcactaccacgagagaacccacaccggcgagaagccctacgtgtgcatggagtgcggcaaggccttcagctgcctgagcagcctgcagggccacatcaaggcccacgccggcgaggagccctacccctgcaagcagtgcggcaaggccttcagatacgccagcagcctgcagaagcacgagaagacccacatcgcccagaagccctacgtgtgcaacaactgcggcaagggcttcagatgcagcagcagcctgagagaccacgagagaacccacaccggcgagaagccctacgagtgccagaagtgcggcaaggccttcagcagagccagcaccctgtggaagcacaagaagacccacaccggcgagaagccctacaagtgcaagaagatgtag

SEQ ID NO: 105672 - DNA, 222 bp, synthetic construct
  misc_feature 1..222: note = Description of Artificial Sequence: Synthetic coding sequence
  source 1..222: mol_type = other DNA
atgagcggccaccccggcagctgggagatgaacagcgtggccttcgaggacgtggccgtgaacttcacccaggaggagtgggccctgctggaccccagccagaagaacctgtacagagacgtgatgcaggagaccttcagaaacctggccagcatcggcaacaagggcgaggaccagagcatcgaggaccagtacaagaacagcagcagaaacctgagatag

SEQ ID NO: 105673 - DNA, 1770 bp, synthetic construct
  misc_feature 1..1770: note = Description of Artificial Sequence: Synthetic coding sequence
  source 1..1770: mol_type = other DNA
atggaggccgaggagaccatggagtgcctgcaggagttccccgagcaccacaagatgatcctggacagactgaacgagcagagagagcaggacagattcaccgacatcaccctgatcgtggacggccaccacttcaaggcccacaaggccgtgctggccgcctgcagcaagttcttctacaagttcttccaggagttcacccaggagcccctggtggagatcgagggcgtgagcaagatggccttcagacacctgatcgagttcacctacaccgccaagctgatgatccagggcgaggaggaggccaacgacgtgtggaaggccgccgagttcctgcagatgctggaggccatcaaggccctggaggtgagaaacaaggagaacagcgcccccctggaggagaacaccaccggcaagaacgaggccaagaagagaaagatcgccgagaccagcaacgtgatcaccgagagcctgcccagcgccgagagcgagcccgtggagatcgaggtggagatcgccgagggcaccatcgaggtggaggacgagggcatcgagaccctggaggaggtggccagcgccaagcagagcgtgaagtacatccagagcaccggcagcagcgacgacagcgccctggccctgctggccgacatcaccagcaagtacagacagggcgacagaaagggccagatcaaggaggacggctgccccagcgaccccaccagcaagcaggagcacatgaagagccacagcaccgagagcttcaagtgcgagatctgcaacaagagatacctgagagagagcgcctggaagcagcacctgaactgctaccacctggaggagggcggcgtgagcaagaagcagagaaccggcaagaagatccacgtgtgccagtactgcgagaagcagttcgaccacttcggccacttcaaggagcacctgagaaagcacaccggcgagaagcccttcgagtgccccaactgccacgagagattcgccagaaacagcaccctgaagtgccacctgaccgcctgccagaccggcgtgggcgccaagaagggcagaaagaagctgtacgagtgccaggtgtgcaacagcgtgttcaacagctgggaccagttcaaggaccacctggtgatccacaccggcgacaagcccaaccactgcaccctgtgcgacctgtggttcatgcagggcaacgagctgagaagacacctgagcgacgcccacaacatcagcgagagactggtgaccgaggaggtgctgagcgtggagaccagagtgcagaccgagcccgtgaccagcatgaccatcatcgagcaggtgggcaaggtgcacgtgctgcccctgctgcaggtgcaggtggacagcgcccaggtgaccgtggagcaggtgcaccccgacctgctgcaggacagccaggtgcacgacagccacatgagcgagctgcccgagcaggtgcaggtgagctacctggaggtgggcagaatccagaccgaggagggcaccgaggtgcacgtggaggagctgcacgtggagagagtgaaccagatgcccgtggaggtgcagaccgagctgctggaggccgacctggaccacgtgacccccgagatcatgaaccaggaggagagagagagcagccaggccgacgccgccgaggccgccagagaggaccacgaggacgccgaggacctggagaccaagcccaccgtggacagcgaggccgagaaggccgagaacgaggacagaaccgccctgcccgtgctggagtag

SEQ ID NO: 105674 - DNA, 1872 bp, synthetic construct
  misc_feature 1..1872: note = Description of Artificial Sequence: Synthetic coding sequence
  source 1..1872: mol_type = other DNA
atggaggccgaggagaccatggagtgcctgcaggagttccccgagcaccacaagatgatcctggacagactgaacgagcagagagagcaggacagattcaccgacatcaccctgatcgtggacggccaccacttcaaggcccacaaggccgtgctggccgcctgcagcaagttcttctacaagttcttccaggagttcacccaggagcccctggtggagatcgagggcgtgagcaagatggccttcagacacctgatcgagttcacctacaccgccaagctgatgatccagggcgaggaggaggccaacgacgtgtggaaggccgccgagttcctgcagatgctggaggccatcaaggccctggaggtgagaaacaaggagaacagcgcccccctggaggagaacaccaccggcaagaacgaggccaagaagagaaagatcgccgagaccagcaacgtgatcaccgagagcctgcccagcgccgagagcgagcccgtggagatcgaggtggagatcgccgagggcaccatcgaggtggaggacgagggcatcgagaccctggaggaggtggccagcgccaagcagagcgtgaagtacatccagagcaccggcagcagcgacgacagcgccctggccctgctggccgacatcaccagcaagtacagacagggcgacagaaagggccagatcaaggaggacggctgccccagcgaccccaccagcaagcaggtggagggcatcgagatcgtggagctgcagctgagccacgtgaaggacctgttccactgcgagaagtgcaacagaagcttcaagctgttctaccacttcaaggagcacatgaagagccacagcaccgagagcttcaagtgcgagatctgcaacaagagatacctgagagagagcgcctggaagcagcacctgaactgctaccacctggaggagggcggcgtgagcaagaagcagagaaccggcaagaagatccacgtgtgccagtactgcgagaagcagttcgaccacttcggccacttcaaggagcacctgagaaagcacaccggcgagaagcccttcgagtgccccaactgccacgagagattcgccagaaacagcaccctgaagtgccacctgaccgcctgccagaccggcgtgggcgccaagaagggcagaaagaagctgtacgagtgccaggtgtgcaacagcgtgttcaacagctgggaccagttcaaggaccacctggtgatccacaccggcgacaagcccaaccactgcaccctgtgcgacctgtggttcatgcagggcaacgagctgagaagacacctgagcgacgcccacaacatcagcgagagactggtgaccgaggaggtgctgagcgtggagaccagagtgcagaccgagcccgtgaccagcatgaccatcatcgagcaggtgggcaaggtgcacgtgctgcccctgctgcaggtgcaggtggacagcgcccaggtgaccgtggagcaggtgcaccccgacctgctgcaggacagccaggtgcacgacagccacatgagcgagctgcccgagcaggtgcaggtgagctacctggaggtgggcagaatccagaccgaggagggcaccgaggtgcacgtggaggagctgcacgtggagagagtgaaccagatgcccgtggaggtgcagaccgagctgctggaggccgacctggaccacgtgacccccgagatcatgaaccaggaggagagagagagcagccaggccgacgccgccgaggccgccagagaggaccacgaggacgccgaggacctggagaccaagcccaccgtggacagcgaggccgagaaggccgagaacgaggacagaaccgccctgcccgtgctggagtag

SEQ ID NO: 105675 - DNA, 1770 bp, synthetic construct; identical to SEQ ID NO: 105673
  misc_feature 1..1770: note = Description of Artificial Sequence: Synthetic coding sequence
  source 1..1770: mol_type = other DNA

SEQ ID NO: 105676 - DNA, 456 bp, synthetic construct
  misc_feature 1..456: note = Description of Artificial Sequence: Synthetic coding sequence
  source 1..456: mol_type = other DNA
atggaggccgaggagaccatggagtgcctgcaggagttccccgagcaccacaagatgatcctggacagactgaacgagcagagagagcaggacagattcaccgacatcaccctgatcgtggacggccaccacttcaaggcccacaaggccgtgctggccgcctgcagcaagttcttctacaagttcttccaggagttcacccaggagcccctggtggagatcgagggcgtgagcaagatggccttcagacacctgatcgagttcacctacaccgccaagctgatgatccagggcgaggaggaggccaacgacgtgtggaaggccgccgagttcctgcagatgctggaggccatcaaggccctggaggtgagaaacaaggagaacagcgcccccctggaggagaacaccaccggcaagaacgaggccaagaagagaaagatcgccgagaccagctag

SEQ ID NO: 105677 - DNA, 1872 bp, synthetic construct; identical to SEQ ID NO: 105674
  misc_feature 1..1872: note = Description of Artificial Sequence: Synthetic coding sequence
  source 1..1872: mol_type = other DNA

SEQ ID NO: 105678 - DNA, 420 bp, synthetic construct
  misc_feature 1..420: note = Description of Artificial Sequence: Synthetic coding sequence
  source 1..420: mol_type = other DNA
atggaggccgaggagaccatggagtgcctgcaggagttccccgagcaccacaagatgatcctggacagactgaacgagcagagagagcaggacagattcaccgacatcaccctgatcgtggacggccaccacttcaaggcccacaaggccgtgctggccgcctgcagcaagttcttctacaagttcttccaggagttcacccaggagcccctggtggagatcgagggcgtgagcaagatggccttcagacacctgatcgagttcacctacaccgccaagctgatgatccagggcgaggaggaggccaacgacgtgtggaaggccgccgagttcctgcagatgctggaggccatcaaggccctggaggtgagaaacaaggagaacagcgcccccctggaggagaacaccaccggcaagtag

SEQ ID NO: 105679 - DNA, 1770 bp, synthetic construct; identical to SEQ ID NO: 105673
  misc_feature 1..1770: note = Description of Artificial Sequence: Synthetic coding sequence
  source 1..1770: mol_type = other DNA

SEQ ID NO: 105680 - DNA, 798 bp, synthetic construct
  misc_feature 1..798: note = Description of Artificial Sequence: Synthetic coding sequence
  source 1..798: mol_type = other DNA
atggaggccgaggagaccatggagtgcctgcaggagttccccgagcaccacaagatgatcctggacagactgaacgagcagagagagcaggacagattcaccgacatcaccctgatcgtggacggccaccacttcaaggcccacaaggccgtgctggccgcctgcagcaagttcttctacaagttcttccaggagttcacccaggagcccctggtggagatcgagggcgtgagcaagatggccttcagacacctgatcgagttcacctacaccgccaagctgatgatccagggcgaggaggaggccaacgacgtgtggaaggccgccgagttcctgcagatgctggaggccatcaaggccctggaggtgagaaacaaggagaacagcgcccccctggaggagaacaccaccggcaagaacgaggccaagaagagaaagatcgccgagaccagcaacgtgatcaccgagagcctgcccagcgccgagagcgagcccgtggagatcgaggtggagatcgccgagggcaccatcgaggtggaggacgagggcatcgagaccctggaggaggtggccagcgccaagcagagcgtgaagtacatccagagcaccggcagcagcgacgacagcgccctggccctgctggccgacatcaccagcaagtacagacagggcgacagaaagggccagatcaaggaggacggctgccccagcgaccccaccagcaagcaggagcacatgaagagccacagcaccgagagcttcaagtgcgagatctgcaacaagagatacctgagatag

SEQ ID NO: 105681 - DNA, 2121 bp, synthetic construct
  misc_feature 1..2121: note = Description of Artificial Sequence: Synthetic coding sequence
  source 1..2121: mol_type = other DNA
atggccctgcccagcccccaggtgctgatgggcctgcccgccctgctgatgggccccgcccagcacaccagctggccctgcggcagcgccgtgcccaccctgaagagcatggtgaccttcgaggacgtggccgtgtacttcagccaggaggagtgggagctgctggacgccgcccagagacacctgtaccacagcgtgatgctggagaacctggagctggtgaccagcctgggcagctggcacggcgtggagggcgagggcgcccaccccaagcagaacgtgagcgtggaggtgctgcaggtgagaatccccaacgccgaccccagcaccaagaaggccaacagctgcgacatgtgcggccccttcctgaaggacatcctgcacctggccgagcaccagggcacccagagcgaggagaagccctacacctgcggcgcctgcggcagagacttctggctgaacgccaacctgcaccagcaccagaaggagcacagcggcggcaagcccttcagatggtacaaggacagagacgccctgatgaagagcagcaaggtgcacctgagcgagaaccccttcacctgcagagagggcggcaaggtgatcctgggcagctgcgacctgctgcagctgcaggccgtggacagcggccagaagccctacagcaacctgggccagctgcccgaggtgtgcaccacccagaagctgttcgagtgcagcaactgcggcaaggccttcctgaagagcagcaccctgcccaaccacctgagaacccacagcgaggagatccccttcacctgccccaccggcggcaacttcctggaggagaagagcatcctgggcaacaagaagttccacaccggcgagatcccccacgtgtgcaaggagtgcggcaaggccttcagccacagcagcaagctgagaaagcaccagaagttccacaccgaggtgaagtactacgagtgcatcgcctgcggcaagaccttcaaccacaagctgaccttcgtgcaccaccagagaatccacagcggcgagagaccctacgagtgcgacgagtgcggcaaggccttcagcaacagaagccacctgatcagacacgagaaggtgcacaccggcgagagacccttcgagtgcctgaagtgcggcagagccttcagccagagcagcaacttcctgagacaccagaaggtgcacacccaggtgagaccctacgagtgcagccagtgcggcaagagcttcagcagaagcagcgccctgatccagcactggagagtgcacaccggcgagagaccctacgagtgcagcgagtgcggcagagccttcaacaacaacagcaacctggcccagcaccagaaggtgcacaccggcgagagacccttcgagtgcagcgagtgcggcagagacttcagccagagcagccacctgctgagacaccagaaggtgcacaccggcgagagacccttcgagtgctgcgactgcggcaaggccttcagcaacagcagcaccctgatccagcaccagaaggtgcacaccggccagagaccctacgagtgcagcgagtgcagaaagagcttcagcagaagcagcagcctgatccagcactggagaatccacaccggcgagaagccctacgagtgcagcgagtgcggcaaggccttcgcccacagcagcaccctgatcgagcactggagagtgcacaccaaggagagaccctacgagtgcaacgagtgcggcaagttcttcagccagaacagcatcctgatcaagcaccagaaggtgcacaccggcgagaagccctacaagtgcagcgagtgcggcaagttcttcagcagaaagagcagcctgatctgccactggagagtgcacaccggcgagagaccctacgagtgcagcgagtgcggcagagccttcagcagcaacagccacctggtgagacaccagagagtgcacacccaggagagaccctacgagtgcatccagtgcggcaaggccttcagcgagagaagcaccctggtgagacaccagaaggtgcacaccagagagagaacctacgagtgcagccagtgcggcaagctgttcagccacctgtgcaacctggcccagcacaagaagatccacacctag

SEQ ID NO: 105682 - DNA, 1191 bp, synthetic construct
  misc_feature 1..1191: note = Description of Artificial Sequence: Synthetic coding sequence
  source 1..1191: mol_type = other DNA
cccaccctgaagagcatggtgaccttcgaggacgtggccgtgtacttcagccaggaggagtgggagctgctggacgccgcccagagacacctgtaccacagcgtgatgctggagaacctggagctggtgaccagcctgggcaacgccctgagccagcacgtgtgcctgttccccatcgagagcagcgtgcaccccaaggccagaagctgggtgctgctgcccagcagagtgagctgctgcagatgctggggcgccgaggtgctgctgggcgtggagggcgagggcgcccaccccaagcagaacgtgagcgtggaggtgctgcagcaccagaaggagcacagcggcggcaagcccttcagatggtacaaggacagcagcggccagaagccctacagcaacctgggccagctgcccgaggtgtgcaccacccagaagctgttcgagtgcagcaactgcggcaaggccttcctgaagagcagcaccctgcccaaccacctgagaacccacagcgaggagatccccttcacctgccccaccggcggcaacttcctggaggagaagagcatcctgggcaacaagaagttccacaccggcgagatcccccacgtgtgcaaggagtgcggcaaggccttcagccacagcagcaagctgagaaagcaccagaagttccacaccgaggtgagaccctacgagtgcagccagtgcggcaagagcttcagcagaagcagcgccctgatccagcactggagaatccacaccggcgagaagccctacgagtgcagcgagtgcggcaaggccttcgcccacagcagcaccctgatcgagcactggagagtgcacaccaaggagagaccctacgagtgcaacgagtgcggcaagttcttcagccagaacagcatcctgatcaagcaccagaaggtgcacaccggcgagaagccctacaagtgcagcgagtgcggcaagttcttcagcagaaagagcagcctgatctgccactggagagtgcacaccggcgagagaccctacgagtgcagcgagtgcggcagagccttcagcagcaacagccacctggtgagacaccagagagtgcacacccaggagagaccctacgagtgcatccagtgcggcaaggccttcagcgagagaagcaccctggtgagacaccagaaggtgcacaccagagagagatag

SEQ ID NO: 105683 - DNA, 1965 bp, synthetic construct
  misc_feature 1..1965: note = Description of Artificial Sequence: Synthetic coding sequence
  source 1..1965: mol_type = other DNA
atggccttcagagacgtggccgtggacttcacccaggacgagtggagactgctgagccccgcccagagaaccctgtacagagaggtgatgctggagaactacagcaacctggtgagcctgggcatcagcttcagcaagcccgagctgatcacccagctggagcagggcaaggagacctggagagaggagaagaagtgcagccccgccacctgccccgccgaccccgagcccgagctgtacctggaccccttctgcccccccggcttcagcagccagaagttccccatgcagcacgtgctgtgcaaccaccccccctggatcttcacctgcctgtgcgccgagggcaacatccagcccggcgaccccggccccggcgaccaggagaagcagcagcaggccagcgagggcagaccctggagcgaccaggccgagggccccgagggcgagggcgccatgcccctgttcggcagaaccaagaagagaaccctgggcgccttcagcagacccccccagagacagcccgtgagcagcagaaacggcctgagaggcgtggagctggaggccagccccgcccagagcggcaaccccgaggagaccgacaagctgctgaagagaatcgaggtgctgggcttcggcaccgtgaactgcggcgagtgcggcctgagcttcagcaagatgaccaacctgctgagccaccagagaatccacagcggcgagaagccctacgtgtgcggcgtgtgcgagaagggcttcagcctgaagaagagcctggccagacaccagaaggcccacagcggcgagaagcccatcgtgtgcagagagtgcggcagaggcttcaacagaaagagcaccctgatcatccacgagagaacccacagcggcgagaagccctacatgtgcagcgagtgcggcagaggcttcagccagaagagcaacctgatcatccaccagagaacccacagcggcgagaagccctacgtgtgcagagagtgcggcaagggcttcagccagaagagcgccgtggtgagacaccagagaacccacctggaggagaagaccatcgtgtgcagcgactgcggcctgggcttcagcgacagaagcaacctgatcagccaccagagaacccacagcggcgagaagccctacgcctgcaaggagtgcggcagatgcttcagacagagaaccaccctggtgaaccaccagagaacccacagcaaggagaagccctacgtgtgcggcgtgtgcggccacagcttcagccagaacagcaccctgatcagccacagaagaacccacaccggcgagaagccctacgtgtgcggcgtgtgcggcagaggcttcagcctgaagagccacctgaacagacaccagaacatccacagcggcgagaagcccatcgtgtgcaaggactgcggcagaggcttcagccagcagagcaacctgatcagacaccagagaacccacagcggcgagaagcccatggtgtgcggcgagtgcggcagaggcttcagccagaagagcaacctggtggcccaccagagaacccacagcggcgagagaccctacgtgtgcagagagtgcggcagaggcttcagccaccaggccggcctgatcagacacaagagaaagcacagcagagagaagccctacatgtgcagacagtgcggcctgggcttcggcaacaagagcgccctgatcacccacaagagagcccacagcgaggagaagccctgcgtgtgcagagagtgcggccagggcttcctgcagaagagccacctgaccctgcaccagatgacccacaccggcgagaagccctacgtgtgcaagacctgcggcagaggcttcagcctgaagagccacctgagcagacacagaaagaccaccagcgtgcaccacagactgcccgtgcagcccgaccccgagccctgcgccggccagcccagcgacagcctgtacagcctgtag

SEQ ID NO: 105684 - DNA, 300 bp, synthetic construct
  misc_feature 1..300: note = Description of Artificial Sequence: Synthetic coding sequence
  source 1..300: mol_type = other DNA
atggccttcagagacgtggccgtggacttcacccaggacgagtggagactgctgagccccgcccagagaaccctgtacagagaggtgatgctggagaactacagcaacctggtgagcctgggcatcagcttcagcaagcccgagctgatcacccagctggagcagggcaaggagacctggagagaggagaagaagtgcagccccgccacctgccccgaccaccaggagtacggcaacaactgcgacctgcagaaggaggccgaccccgagcccgagctgtacctggaccccttctgctag

SEQ ID NO: 105685 - DNA, 1962 bp, synthetic construct
  misc_feature 1..1962: note = Description of Artificial Sequence: Synthetic coding sequence
  source 1..1962: mol_type = other DNA
atggccttcagagacgtggccgtggacttcacccaggacgagtggagactgctgagccccgcccagagaaccctgtacagagaggtgatgctggagaactacagcaacctggtgagcctgggcatcagcttcagcaagcccgagctgatcacccagctggagcagggcaaggagacctggagagaggagaagaagtgcagccccgccacctgccccgaccccgagcccgagctgtacctggaccccttctgcccccccggcttcagcagccagaagttccccatgcagcacgtgctgtgcaaccaccccccctggatcttcacctgcctgtgcgccgagggcaacatccagcccggcgaccccggccccggcgaccaggagaagcagcagcaggccagcgagggcagaccctggagcgaccaggccgagggccccgagggcgagggcgccatgcccctgttcggcagaaccaagaagagaaccctgggcgccttcagcagacccccccagagacagcccgtgagcagcagaaacggcctgagaggcgtggagctggaggccagccccgcccagagcggcaaccccgaggagaccgacaagctgctgaagagaatcgaggtgctgggcttcggcaccgtgaactgcggcgagtgcggcctgagcttcagcaagatgaccaacctgctgagccaccagagaatccacagcggcgagaagccctacgtgtgcggcgtgtgcgagaagggcttcagcctgaagaagagcctggccagacaccagaaggcccacagcggcgagaagcccatcgtgtgcagagagtgcggcagaggcttcaacagaaagagcaccctgatcatccacgagagaacccacagcggcgagaagccctacatgtgcagcgagtgcggcagaggcttcagccagaagagcaacctgatcatccaccagagaacccacagcggcgagaagccctacgtgtgcagagagtgcggcaagggcttcagccagaagagcgccgtggtgagacaccagagaacccacctggaggagaagaccatcgtgtgcagcgactgcggcctgggcttcagcgacagaagcaacctgatcagccaccagagaacccacagcggcgagaagccctacgcctgcaaggagtgcggcagatgcttcagacagagaaccaccctggtgaaccaccagagaacccacagcaaggagaagccctacgtgtgcggcgtgtgcggccacagcttcagccagaacagcaccctgatcagccacagaagaacccacaccggcgagaagccctacgtgtgcggcgtgtgcggcagaggcttcagcctgaagagccacctgaacagacaccagaacatccacagcggcgagaagcccatcgtgtgcaaggactgcggcagaggcttcagccagcagagcaacctgatcagacaccagagaacccacagcggcgagaagcccatggtgtgcggcgagtgcggcagaggcttcagccagaagagcaacctggtggcccaccagagaacccacagcggcgagagaccctacgtgtgcagagagtgcggcagaggcttcagccaccaggccggcctgatcagacacaagagaaagcacagcagagagaagccctacatgtgcagacagtgcggcctgggcttcggcaacaagagcgccctgatcacccacaagagagcccacagcgaggagaagccctgcgtgtgcagagagtgcggccagggcttcctgcagaagagccacctgaccctgcaccagatgacccacaccggcgagaagccctacgtgtgcaagacctgcggcagaggcttcagcctgaagagccacctgagcagacacagaaagaccaccagcgtgcaccacagactgcccgtgcagcccgaccccgagccctgcgccggccagcccagcgacagcctgtacagcctgtag

SEQ ID NO: 105686 - DNA, 1974 bp, synthetic construct
  misc_feature 1..1974: note = Description of Artificial Sequence: Synthetic coding sequence
  source 1..1974: mol_type = other DNA
atggcccacatggccttcagagacgtggccgtggacttcacccaggacgagtggagactgctgagccccgcccagagaaccctgtacagagaggtgatgctggagaactacagcaacctggtgagcctgggcatcagcttcagcaagcccgagctgatcacccagctggagcagggcaaggagacctggagagaggagaagaagtgcagccccgccacctgccccgccgaccccgagcccgagctgtacctggaccccttctgcccccccggcttcagcagccagaagttccccatgcagcacgtgctgtgcaaccaccccccctggatcttcacctgcctgtgcgccgagggcaacatccagcccggcgaccccggccccggcgaccaggagaagcagcagcaggccagcgagggcagaccctggagcgaccaggccgagggccccgagggcgagggcgccatgcccctgttcggcagaaccaagaagagaaccctgggcgccttcagcagacccccccagagacagcccgtgagcagcagaaacggcctgagaggcgtggagctggaggccagccccgcccagagcggcaaccccgaggagaccgacaagctgctgaagagaatcgaggtgctgggcttcggcaccgtgaactgcggcgagtgcggcctgagcttcagcaagatgaccaacctgctgagccaccagagaatccacagcggcgagaagccctacgtgtgcggcgtgtgcgagaagggcttcagcctgaagaagagcctggccagacaccagaaggcccacagcggcgagaagcccatcgtgtgcagagagtgcggcagaggcttcaacagaaagagcaccctgatcatccacgagagaacccacagcggcgagaagccctacatgtgcagcgagtgcggcagaggcttcagccagaagagcaacctgatcatccaccagagaacccacagcggcgagaagccctacgtgtgcagagagtgcggcaagggcttcagccagaagagcgccgtggtgagacaccagagaacccacctggaggagaagaccatcgtgtgcagcgactgcggcctgggcttcagcgacagaagcaacctgatcagccaccagagaacccacagcggcgagaagccctacgcctgcaaggagtgcggcagatgcttcagacagagaaccaccctggtgaaccaccagagaacccacagcaaggagaagccctacgtgtgcggcgtgtgcggccacagcttcagccagaacagcaccctgatcagccacagaagaacccacaccggcgagaagccctacgtgtgcggcgtgtgcggcagaggcttcagcctgaagagccacctgaacagacaccagaacatccacagcggcgagaagcccatcgtgtgcaaggactgcggcagaggcttcagccagcagagcaacctgatcagacaccagagaacccacagcggcgagaagcccatggtgtgcggcgagtgcggcagaggcttcagccagaagagcaacctggtggcccaccagagaacccacagcggcgagagaccctacgtgtgcagagagtgcggcagaggcttcagccaccaggccggcctgatcagacacaagagaaagcacagcagagagaagccctacatgtgcagacagtgcggcctgggcttcggcaacaagagcgccctgatcacccacaagagagcccacagcgaggagaagccctgcgtgtgcagagagtgcggccagggcttcctgcagaagagccacctgaccctgcaccagatgacccacaccggcgagaagccctacgtgtgcaagacctgcggcagaggcttcagcctgaagagccacctgagcagacacagaaagaccaccagcgtgcaccacagactgcccgtgcagcccgaccccgagccctgcgccggccagcccagcgacagcctgtacagcctgtag

SEQ ID NO: 105687 - DNA, 1965 bp, synthetic construct; identical to SEQ ID NO: 105683
  misc_feature 1..1965: note = Description of Artificial Sequence: Synthetic coding sequence
  source 1..1965: mol_type = other DNA

SEQ ID NO: 105688 - DNA, 1776 bp, synthetic construct
  misc_feature 1..1776: note = Description of Artificial Sequence: Synthetic coding sequence
  source 1..1776: mol_type = other DNA
atgtgcaacggcagaaagaccgtgctggccgaccccgagcccgagctgtacctggaccccttctgcccccccggcttcagcagccagaagttccccatgcagcacgtgctgtgcaaccaccccccctggatcttcacctgcctgtgcgccgagggcaacatccagcccggcgaccccggccccggcgaccaggagaagcagcagcaggccagcgagggcagaccctggagcgaccaggccgagggccccgagggcgagggcgccatgcccctgttcggcagaaccaagaagagaaccctgggcgccttcagcagacccccccagagacagcccgtgagcagcagaaacggcctgagaggcgtggagctggaggccagccccgcccagagcggcaaccccgaggagaccgacaagctgctgaagagaatcgaggtgctgggcttcggcaccgtgaactgcggcgagtgcggcctgagcttcagcaagatgaccaacctgctgagccaccagagaatccacagcggcgagaagccctacgtgtgcggcgtgtgcgagaagggcttcagcctgaagaagagcctggccagacaccagaaggcccacagcggcgagaagcccatcgtgtgcagagagtgcggcagaggcttcaacagaaagagcaccctgatcatccacgagagaacccacagcggcgagaagccctacatgtgcagcgagtgcggcagaggcttcagccagaagagcaacctgatcatccaccagagaacccacagcggcgagaagccctacgtgtgcagagagtgcggcaagggcttcagccagaagagcgccgtggtgagacaccagagaacccacctggaggagaagaccatcgtgtgcagcgactgcggcctgggcttcagcgacagaagcaacctgatcagccaccagagaacccacagcggcgagaagccctacgcctgcaaggagtgcggcagatgcttcagacagagaaccaccctggtgaaccaccagagaacccacagcaaggagaagccctacgtgtgcggcgtgtgcggccacagcttcagccagaacagcaccctgatcagccacagaagaacccacaccggcgagaagccctacgtgtgcggcgtgtgcggcagaggcttcagcctgaagagccacctgaacagacaccagaacatccacagcggcgagaagcccatcgtgtgcaaggactgcggcagaggcttcagccagcagagcaacctgatcagacaccagagaacccacagcggcgagaagcccatggtgtgcggcgagtgcggcagaggcttcagccagaagagcaacctggtggcccaccagagaacccacagcggcgagagaccctacgtgtgcagagagtgcggcagaggcttcagccaccaggccggcctgatcagacacaagagaaagcacagcagagagaagccctacatgtgcagacagtgcggcctgggcttcggcaacaagagcgccctgatcacccacaagagagcccacagcgaggagaagccctgcgtgtgcagagagtgcggccagggcttcctgcagaagagccacctgaccctgcaccagatgacccacaccggcgagaagccctacgtgtgcaagacctgcggcagaggcttcagcctgaagagccacctgagcagacacagaaagaccaccagcgtgcaccacagactgcccgtgcagcccgaccccgagccctgcgccggccagcccagcgacagcctgtacagcctgtag

SEQ ID NO: 105689 - DNA, 540 bp, synthetic construct
  misc_feature 1..540: note = Description of Artificial Sequence: Synthetic coding sequence
  source 1..540: mol_type = other DNA
atggccttcagagacgtggccgtggacttcacccaggacgagtggagactgctgagccccgcccagagaaccctgtacagagaggtgatgctggagaactacagcaacctggtgagcctgggcatcagcttcagcaagcccgagctgatcacccagctggagcagggcaaggagacctggagagaggagaagaagtgcagccccgccacctgccccgccgaccccgagcccgagctgtacctggaccccttctgcccccccggcttcagcagccagaagttccccatgcagcacgtgctgtgcaaccaccccccctggatcttcacctgcctgtgcgccgagggcaacatccagcccggcgaccccggccccggcgaccaggagaagcagcagcaggccagcgagggcagaccctggagcgaccaggccgagggccccgagggcgagggcgccatgcccctgttcggcagaaccaagaagagaaccctgggcgccttcagcagacccccccagagacagcccgtgagcagcagaaactag

SEQ ID NO: 105690 - DNA, 432 bp, synthetic construct
  misc_feature 1..432: note = Description of Artificial Sequence: Synthetic coding sequence
  source 1..432: mol_type = other DNA
atggccttcagagacgtggccgtggacttcacccaggacgagtggagactgctgagccccgcccagagaaccctgtacagagaggtgatgctggagaactacagcaacctggtgagcctgggcatcagcttcagcaagcccgagctgatcacccagctggagcagggcaaggagacctggagagaggagaagaagtgcagccccgccacctgccccgccgaccccgagcccgagctgtacctggaccccttctgcccccccggcttcagcagccagaagttccccatgcagcacgtgctgtgcaaccaccccccctggatcttcacctgcctgtgcgccgagggcaacatccagcccggcgaccccggccccggcgaccaggagaagcagcagcaggccagcgagggcagaccctggagcgaccaggcctag

SEQ ID NO: 105691 - DNA, 1680 bp, synthetic construct
  misc_feature 1..1680: note = Description of Artificial Sequence: Synthetic coding sequence
  source 1..1680: mol_type = other DNA
atgcagcacgtgctgtgcaaccaccccccctggatcttcacctgcctgtgcgccgagggcaacatccagcccggcgaccccggccccggcgaccaggagaagcagcagcaggccagcgagggcagaccctggagcgaccaggccgagggccccgagggcgagggcgccatgcccctgttcggcagaaccaagaagagaaccctgggcgccttcagcagacccccccagagacagcccgtgagcagcagaaacggcctgagaggcgtggagctggaggccagccccgcccagagcggcaaccccgaggagaccgacaagctgctgaagagaatcgaggtgctgggcttcggcaccgtgaactgcggcgagtgcggcctgagcttcagcaagatgaccaacctgctgagccaccagagaatccacagcggcgagaagccctacgtgtgcggcgtgtgcgagaagggcttcagcctgaagaagagcctggccagacaccagaaggcccacagcggcgagaagcccatcgtgtgcagagagtgcggcagaggcttcaacagaaagagcaccctgatcatccacgagagaacccacagcggcgagaagccctacatgtgcagcgagtgcggcagaggcttcagccagaagagcaacctgatcatccaccagagaacccacagcggcgagaagccctacgtgtgcagagagtgcggcaagggcttcagccagaagagcgccgtggtgagacaccagagaacccacctggaggagaagaccatcgtgtgcagcgactgcggcctgggcttcagcgacagaagcaacctgatcagccaccagagaacccacagcggcgagaagccctacgcctgcaaggagtgcggcagatgcttcagacagagaaccaccctggtgaaccaccagagaacccacagcaaggagaagccctacgtgtgcggcgtgtgcggccacagcttcagccagaacagcaccctgatcagccacagaagaacccacaccggcgagaagccctacgtgtgcggcgtgtgcggcagaggcttcagcctgaagagccacctgaacagacaccagaacatccacagcggcgagaagcccatcgtgtgcaaggactgcggcagaggcttcagccagcagagcaacctgatcagacaccagagaacccacagcggcgagaagcccatggtgtgcggcgagtgcggcagaggcttcagccagaagagcaacctggtggcccaccagagaacccacagcggcgagagaccctacgtgtgcagagagtgcggcagaggcttcagccaccaggccggcctgatcagacacaagagaaagcacagcagagagaagccctacatgtgcagacagtgcggcctgggcttcggcaacaagagcgccctgatcacccacaagagagcccacagcgaggagaagccctgcgtgtgcagagagtgcggccagggcttcctgcagaagagccacctgaccctgcaccagatgacccacaccggcgagaagccctacgtgtgcaagacctgcggcagaggcttcagcctgaagagccacctgagcagacacagaaagaccaccagcgtgcaccacagactgcccgtgcagcccgaccccgagccctgcgccggccagcccagcgacagcctgtacagcctgtag

SEQ ID NO: 105692 - DNA, 1680 bp, synthetic construct; identical to SEQ ID NO: 105691
  misc_feature 1..1680: note = Description of Artificial Sequence: Synthetic coding sequence
  source 1..1680: mol_type = other DNA

SEQ ID NO: 105693 - DNA, 1284 bp, synthetic construct
  misc_feature 1..1284: note = Description of Artificial Sequence: Synthetic coding sequence
  source 1..1284: mol_type = other DNA
atgaccctggtgaccgccggcggcgcctggaccggccccggctgctggcacgaggtgaaggacgaggagagcagcagcgagcagagcatcagcatcgccgtgagccacgtgaacaccagcaaggccggcctgcccgcccagaccgccctgccctgcgacatctgcggccccatcctgaaggacatcctgcacctggacgagcaccagggcacccaccacggcctgaagctgcacacctgcggcgcctgcggcagacagttctggttcagcgccaacctgcaccagtaccagaagtgctacagcatcgagcagcccctgagaagagacaagagcgaggccagcatcgtgaagaactgcaccgtgagcaaggagccccaccccagcgagaagcccttcacctgcaaggaggagcagaagaacttccaggccaccctgggcggctgccagcagaaggccatccacagcaagagaaagacccacagaagcaccgagagcggcgacgccttccacggcgagcagatgcactacaagtgcagcgagtgcggcaaggccttcagcagaaaggacaccctggtgcagcaccagagaatccacagcggcgagaagccctacgagtgcagcgagtgcggcaaggccttcagcagaaaggccaccctggtgcagcaccagagaatccacaccggcgagagaccctacgagtgcagcgagtgcggcaagaccttcagcagaaaggacaacctgacccagcacaagagaatccacaccggcgagatgccctacaagtgcaacgagtgcggcaagtacttcagccaccacagcaacctgatcgtgcaccagagagtgcacaacggcgccagaccctacaagtgcagcgactgcggcaaggtgttcagacacaagagcaccctggtgcagcacgagagcatccacaccggcgagaacccctacgactgcagcgactgcggcaagagcttcggccacaagtacaccctgatcaagcaccagagaatccacaccgagagcaagcccttcgagtgcatcgagtgcggcaagttcttcagcagaagcagcgactacatcgcccaccagagagtgcacaccggcgagagacccttcgtgtgcagcaagtgcggcaaggacttcatcagaaccagccacctggtgagacaccagagagtgcacaccggcgagagaccctacgagtgcagcgagtgcggcaaggcctacagcctgagcagccacctgaacagacaccagaaggtgcacaccgccggcagactgtag

SEQ ID NO: 105694 - DNA, 1485 bp, synthetic construct
  misc_feature 1..1485: note = Description of Artificial Sequence: Synthetic coding sequence
  source 1..1485: mol_type = other DNA
ctgagatggaaccacagaagcagaagcagcggcctgctgggcggcagcgaggtgaccgaggccggcggctgcggcagaagcagatgcagcctgtgcggcgtggccagacagagaagacccagactgagacccagaggcagaaccaccgccgtgcccggcagcagagacctgggcccccccagaggcagcggctggagcaccaactgcgacggcggcggcagaggcgacggccccggcgccggctgctggcacgaggtgaaggacgaggagagcagcagcgagcagagcatcagcatcgccgtgagccacgtgaacaccagcaaggccggcctgcccgcccagaccgccctgccctgcgacatctgcggccccatcctgaaggacatcctgcacctggacgagcaccagggcacccaccacggcctgaagctgcacacctgcggcgcctgcggcagacagttctggttcagcgccaacctgcaccagtaccagaagtgctacagcatcgagcagcccctgagaagagacaagagcgaggccagcatcgtgaagaactgcaccgtgagcaaggagccccaccccagcgagaagcccttcacctgcaaggaggagcagaagaacttccaggccaccctgggcggctgccagcagaaggccatccacagcaagagaaagacccacagaagcaccgagagcggcgacgccttccacggcgagcagatgcactacaagtgcagcgagtgcggcaaggccttcagcagaaaggacaccctggtgcagcaccagagaatccacagcggcgagaagccctacgagtgcagcgagtgcggcaaggccttcagcagaaaggccaccctggtgcagcaccagagaatccacaccggcgagagaccctacgagtgcagcgagtgcggcaagaccttcagcagaaaggacaacctgacccagcacaagagaatccacaccggcgagatgccctacaagtgcaacgagtgcggcaagtacttcagccaccacagcaacctgatcgtgcaccagagagtgcacaacggcgccagaccctacaagtgcagcgactgcggcaaggtgttcagacacaagagcaccctggtgcagcacgagagcatccacaccggcgagaacccctacgactgcagcgactgcggcaagagcttcggccacaagtacaccctgatcaagcaccagagaatccacaccgagagcaagcccttcgagtgcatcgagtgcggcaagttcttcagcagaagcagcgactacatcgcccaccagagagtgcacaccggcgagagacccttcgtgtgcagcaagtgcggcaaggacttcatcagaaccagccacctggtgagacaccagagagtgcacaccggcgagagaccctacgagtgcagcgagtgcggcaaggcctacagcctgagcagccacctgaacagacaccagaaggtgcacaccgccggcagactgtag

SEQ ID NO: 105695 - DNA, 1044 bp, synthetic construct
  misc_feature 1..1044: note = Description of Artificial Sequence: Synthetic coding sequence
  source 1..1044: mol_type = other DNA
atgtggggcatgtgggagaccatcctggtgcagtgcctgcaccagtaccagaagtgctacagcatcgagcagcccctgagaagagacaagagcgaggccagcatcgtgaagaactgcaccgtgagcaaggagccccaccccagcgagaagcccttcacctgcaaggaggagcagaagaacttccaggccaccctgggcggctgccagcagaaggccatccacagcaagagaaagacccacagaagcaccgagagcggcgacgccttccacggcgagcagatgcactacaagtgcagcgagtgcggcaaggccttcagcagaaaggacaccctggtgcagcaccagagaatccacagcggcgagaagccctacgagtgcagcgagtgcggcaaggccttcagcagaaaggccaccctggtgcagcaccagagaatccacaccggcgagagaccctacgagtgcagcgagtgcggcaagaccttcagcagaaaggacaacctgacccagcacaagagaatccacaccggcgagatgccctacaagtgcaacgagtgcggcaagtacttcagccaccacagcaacctgatcgtgcaccagagagtgcacaacggcgccagaccctacaagtgcagcgactgcggcaaggtgttcagacacaagagcaccctggtgcagcacgagagcatccacaccggcgagaacccctacgactgcagcgactgcggcaagagcttcggccacaagtacaccctgatcaagcaccagagaatccacaccgagagcaagcccttcgagtgcatcgagtgcggcaagttcttcagcagaagcagcgactacatcgcccaccagagagtgcacaccggcgagagacccttcgtgtgcagcaagtgcggcaaggacttcatcagaaccagccacctggtgagacaccagagagtgcacaccggcgagagaccctacgagtgcagcgagtgcggcaaggcctacagcctgagcagccacctgaacagacaccagaaggtgcacaccgccggcagactgtag

SEQ ID NO: 105696 - DNA, 1977 bp, synthetic construct
  misc_feature 1..1977: note = Description of Artificial Sequence: Synthetic coding sequence
  source 1..1977: mol_type = other DNA
atgacccccggcgtgagagtgagcaccgaccccgagcaggtgaccttcgaggacgtggtggtgggcttcagccaggaggagtggggccagctgaagcccgcccagagaaccctgtacagagacgtgatgctggacaccttcagactgctggtgagcgtgggccactggctgcccaagcccaacgtgatcagcctgctggagcaggaggccgagctgtgggccgtggagagcagactgccccagggcgtgtaccccgacctggagaccagacccaaggtgaagctgagcgtgctgaagcagggcatcagcgaggagatcagcaacagcgtgatcctggtggagagattcctgtgggacggcctgtggtactgcagaggcgaggacaccgagggccactgggagtggagctgcgagagcctggagagcctggccgtgcccgtggccttcacccccgtgaagacccccgtgctggagcagtggcagagaaacggcttcggcgagaacatcagcctgaaccccgacctgccccaccagcccatgacccccgagagacagagcccccacacctggggcaccagaggcaagagagagaagcccgacctgaacgtgctgcagaagacctgcgtgaaggagaagccctacaagtgccaggagtgcggcaaggccttcagccacagcagcgccctgatcgagcaccacagaacccacaccggcgagagaccctacgagtgccacgagtgcctgaagggcttcagaaacagcagcgccctgaccaagcaccagagaatccacaccggcgagaagccctacaagtgcacccagtgcggcagaaccttcaaccagatcgcccccctgatccagcaccagagaacccacaccggcgagaagccctacgagtgcagcgagtgcggcaagagcttcagcttcagaagcagcttcagccagcacgagagaacccacaccggcgagaagccctacgagtgcagcgagtgcggcaaggccttcagacagagcatccacctgacccagcacctgagaatccacaccggcgagaagccctaccagtgcggcgagtgcggcaaggccttcagccacagcagcagcctgaccaagcaccagagaatccacaccggcgagaagccctacgagtgccacgagtgcggcaaggccttcacccagatcacccccctgatccagcaccagagaacccacaccggcgagaagccctacgagtgcggcgagtgcggcaaggccttcagccagagcaccctgctgaccgagcacagaagaatccacaccggcgagaagccctacggctgcaacgagtgcggcaagaccttcagccacagcagcagcctgagccagcacgagagaacccacaccggcgagaagccctacgagtgcagccagtgcggcaaggccttcagacagagcacccacctgacccagcaccagagaatccacaccggcgagaagccctacgagtgcaacgactgcggcaaggccttcagccacagcagcagcctgaccaagcaccagagaatccacaccggcgagaagccctacgagtgcaaccagtgcggcagagccttcagccagctggcccccctgatccagcaccagagaatccacaccggcgagaagccctacgagtgcaaccagtgcggcagagccttcagccagagcagcctgctgatcgagcaccagagaatccacaccaaggagaagccctacggctgcaacgagtgcggcaagagcttcagccacagcagcagcctgagccagcacgagagaacccacaccggcgagaagccctacgagtgccacgactgcggcaagagcttcagacagagcacccacctgacccagcacagaagaatccacaccggcgagaagccctacgcctgcagagactgcggcaaggccttcacccacagcagcagcctgaccaagcaccagagaacccacaccggctag

SEQ ID NO: 105697 - DNA, 1173 bp, synthetic construct
  misc_feature 1..1173: note = Description of Artificial Sequence: Synthetic coding sequence
  source 1..1173: mol_type = other DNA
atggagctgggcagcagaagaagaagcgtgggctgcagatgcagaggcctgtgcctggccgtgagaagagagcaggtgaccttcgaggacgtggtggtgggcttcagccaggaggagtggggccagctgaagcccgcccagagaaccctgtacagagacgtgatgctggacaccttcagactgctggtgagcgtgggccactggctgcccaagcccaacgtgatcagcctgctggagcaggaggccgagctgtgggccgtggagagcagactgccccagggcgtgtaccccgacctggagaccagacccaaggtgaagctgagcgtgctgaagcagggcatcagcgaggagatcagcaacagcgtgatcctggtggagagattcctgtgggacggcctgtggtactgcagaggcgaggacaccgagggccactgggagtggagctgcgagagcctggagagcctggccgtgcccgtggccttcacccccgtgaagacccccgtgctggagcagtggcagagaaacggcttcggcgagaacatcagcctgaaccccgacctgccccaccagcccatgacccccgagagacagagcccccacacctggggcaccagaggcaagagagagaagcccgacctgaacgtgctgcagaagacctgcgtgaaggagaagccctacaagtgccaggagtgcggcaaggccttcagccacagcagcgccctgatcgagcaccacagaacccacaccggcgagagaccctacgagtgccacgagtgcctgaagggcttcagaaacagcagcgccctgaccaagcaccagagaatccacaccggcgagaagccctacaagtgcacccagtgcggcagaaccttcaaccagatcgcccccctgatccagcaccagagaacccacaccggcgagaagccctacgagtgcagcgagtgcggcaagagcttcagcttcagaagcagcttcagccagcacgagagaacccacaccggcgagaagccctacgagtgcagcgagtgcggcaaggccttcagacagagcatccacctgacccagcacctgagaatccacaccggcgagaagccctaccagtgcggcgagtgcggcaaggccttcacccacagcagcagcctgaccaagcaccagagaacccacaccggctag

SEQ ID NO: 105698 - DNA, 2049 bp, synthetic construct
  misc_feature 1..2049: note = Description of Artificial Sequence: Synthetic coding sequence
  source 1..2049: mol_type = other DNA
atggagctgggcagcagaagaagaagcgtgggctgcagatgcagaggcctgtgcctggccgtgagaagagagcaggtgaccttcgaggacgtggtggtgggcttcagccaggaggagtggggccagctgaagcccgcccagagaaccctgtacagagacgtgatgctggacaccttcagactgctggtgagcgtgggccactggctgcccaagcccaacgtgatcagcctgctggagcaggaggccgagctgtgggccgtggagagcagactgccccagggcgtgtaccccgagatcaagggccacttccagttcctgctgctgagcgacctggagaccagacccaaggtgaagctgagcgtgctgaagcagggcatcagcgaggagatcagcaacagcgtgatcctggtggagagattcctgtgggacggcctgtggtactgcagaggcgaggacaccgagggccactgggagtggagctgcgagagcctggagagcctggccgtgcccgtggccttcacccccgtgaagacccccgtgctggagcagtggcagagaaacggcttcggcgagaacatcagcctgaaccccgacctgccccaccagcccatgacccccgagagacagagcccccacacctggggcaccagaggcaagagagagaagcccgacctgaacgtgctgcagaagacctgcgtgaaggagaagccctacaagtgccaggagtgcggcaaggccttcagccacagcagcgccctgatcgagcaccacagaacccacaccggcgagagaccctacgagtgccacgagtgcctgaagggcttcagaaacagcagcgccctgaccaagcaccagagaatccacaccggcgagaagccctacaagtgcacccagtgcggcagaaccttcaaccagatcgcccccctgatccagcaccagagaacccacaccggcgagaagccctacgagtgcagcgagtgcggcaagagcttcagcttcagaagcagcttcagccagcacgagagaacccacaccggcgagaagccctacgagtgcagcgagtgcggcaaggccttcagacagagcatccacctgacccagcacctgagaatccacaccggcgagaagccctaccagtgcggcgagtgcggcaaggccttcagccacagcagcagcctgaccaagcaccagagaatccacaccggcgagaagccctacgagtgccacgagtgcggcaaggccttcacccagatcacccccctgatccagcaccagagaacccacaccggcgagaagccctacgagtgcggcgagtgcggcaaggccttcagccagagcaccctgctgaccgagcacagaagaatccacaccggcgagaagccctacggctgcaacgagtgcggcaagaccttcagccacagcagcagcctgagccagcacgagagaacccacaccggcgagaagccctacgagtgcagccagtgcggcaaggccttcagacagagcacccacctgacccagcaccagagaatccacaccggcgagaagccctacgagtgcaacgactgcggcaaggccttcagccacagcagcagcctgaccaagcaccagagaatccacaccggcgagaagccctacgagtgcaaccagtgcggcagagccttcagccagctggcccccctgatccagcaccagagaatccacaccggcgagaagccctacgagtgcaaccagtgcggcagagccttcagccagagcagcctgctgatcgagcaccagagaatccacaccaaggagaagccctacggctgcaacgagtgcggcaagagcttcagccacagcagcagcctgagccagcacgagagaacccacaccggcgagaagccctacgagtgccacgactgcggcaagagcttcagacagagcacccacctgacccagcacagaagaatccacaccggcgagaagccctacgcctgcagagactgcggcaaggccttcacccacagcagcagcctgaccaagcaccagagaacccacaccggctag

SEQ ID NO: 105699 - DNA, 1977 bp, synthetic construct; identical to SEQ ID NO: 105696
  misc_feature 1..1977: note = Description of Artificial Sequence: Synthetic coding sequence
  source 1..1977: mol_type = other DNA

SEQ ID NO: 105700 - DNA, 1851 bp, synthetic construct
  misc_feature 1..1851: note = Description of Artificial Sequence: Synthetic coding sequence
  source 1..1851: mol_type = other DNA
atgctggacaccttcagactgctggtgagcgtgggccactggctgcccaagcccaacgtgatcagcctgctggagcaggaggccgagctgtgggccgtggagagcagactgccccagggcgtgtaccccgacctggagaccagacccaaggtgaagctgagcgtgctgaagcagggcatcagcgaggagatcagcaacagcgtgatcctggtggagagattcctgtgggacggcctgtggtactgcagaggcgaggacaccgagggccactgggagtggagctgcgagagcctggagagcctggccgtgcccgtggccttcacccccgtgaagacccccgtgctggagcagtggcagagaaacggcttcggcgagaacatcagcctgaaccccgacctgccccaccagcccatgacccccgagagacagagcccccacacctggggcaccagaggcaagagagagaagcccgacctgaacgtgctgcagaagacctgcgtgaaggagaagccctacaagtgccaggagtgcggcaaggccttcagccacagcagcgccctgatcgagcaccacagaacccacaccggcgagagaccctacgagtgccacgagtgcctgaagggcttcagaaacagcagcgccctgaccaagcaccagagaatccacaccggcgagaagccctacaagtgcacccagtgcggcagaaccttcaaccagatcgcccccctgatccagcaccagagaacccacaccggcgagaagccctacgagtgcagcgagtgcggcaagagcttcagcttcagaagcagcttcagccagcacgagagaacccacaccggcgagaagccctacgagtgcagcgagtgcggcaaggccttcagacagagcatccacctgacccagcacctgagaatccacaccggcgagaagccctaccagtgcggcgagtgcggcaaggccttcagccacagcagcagcctgaccaagcaccagagaatccacaccggcgagaagccctacgagtgccacgagtgcggcaaggccttcacccagatcacccccctgatccagcaccagagaacccacaccggcgagaagccctacgagtgcggcgagtgcggcaaggccttcagccagagcaccctgctgaccgagcacagaagaatccacaccggcgagaagccctacggctgcaacgagtgcggcaagaccttcagccacagcagcagcctgagccagcacgagagaacccacaccggcgagaagccctacgagtgcagccagtgcggcaaggccttcagacagagcacccacctgacccagcaccagagaatccacaccggcgagaagccctacgagtgcaacgactgcggcaaggccttcagccacagcagcagcctgaccaagcaccagagaatccacaccggcgagaagccctacgagtgcaaccagtgcggcagagccttcagccagctggcccccctgatccagcaccagagaatccacaccggcgagaagccctacgagtgcaaccagtgcggcagagccttcagccagagcagcctgctgatcgagcaccagagaatccacaccaaggagaagccctacggctgcaacgagtgcggcaagagcttcagccacagcagcagcctgagccagcacgagagaacccacaccggcgagaagccctacgagtgccacgactgcggcaagagcttcagacagagcacccacctgacccagcacagaagaatccacaccggcgagaagccctacgcctgcagagactgcggcaaggccttcacccacagcagcagcctgaccaagcaccagagaacccacaccggctag

SEQ ID NO: 105701 - DNA, 2013 bp, synthetic construct
  misc_feature 1..2013: note = Description of Artificial Sequence: Synthetic coding sequence
  source 1..2013: mol_type = other DNA
atgacccccggcgtgagagtgagcaccgaccccgagcaggtgaccttcgaggacgtggtggtgggcttcagccaggaggagtggggccagctgaagcccgcccagagaaccctgtacagagacgtgatgctggacaccttcagactgctggtgagcgtgggccactggctgcccaagcccaacgtgatcagcctgctggagcaggaggccgagctgtgggccgtggagagcagactgccccagggcgtgtaccccgagatcaagggccacttccagttcctgctgctgagcgacctggagaccagacccaaggtgaagctgagcgtgctgaagcagggcatcagcgaggagatcagcaacagcgtgatcctggtggagagattcctgtgggacggcctgtggtactgcagaggcgaggacaccgagggccactgggagtggagctgcgagagcctggagagcctggccgtgcccgtggccttcacccccgtgaagacccccgtgctggagcagtggcagagaaacggcttcggcgagaacatcagcctgaaccccgacctgccccaccagcccatgacccccgagagacagagcccccacacctggggcaccagaggcaagagagagaagcccgacctgaacgtgctgcagaagacctgcgtgaaggagaagccctacaagtgccaggagtgcggcaaggccttcagccacagcagcgccctgatcgagcaccacagaacccacaccggcgagagaccctacgagtgccacgagtgcctgaagggcttcagaaacagcagcgccctgaccaagcaccagagaatccacaccggcgagaagccctacaagtgcacccagtgcggcagaaccttcaaccagatcgcccccctgatccagcaccagagaacccacaccggcgagaagccctacgagtgcagcgagtgcggcaagagcttcagcttcagaagcagcttcagccagcacgagagaacccacaccggcgagaagccctacgagtgcagcgagtgcggcaaggccttcagacagagcatccacctgacccagcacctgagaatccacaccggcgagaagccctaccagtgcggcgagtgcggcaaggccttcagccacagcagcagcctgaccaagcaccagagaatccacaccggcgagaagccctacgagtgccacgagtgcggcaaggccttcacccagatcacccccctgatccagcaccagagaacccacaccggcgagaagccctacgagtgcggcgagtgcggcaaggccttcagccagagcaccctgctgaccgagcacagaagaatccacaccggcgagaagccctacggctgcaacgagtgcggcaagaccttcagccacagcagcagcctgagccagcacgagagaacccacaccggcgagaagccctacgagtgcagccagtgcggcaaggccttcagacagagcacccacctgacccagcaccagagaatccacaccggcgagaagccctacgagtgcaacgactgcggcaaggccttcagccacagcagcagcctgaccaagcaccagagaatccacaccggcgagaagccctacgagtgcaaccagtgcggcagagccttcagccagctggcccccctgatccagcaccagagaatccacaccggcgagaagccctacgagtgcaaccagtgcggcagagccttcagccagagcagcctgctgatcgagcaccagagaatccacaccaaggagaagccctacggctgcaacgagtgcggcaagagcttcagccacagcagcagcctgagccagcacgagagaacccacaccggcgagaagccctacgagtgccacgactgcggcaagagcttcagacagagcacccacctgacccagcacagaagaatccacaccggcgagaagccctacgcctgcagagactgcggcaaggccttcacccacagcagcagcctgaccaagcaccagagaacccacaccggctag

SEQ ID NO: 105702 - DNA, 2031 bp, synthetic construct
  misc_feature 1..2031: note = Description of Artificial Sequence: Synthetic coding sequence
  source 1..2031: mol_type = other DNA
tgaagaagcgtgggctgcagatgcagaggcctgtgcctggccgtgagaagagagcaggtgaccttcgaggacgtggtggtgggcttcagccaggaggagtggggccagctgaagcccgcccagagaaccctgtacagagacgtgatgctggacaccttcagactgctggtgagcgtgggccactggctgcccaagcccaacgtgatcagcctgctggagcaggaggccgagctgtgggccgtggagagcagactgccccagggcgtgtaccccgagatcaagggccacttccagttcctgctgctgagcgacctggagaccagacccaaggtgaagctgagcgtgctgaagcagggcatcagcgaggagatcagcaacagcgtgatcctggtggagagattcctgtgggacggcctgtggtactgcagaggcgaggacaccgagggccactgggagtggagctgcgagagcctggagagcctggccgtgcccgtggccttcacccccgtgaagacccccgtgctggagcagtggcagagaaacggcttcggcgagaacatcagcctgaaccccgacctgccccaccagcccatgacccccgagagacagagcccccacacctggggcaccagaggcaagagagagaagcccgacctgaacgtgctgcagaagacctgcgtgaaggagaagccctacaagtgccaggagtgcggcaaggccttcagccacagcagcgccctgatcgagcaccacagaacccacaccggcgagagaccctacgagtgccacgagtgcctgaagggcttcagaaacagcagcgccctgaccaagcaccagagaatccacaccggcgagaagccctacaagtgcacccagtgcggcagaaccttcaaccagatcgcccccctgatccagcaccagagaacccacaccggcgagaagccctacgagtgcagcgagtgcggcaagagcttcagcttcagaagcagcttcagccagcacgagagaacccacaccggcgagaagccctacgagtgcagcgagtgcggcaaggccttcagacagagcatccacctgacccagcacctgagaatccacaccggcgagaagccctaccagtgcggcgagtgcggcaaggccttcagccacagcagcagcctgaccaagcaccagagaatccacaccggcgagaagccctacgagtgccacgagtgcggcaaggccttcacccagatcacccccctgatccagcaccagagaacccacaccggcgagaagccctacgagtgcggcgagtgcggcaaggccttcagccagagcaccctgctgaccgagcacagaagaatccacaccggcgagaagccctacggctgcaacgagtgcggcaagaccttcagccacagcagcagcctgagccagcacgagagaacccacaccggcgagaagccctacgagtgcagccagtgcggcaaggccttcagacagagcacccacctgacccagcaccagagaatccacaccggcgagaagccctacgagtgcaacgactgcggcaaggccttcagccacagcagcagcctgaccaagcaccagagaatccacaccggcgagaagccctacgagtgcaaccagtgcggcagagccttcagccagctggcccccctgatccagcaccagagaatccacaccggcgagaagccctacgagtgcaaccagtgcggcagagccttcagccagagcagcctgctgatcgagcaccagagaatccacaccaaggagaagccctacggctgcaacgagtgcggcaagagcttcagccacagcagcagcctgagccagcacgagagaacccacaccggcgagaagccctacgagtgccacgactgcggcaagagcttcagacagagcacccacctgacccagcacagaagaatccacaccggcgagaagccctacgcctgcagagactgcggcaaggccttcacccacagcagcagcctgaccaagcaccagagaacccacaccggctag

SEQ ID NO: 105703 - DNA, 1623 bp, synthetic construct
  misc_feature 1..1623: note = Description of Artificial Sequence: Synthetic coding sequence
  source 1..1623: mol_type = other DNA
atggacagcgtggccttcgaggacgtggacgtgaacttcacccaggaggagtgggccctgctggaccccagccagaagaacctgtacagagacgtgatgtgggagaccatgagaaacctggccagcatcggcaagaagtggaaggaccagaacatcaaggaccactacaagcacagaggcagaaacctgagaagccacatgctggagagactgtaccagaccaaggacggcagccagagaggcggcatcttcagccagttcgccaaccagaacctgagcaagaagatccccggcgtgaagctgtgcgagagcatcgtgtacggcgaggtgagcatgggccagagcagcctgaacagacacatcaaggaccacagcggccacgagcccaaggagtaccaggagtacggcgagaagcccgacaccagaaaccagtgctggaagcccttcagcagccaccacagcttcagaacccacgagatcatccacaccggcgagaagctgtacgactgcaaggagtgcggcaagaccttcttcagcctgaagagaatcagaagacacatcatcacccacagcggctacaccccctacaagtgcaaggtgtgcggcaaggccttcgactaccccagcagattcagaacccacgagagaagccacaccggcgagaagccctacgagtgccaggagtgcggcaaggccttcacctgcatcaccagcgtgagaagacacatgatcaagcacaccggcgacggcccctacaagtgcaaggtgtgcggcaagcccttccacagcctgagcagcttccaggtgcacgagagaatccacaccggcgagaagcccttcaagtgcaagcagtgcggcaaggccttcagctgcagccccaccctgagaatccacgagagaacccacaccggcgagaagccctacgagtgcaagcagtgcggcaaggccttcagctacctgcccagcctgagactgcacgagagaatccacaccggcgagaagcccttcgtgtgcaagcagtgcggcaaggccttcagaagcgccagcaccttccagatccacgagagaacccacaccggcgagaagccctacgagtgcaaggagtgcggcgaggccttcagctgcatccccagcatgagaagacacatgatcaagcacaccggcgagggcccctacaagtgcaaggtgtgcggcaagcccttccacagcctgagccccttcagaatccacgagagaacccacaccggcgagaagccctacgtgtgcaagcactgcggcaaggccttcgtgagcagcaccagcatcagaatccacgagagaacccacaccggcgagaagccctacgagtgcaagcagtgcggcaaggccttcagctacctgaacagcttcagaacccacgagatgatccacaccggcgagaagcccttcgagtgcaagagatgcggcaaggccttcagaagcagcagcagcttcagactgcacgagagaacccacaccggccagaagccctaccactgcaaggagtgcggcaaggcctacagctgcagagccagcttccagagacacatgctgacccacgccgaggacggccccccctacaagtgcatgtgggagagcctgtag

SEQ ID NO: 105704 - DNA, 1425 bp, synthetic construct
  misc_feature 1..1425: note = Description of Artificial Sequence: Synthetic coding sequence
  source 1..1425: mol_type = other DNA
atgctggagagactgtaccagaccaaggacggcagccagagaggcggcatcttcagccagttcgccaaccagaacctgagcaagaagatccccggcgtgaagctgtgcgagagcatcgtgtacggcgaggtgagcatgggccagagcagcctgaacagacacatcaaggaccacagcggccacgagcccaaggagtaccaggagtacggcgagaagcccgacaccagaaaccagtgctggaagcccttcagcagccaccacagcttcagaacccacgagatcatccacaccggcgagaagctgtacgactgcaaggagtgcggcaagaccttcttcagcctgaagagaatcagaagacacatcatcacccacagcggctacaccccctacaagtgcaaggtgtgcggcaaggccttcgactaccccagcagattcagaacccacgagagaagccacaccggcgagaagccctacgagtgccaggagtgcggcaaggccttcacctgcatcaccagcgtgagaagacacatgatcaagcacaccggcgacggcccctacaagtgcaaggtgtgcggcaagcccttccacagcctgagcagcttccaggtgcacgagagaatccacaccggcgagaagcccttcaagtgcaagcagtgcggcaaggccttcagctgcagccccaccctgagaatccacgagagaacccacaccggcgagaagccctacgagtgcaagcagtgcggcaaggccttcagctacctgcccagcctgagactgcacgagagaatccacaccggcgagaagcccttcgtgtgcaagcagtgcggcaaggccttcagaagcgccagcaccttccagatccacgagagaacccacaccggcgagaagccctacgagtgcaaggagtgcggcgaggccttcagctgcatccccagcatgagaagacacatgatcaagcacaccggcgagggcccctacaagtgcaaggtgtgcggcaagcccttccacagcctgagccccttcagaatccacgagagaacccacaccggcgagaagccctacgtgtgcaagcactgcggcaaggccttcgtgagcagcaccagcatcagaatccacgagagaacccacaccggcgagaagccctacgagtgcaagcagtgcggcaaggccttcagctacctgaacagcttcagaacccacgagatgatccacaccggcgagaagcccttcgagtgcaagagatgcggcaaggccttcagaagcagcagcagcttcagactgcacgagagaacccacaccggccagaagccctaccactgcaaggagtgcggcaaggcctacagctgcagagccagcttccagagacacatgctgacccacgccgaggacggccccccctacaagtgcatgtgggagagcctgtag

SEQ ID NO: 105705 - DNA, 960 bp, synthetic construct
  misc_feature 1..960: note = Description of Artificial Sequence: Synthetic coding sequence
  source 1..960: mol_type = other DNA
atgggccccctgaccttcatggacgtggccatcgagttcagcctggaggagtggcagtgcctggacaccgcccagagaaacgtgtacagacacgtgatgctggagaactacagaaacctggtgttcctggacctgatcacctgcctggagcagggcaaggagccctggaacatgaagagacacgagatggtggtggccaagcacagcgccctgtgcagcagattcgcccaggacctgtggctggagcagaacatcaaggacagcttccagaaggtgaccctgagcagatacggcaagtacggccacaagaacctgcagctgagaaagggctgcaagagcgtggacgagtgcaagggccaccagggcggcttcaacggcctgaaccagtgcctgaagatcaccaccagcaagatcttccagtgcaacaagtacgtgaaggtgatgcacaagttcagcaacagcaacagacacaagatcagacacaccgagaacaagcacttcagatgcaaggagtgcgacaagagcctgtgcatgctgagcagactgacccagcacaagaagatccacaccagagagaacttctacaagtgcgaggagtgcggcaagaccttcaactggagcaccaacctgagcaagcccaagaagatccacaccggcgagaagccctacaagtgcgaggtgtgcggcaaggccttccaccagagcagcatcctgaccaagcacaagatcatcagaaccggcgagaagccctacaagtgcgcccactgcggcaaggccttcaagcagagcagccacctgaccagacacaagatcatccacaccgaggagaagccctacaagtgcgagcagtgcggcaaggtgttcaagcagagccccaccctgaccaagcaccagatcatctacaccggcgaggagccctacaagtgcgaggagtgcggcaaggccttcaacctgagctag

SEQ ID NO: 105706 - DNA, 789 bp, synthetic construct
  misc_feature 1..789: note = Description of Artificial Sequence: Synthetic coding sequence
  source 1..789: mol_type = other DNA
atgaagagacacgagatggtggtggccaagcacagcgccctgtgcagcagattcgcccaggacctgtggctggagcagaacatcaaggacagcttccagaaggtgaccctgagcagatacggcaagtacggccacaagaacctgcagctgagaaagggctgcaagagcgtggacgagtgcaagggccaccagggcggcttcaacggcctgaaccagtgcctgaagatcaccaccagcaagatcttccagtgcaacaagtacgtgaaggtgatgcacaagttcagcaacagcaacagacacaagatcagacacaccgagaacaagcacttcagatgcaaggagtgcgacaagagcctgtgcatgctgagcagactgacccagcacaagaagatccacaccagagagaacttctacaagtgcgaggagtgcggcaagaccttcaactggagcaccaacctgagcaagcccaagaagatccacaccggcgagaagccctacaagtgcgaggtgtgcggcaaggccttccaccagagcagcatcctgaccaagcacaagatcatcagaaccggcgagaagccctacaagtgcgcccactgcggcaaggccttcaagcagagcagccacctgaccagacacaagatcatccacaccgaggagaagccctacaagtgcgagcagtgcggcaaggtgttcaagcagagccccaccctgaccaagcaccagatcatctacaccggcgaggagccctacaagtgcgaggagtgcggcaaggccttcaacctgagctag

SEQ ID NO: 105707 - DNA, 789 bp, synthetic construct; identical to SEQ ID NO: 105706
  misc_feature 1..789: note = Description of Artificial Sequence: Synthetic coding sequence
  source 1..789: mol_type = other DNA

SEQ ID NO: 105708 - DNA, 864 bp, synthetic construct
  misc_feature 1..864: note = Description of Artificial Sequence: Synthetic coding sequence
  source 1..864: mol_type = other DNA
atggacgtggccatcgagttcagcctggaggagtggcagtgcctggacaccgcccagagaaacgtgtacagacacgtgatgctggagaactacagaaacctggtgttcctggccctgtgcagcagattcgcccaggacctgtggctggagcagaacatcaaggacagcttccagaaggtgaccctgagcagatacggcaagtacggccacaagaacctgcagctgagaaagggctgcaagagcgtggacgagtgcaagggccaccagggcggcttcaacggcctgaaccagtgcctgaagatcaccaccagcaagatcttccagtgcaacaagtacgtgaaggtgatgcacaagttcagcaacagcaacagacacaagatcagacacaccgagaacaagcacttcagatgcaaggagtgcgacaagagcctgtgcatgctgagcagactgacccagcacaagaagatccacaccagagagaacttctacaagtgcgaggagtgcggcaagaccttcaactggagcaccaacctgagcaagcccaagaagatccacaccggcgagaagccctacaagtgcgaggtgtgcggcaaggccttccaccagagcagcatcctgaccaagcacaagatcatcagaaccggcgagaagccctacaagtgcgcccactgcggcaaggccttcaagcagagcagccacctgaccagacacaagatcatccacaccgaggagaagccctacaagtgcgagcagtgcggcaaggtgttcaagcagagccccaccctgaccaagcaccagatcatctacaccggcgaggagccctacaagtgcgaggagtgcggcaaggccttcaacctgagctag

SEQ ID NO: 105709 - DNA, 882 bp, synthetic construct
  misc_feature 1..882: note = Description of Artificial Sequence: Synthetic coding sequence
  source 1..882: mol_type = other DNA
atgggccccctgaccttcatggacgtggccatcgagttcagcctggaggagtggcagtgcctggacaccgcccagagaaacgtgtacagacacgtgatgctggagaactacagaaacctggtgttcctggccctgtgcagcagattcgcccaggacctgtggctggagcagaacatcaaggacagcttccagaaggtgaccctgagcagatacggcaagtacggccacaagaacctgcagctgagaaagggctgcaagagcgtggacgagtgcaagggccaccagggcggcttcaacggcctgaaccagtgcctgaagatcaccaccagcaagatcttccagtgcaacaagtacgtgaaggtgatgcacaagttcagcaacagcaacagacacaagatcagacacaccgagaacaagcacttcagatgcaaggagtgcgacaagagcctgtgcatgctgagcagactgacccagcacaagaagatccacaccagagagaacttctacaagtgcgaggagtgcggcaagaccttcaactggagcaccaacctgagcaagcccaagaagatccacaccggcgagaagccctacaagtgcgaggtgtgcggcaaggccttccaccagagcagcatcctgaccaagcacaagatcatcagaaccggcgagaagccctacaagtgcgcccactgcggcaaggccttcaagcagagcagccacctgaccagacacaagatcatccacaccgaggagaagccctacaagtgcgagcagtgcggcaaggtgttcaagcagagccccaccctgaccaagcaccagatcatctacaccggcgaggagccctacaagtgcgaggagtgcggcaaggccttcaacctgagctag

SEQ ID NO: 105710 - DNA, 381 bp, synthetic construct
  misc_feature 1..381: note = Description of Artificial Sequence: Synthetic coding sequence
  source 1..381: mol_type = other DNA
atgggccccctgaccttcatggacgtggccatcgagttcagcctggaggagtggcagtgcctggacaccgcccagagaaacgtgtacagacacgtgatgctggagaactacagaaacctggtgttcctggacctgatcacctgcctggagcagggcaaggagccctggaacatgaagagacacgagatggtggtggccaagcacagcgccgtggccttcaccttcgacctgagcggcctgaacatcctgagcttccagagcatcctgcccttcgtgagcgccctgtacgtgatgggcaacagaaaccagtgcctgcagaagcacctggaggccagaaacaaggacctgtgcgtgctggtgctgcccaagaccttcggctag

SEQ ID NO: 105711 - DNA, 1929 bp, synthetic construct
  misc_feature 1..1929: note = Description of Artificial Sequence: Synthetic coding sequence
  source 1..1929: mol_type = other DNA
atggacagcgtgagcttcgaggacgtggccgtgaacttcaccctggaggagtgggccctgctggacagcagccagaagaagctgtacgaggacgtgatgcaggagaccttcaagaacctggtgtgcctgggcaagaagtgggaggaccaggacatcgaggacgaccacagaaaccagggcaagaacagaagatgccacatggtggagagactgtgcgagagcagaagaggcagcaagtgcggcgagaccaccagccagatgcccaacgtgaacatcaacaaggagaccttcaccggcgccaagccccacgagtgcagcttctgcggcagagacttcatccaccacagcagcctgaacagacacatgagaagccacaccggccagaagcccaacgagtaccaggagtacgagaagcagccctgcaagtgcaaggccgtgggcaagaccttcagctaccaccactgcttcagaaagcacgagagaacccacaccggcgtgaagccctacgagtgcaagcagtgcggcaaggccttcatctactaccagcccttccagagacacgagagaacccacgccggccagaagccctacgagtgcaagcagtgcggcaagaccttcatctactaccagagcttccagaagcacgcccacaccggcaagaagccctacgagtgcaagcagtgcggcaaggccttcatctgctaccagagcttccagagacacaagagaacccacaccggcgagaagccctacgagtgcaagcagtgcggcaaggccttcagctgccccacctacttcagaacccacgagagaacccacaccggcgagaagccctacaagtgcaaggagtgcggcaaggccttcagcttcctgagcagcttcagaagacacaagagaacccacagcggcgagaagccctacgagtgcaaggagtgcggcaaggccttcttctacagcgccagcttcagagcccacgtgatcatccacaccggcgccagaccctacaagtgcaaggagtgcggcaaggccttcaacagcagcaacagctgcagagtgcacgagagaacccacatcggcgagaagccctacgagtgcaagagatgcggcaagagcttcagctggagcatcagcctgagactgcacgagagaacccacaccggcgagaagccctacgagtgcaagcagtgccacaagaccttcagcttcagcagcagcctgagagagcacgagaccacccacaccggcgagaagccctacgagtgcaagcagtgcggcaagaccttcagcttcagcagcagcctgcagagacacgagagaacccacaacgccgagaagccctacgagtgcaagcagtgcggcaaggccttcagatgcagcagctacttcagaatccacgagagaagccacaccggcgagaagccctacgagtgcaagcagtgcggcaaggtgttcatcagaagcagcagcttcagactgcacgagagaacccacaccggcgagaagccctacgagtgcaagctgtgcggcaagaccttcagcttcagcagcagcctgagagagcacgagaagatccacaccggcaacaagcccttcgagtgcaagcagtgcggcaaggccttcctgagaagcagccagatcagactgcacgagagaacccacaccggcgagaagccctaccagtgcaagcagtgcggcaaggccttcatcagcagcagcaagttcagaatgcacgagagaacccacaccggcgagaagccctacagatgcaagcagtgcggcaaggccttcagattcagcagcagcgtgagaatccacgagagaagccacaccggcgagaagccctacgagtgcaagcagtgcggcaaggccttcatcagcagcagccacttcagactgcacgagagaacccacatgggcgagaaggtgtag

SEQ ID NO: 105712 - DNA, 1374 bp, synthetic construct
  misc_feature 1..1374: note = Description of Artificial Sequence: Synthetic coding sequence
  source 1..1374: mol_type = other DNA
atgagccagggcagcgtgaccttcagagacgtggccatcgacttcagccaggaggagtggaagtggctgcagcccgcccagagagacctgtacagatgcgtgatgctggagaactacggccacctggtgagcctgggcctgagcatcagcaagcccgacgtggtgagcctgctggagcagggcaaggagccctggctgggcaagagagaggtgaagagagacctgttcagcgtgagcgagagcagcggcgagatcaaggacttcagccccaagaacgtgatctacgacgacagcagccagtacctgatcatggagagaatcctgagccagggccccgtgtacagcagcttcaagggcggctggaagtgcaaggaccacaccgagatgctgcaggagaaccagggctgcatcagaaaggtgaccgtgagccaccaggaggccctggcccagcacatgaacatcagcaccgtggagagaccctacggctgccacgagtgcggcaagaccttcggcagaagattcagcctggtgctgcaccagagaacccacaccggcgagaagccctacgcctgcaaggagtgcggcaagaccttcagccagatcagcaacctggtgaagcaccagatgatccacaccggcaagaagccccacgagtgcaaggactgcaacaagaccttcagctacctgagcttcctgatcgagcaccagagaacccacaccggcgagaagccctacgagtgcaccgagtgcggcaaggccttcagcagagccagcaacctgaccagacaccagagaatccacatcggcaagaagcagtacatctgcagaaagtgcggcaaggccttcagcagcggcagcgagctgatcagacaccagatcacccacaccggcgagaagccctacgagtgcatcgagtgcggcaaggccttcagaagattcagccacctgaccagacaccagagcatccacaccaccaagaccccctacgagtgcaacgagtgcagaaaggccttcagatgccacagcttcctgatcaagcaccagagaatccacgccggcgagaagctgtacgagtgcgacgagtgcggcaaggtgttcacctggcacgccagcctgatccagcacaccaagagccacaccggcgagaagccctacgcctgcgccgagtgcgacaaggccttcagcagaagcttcagcctgatcctgcaccagagaacccacaccggcgagaagccctacgtgtgcaaggtgtgcaacaagagcttcagctggagcagcaacctggccaagcaccagagaacccacaccctggacaacccctacgagtacgagaacagcttcaactaccacagcttcctgaccgagcaccagtag

SEQ ID NO: 105713 - DNA, 351 bp, synthetic construct
  misc_feature 1..351: note = Description of Artificial Sequence: Synthetic coding sequence
  source 1..351: mol_type = other DNA
atgagccagggcagcgtgaccttcagagacgtggccatcgacttcagccaggaggagtggaagtggctgcagcccgcccagagagacctgtacagatgcgtgatgctggagaactacggccacctggtgagcctgggcctgagcatcagcaagcccgacgtggtgagcctgctggagcagggcaaggagccctggctgggcaagagagaggtgaagagagacctgttcagcgtgagcgagagcagcggcgagatcaaggacttcagccccaagaacgtgatctacgacgacagcagccagtacctgatcatggagagaatcctgagccagggccccgtgtacagcagctag

SEQ ID NO: 105714 - DNA, 684 bp, synthetic construct
  misc_feature 1..684: note = Description of Artificial Sequence: Synthetic coding sequence
  source 1..684: mol_type = other DNA
acccacaccggcgagaagccctacgcctgcaaggagtgcggcaagaccttcagccagatcagcaacctggtgaagcaccagatgatccacaccggcaagaagccccacgagtgcaaggactgcaacaagaccttcagctacctgagcttcctgatcgagcaccagagaacccacaccggcgagaagccctacgagtgcaccgagtgcggcaaggccttcagcagagccagcaacctgaccagacaccagagaatccacatcggcaagaagcagtacatctgcagaaagtgcggcaaggccttcagcagcggcagcgagctgatcagacaccagatcacccacaccggcgagaagccctacgagtgcatcgagtgcggcaaggccttcagaagattcagccacctgaccagacaccagagaatccacgccggcgagaagctgtacgagtgcgacgagtgcggcaaggtgttcacctggcacgccagcctgatccagcacaccaagagccacaccggcgagaagccctacgcctgcgccgagtgcgacaaggccttcagcagaagcttcagcctgatcctgcaccagagaacccacaccggcgagaagccctacgtgtgcaaggtgtgcaacaagagcttcagctggagcagcaacctggccaagcaccagagaacccacacctag

SEQ ID NO: 105715 - DNA, 1065 bp, synthetic construct
  misc_feature 1..1065: note = Description of Artificial Sequence: Synthetic coding sequence
  source 1..1065: mol_type = other DNA
atggagagaatcctgagccagggccccgtgtacagcagcttcaagggcggctggaagtgcaaggaccacaccgagatgctgcaggagaaccagggctgcatcagaaaggtgaccgtgagccaccaggaggccctggcccagcacatgaacatcagcaccgtggagagaccctacggctgccacgagtgcggcaagaccttcggcagaagattcagcctggtgctgcaccagagaacccacaccggcgagaagccctacgcctgcaaggagtgcggcaagaccttcagccagatcagcaacctggtgaagcaccagatgatccacaccggcaagaagccccacgagtgcaaggactgcaacaagaccttcagctacctgagcttcctgatcgagcaccagagaacccacaccggcgagaagccctacgagtgcaccgagtgcggcaaggccttcagcagagccagcaacctgaccagacaccagagaatccacatcggcaagaagcagtacatctgcagaaagtgcggcaaggccttcagcagcggcagcgagctgatcagacaccagatcacccacaccggcgagaagccctacgagtgcatcgagtgcggcaaggccttcagaagattcagccacctgaccagacaccagagcatccacaccaccaagaccccctacgagtgcaacgagtgcagaaaggccttcagatgccacagcttcctgatcaagcaccagagaatccacgccggcgagaagctgtacgagtgcgacgagtgcggcaaggtgttcacctggcacgccagcctgatccagcacaccaagagccacaccggcgagaagccctacgcctgcgccgagtgcgacaaggccttcagcagaagcttcagcctgatcctgcaccagagaacccacaccggcgagaagccctacgtgtgcaaggtgtgcaacaagagcttcagctggagcagcaacctggccaagcaccagagaacccacaccctggacaacccctacgagtacgagaacagcttcaactaccacagcttcctgaccgagcaccagtag

SEQ ID NO: 105716 - DNA, 1425 bp, synthetic construct
  misc_feature 1..1425: note = Description of Artificial Sequence: Synthetic coding sequence
  source 1..1425: mol_type = other DNA
atggagctgctgaccttcagagacgtggccatcgagttcagccccgaggagtggaagtgcctggaccccgaccagcagaacctgtacagagacgtgatgctggagaactacagaaacctggtgagcctgggcgtggccatcagcaaccccgacctggtgacctgcctggagcagagaaaggagccctacaacgtgaagatccacaagatcgtggccagaccccccgccatgtgcagccacttcacccaggaccactggcccgtgcagggcatcgaggacagcttccacaagctgatcctgagaagatacgagaagtgcggccacgacaacctgcagctgagaaagggctgcaagagcctgaacgagtgcaagctgcagaagggcggctacaacgagttcaacgagtgcctgagcaccacccagagcaagatcctgcagtgcaaggccagcgtgaaggtggtgagcaagttcagcaacagcaacaagagaaagaccagacacaccggcgagaagcacttcaaggagtgcggcaagagcttccagaagttcagccacctgacccagcacaaggtgatccacgccggcgagaagccctacacctgcgaggagtgcggcaaggccttcaagtggagcctgatcttcaacgagcacaagagaatccacaccggcgagaagcccttcacctgcgaggagtgcggcagcatcttcaccaccagcagccacttcgccaagcacaagatcatccacaccggcgagaagccctacaagtgcgaggagtgcggcaaggccttcaacagattcaccaccctgaccaagcacaagagaatccacgccggcgagaagcccatcacctgcgaggagtgcagaaagatcttcaccagcagcagcaacttcgccaagcacaagagaatccacaccggcgagaagccctacaagtgcgaggagtgcggcaaggccttcaacagaagcaccaccctgaccaagcacaagagaatccacaccggcgagaagccctacacctgcgaggagtgcggcaaggccttcagacagagcagcaagctgaacgagcacaagaaggtgcacaccggcgagagaccctacaagtgcgacgagtgcggcaaggccttcggcagaagcagagtgctgaacgagcacaagaagatccacaccggcgagaagccctacaagtgcgaggagtgcggcaaggccttcagaagaagcaccgacagaagccagcacaagaagatccacagcgccgacaagccctacaagtgcaaggagtgcgacaaggccttcaagcagttcagcctgctgagccagcacaagaagatccacaccgtggacaagccctacaagtgcaaggactgcgacaaggccttcaagagattcagccacctgaacaagcacaagaagatccacacctag

SEQ ID NO: 105717 - DNA, 606 bp, synthetic construct
  misc_feature 1..606: note = Description of Artificial Sequence: Synthetic coding sequence
  source 1..606: mol_type = other DNA
atggagctgctgaccttcagagacgtggccatcgagttcagccccgaggagtggaagtgcctggaccccgaccagcagaacctgtacagagacgtgatgctggagaactacagaaacctggtgagcctgggcgtggccatcagcaaccccgacctggtgacctgcctggagcagagaaaggagccctacaacgtgaagatccacaagatcgtggccagaccccccgccatgtgcagccacttcacccaggaccactggcccgtgcagggcatcgaggacagcttccacaagctgatcctgagaagatacgagaagtgcggccacgacaacctgcagctgagaaagggctgcaagagcctgaacgagtgcaagctgcagaagggcggctacaacgagttcaacgagtgcctgagcaccacccagagcaagatcctgcagtgcaaggccagcgtgaaggtggtgagcaagttcagcaacagcaacaagagaaagaccagacacaccggcgagaagcacttcaaggagtgcggcaagagcttccagaagttcagccacctgacccagcacaagaacagcagcatcagcatgaccaccagccccttctag

SEQ ID NO: 105718 - DNA, 5064 bp, synthetic construct
  misc_feature 1..5064: note = Description of Artificial Sequence: Synthetic coding sequence
  source 1..5064: mol_type = other DNA
atgaccgaccccctgctggacagccagcccgccagcagcaccggcgagatggacggcctgtgccccgagctgctgctgatccccccccccctgagcaacagaggcatcctgggccccgtgcagagcccctgccccagcagagaccccgcccccatccccaccgagcccggctgcctgctggtggaggccaccgccaccgaggagggccccggcaacatggagatcatcgtggagaccgtggccggcaccctgacccccggcgcccccggcgagacccccgcccccaagctgccccccggcgagagagagcccagccaggaggccggcacccccctgcccggccaggagaccgccgaggaggagaacgtggagaaggaggagaagagcgacacccagaaggacagccagaaggccgtggacaagggccagggcgcccagagactggagggcgacgtggtgagcggcaccgagagcctgttcaagacccacatgtgccccgagtgcaagagatgcttcaagaagagaacccacctggtggagcacctgcacctgcacttccccgaccccagcctgcagtgccccaactgccagaagttcttcaccagcaagagcaagctgaagacccacctgctgagagagctgggcgagaaggcccaccactgccccctgtgccactacagcgccgtggagagaaacgccctgaacagacacatggccagcatgcacgaggacatcagcaacttctacagcgacacctacgcctgccccgtgtgcagagaggagttcagactgagccaggccctgaaggagcacctgaagagccacaccgccgccgccgccgccgagcccctgcccctgagatgcttccaggagggctgcagctacgccgcccccgacagaaaggccttcatcaagcacctgaaggagacccacggcgtgagagccgtggagtgcagacaccacagctgccccatgctgttcgccaccgccgaggccatggaggcccaccacaagagccactacgccttccactgcccccactgcgacttcgcctgcagcaacaagcacctgttcagaaagcacaagaagcagggccaccccggcagcgaggagctgagatgcaccttctgccccttcgccaccttcaaccccgtggcctaccaggaccacgtgggcaagatgcacgcccacgagaagatccaccagtgccccgagtgcaacttcgccaccgcccacaagagagtgctgatcagacacatgctgctgcacaccggcgagaagccccacaagtgcgagctgtgcgacttcacctgcagagacgtgagctacctgagcaagcacatgctgacccacagcaacaccaaggactacatgtgcaccgagtgcggctacgtgaccaagtggaagcactacctgagagtgcacatgagaaagcacgccggcgacctgagataccagtgcaaccagtgcagctacagatgccacagagccgaccagctgagcagccacaagctgagacaccagggcaagagcctgatgtgcgaggtgtgcgccttcgcctgcaagagaaagtacgagctgcagaagcacatggccagccagcaccaccccggcacccccgcccccctgtacccctgccactactgcagctaccagagcagacacaagcaggccgtgctgagccacgagaactgcaagcacaccagactgagagagttccactgcgccctgtgcgactacagaaccttcagcaacaccaccctgctgttccacaagagaaaggcccacggctacgtgcccggcgaccaggcctggcagctgagatacgccagccaggagcccgagggcgccatgcagggccccacccccccccccgacagcgagcccagcaaccagctgagcgccagacccgagggccccggccacgagcccggcaccgtggtggaccccagcctggaccaggccctgcccgagatgagcgaggaggtgaacaccggcagacaggagggcagcgaggccccccacggcggcgacctgggcggcagccccagccccgccgaggtggaggagggcagctgcaccctgcacctggaggccctgggcgtggagctggagagcgtgaccgagccccccctggaggaggtgaccgagaccgcccccatggagttcagacccctgggcctggagggccccgacggcctggagggccccgagctgagcagcttcgagggcatcggcaccagcgacctgagcgccgaggagaaccccctgctggagaagcccgtgagcgagcccagcaccaacccccccagcctggaggaggcccccaacaactgggtgggcaccttcaagaccaccccccccgccgagaccgcccccctgccccccctgcccgagagcgagagcctgctgaaggccctgagaagacaggacaaggagcaggccgaggccctggtgctggagggcagagtgcagatggtggtgatccagggcgagggcagagccttcagatgcccccactgccccttcatcaccagaagagagaaggccctgaacctgcacagcagaaccggctgccagggcagaagagagcccctgctgtgccccgagtgcggcgccagcttcaagcagcagagaggcctgagcacccacctgctgaagaagtgccccgtgctgctgagaaagaacaagggcctgcccagacccgacagccccatccccctgcagcccgtgctgcccggcacccaggccagcgaggacaccgagagcggcaagcccccccccgccagccaggaggccgagctgctgctgcccaaggacgcccccctggagctgcccagagagcccgaggagaccgaggagcccctggccaccgtgagcggcagccccgtgccccccgccggcaacagcctgcccaccgaggcccccaagaagcactgcttcgaccccgtgccccccgccggcaacagcagccccaccgaggcccccaagaagcaccacctggaccccgtgccccccgccggcaacagcagccccaccgaggccctgaagaagcacagattcgagcagggcaagttccactgcaacagctgccccttcctgtgcagcagactgagcagcatcaccagccacgtggccgagggctgcagaggcggcagaggcggcggcggcaagagaggcaccccccagacccagcccgacgtgagccccctgagcaacggcgacagcgccccccccaagaacggcagcaccgagagcagcagcggcgacggcgacaccgtgctggtgcagaagcagaagggcgccagattcagctgccccacctgccccttcagctgccagcaggagagagccctgagaacccaccagatcagaggctgccccctggaggagagcggcgagctgcactgcagcctgtgccccttcaccgcccccgccgccaccgccctgagactgcaccagaagagaagacaccccaccgccgcccccgccagaggccccagaccccacctgcagtgcggcgactgcggcttcacctgcaagcagagcagatgcatgcagcagcacagaagactgaagcacgagggcgtgaagccccaccagtgccccttctgcgacttcagcaccaccagaagatacagactggaggcccaccagagcagacacaccggcatcggcagaatcccctgcagcagctgcccccagaccttcggcaccaacagcaagctgagactgcacagactgagagtgcacgacaagacccccacccacttctgccccctgtgcgactacagcggctacctgagacacgacatcaccagacacgtgaacagctgccaccagggcacccccgccttcgcctgcagccagtgcgaggcccagttcagcagcgagaccgccctgaagcagcacgccctgagaagacaccccgagcccgcccagcccgcccccggcagccccgccgagaccaccgagggccccctgcactgcagcagatgcggcctgctgtgccccagccccgccagcctgagaggccacaccagaaagcagcaccccagactggagtgcggcgcctgccaggaggccttccccagcagactggccctggacgagcacagaagacagcagcacttcagccacagatgccagctgtgcgacttcgccgccagagagagagtgggcctggtgaagcactacctggagcagcacgaggagaccagcgccgccgtggccgccagcgacggcgacggcgacgccggccagccccccctgcactgccccttctgcgacttcacctgcagacaccagctggtgctggaccaccacgtgaagggccacggcggcaccagactgtacaagtgcaccgactgcgcctacagcaccaagaacagacagaagatcacctggcacagcagaatccacaccggcgagaagccctaccactgccacctgtgcccctacgcctgcgccgaccccagcagactgaagtaccacatgagaatccacaaggaggagagaaagtacctgtgccccgagtgcggctacaagtgcaagtgggtgaaccagctgaagtaccacatgaccaagcacaccggcctgaagccctaccagtgccccgagtgcgagtactgcaccaacagagccgacgccctgagagtgcaccaggagaccagacacagagaggccagagccttcatgtgcgagcagtgcggcaaggccttcaagaccagattcctgctgagaacccacctgagaaagcacagcgaggccaagccctacgtgtgcaacgtgtgccacagagccttcagatgggccgccggcctgagacaccacgccctgacccacaccgacagacaccccttcttctgcagactgtgcaactacaaggccaagcagaagttccaggtggtgaagcacgtgagaagacaccaccccgaccaggccgaccccaaccagggcgtgggcaaggaccccaccacccccaccgtgcacctgcacgacgtgcagctggaggaccccagcccccccgcccccgccgccccccacaccggccccgagggctag

SEQ ID NO: 105719 - DNA, 45 bp, synthetic construct
  misc_feature 1..45: note = Description of Artificial Sequence: Synthetic coding sequence
  source 1..45: mol_type = other DNA
atgaccgaccccctgctggacagccagcccgccagcagcacctag

SEQ ID NO: 105720 - DNA, 5064 bp, synthetic construct; identical to SEQ ID NO: 105718
  misc_feature 1..5064: note = Description of Artificial Sequence: Synthetic coding sequence
  source 1..5064: mol_type = other DNA

SEQ ID NO: 105721 - DNA, 81 bp, synthetic construct
  misc_feature 1..81: note = Description of Artificial Sequence: Synthetic coding sequence
  source 1..81: mol_type = other DNA
atgaccgaccccctgctggacagccagcccgccagcagcaccggcgagatggacggcctgtgccccgagctgctgctgtag

SEQ ID NO: 105722 - DNA, 1824 bp, synthetic construct
  misc_feature 1..1824: note = Description of Artificial Sequence: Synthetic coding sequence
  source 1..1824: mol_type = other DNA
atgctgctggcccagatcaacagagacagccagggcatgaccgagttccccggcggcggcatggaggcccagcacgtgaccctgtgcctgaccgaggccgtgaccgtggccgacgccaagctgatcgacggccaggtgatccagctggaggacggcagcgccgcctacgtgcagcacgtgcccatccccaagagcaccggcgacagcctgagactggaggacggccaggccgtgcagctggaggacggcaccaccgccttcatccaccacaccagcaaggacagctacgaccagagcgccctgcaggccgtgcagctggaggacggcaccaccgcctacatccaccacgccgtgcaggtgccccagagcgacaccatcctggccatccaggccgacggcaccgtggccggcctgcacaccggcgacgccaccatcgaccccgacaccatcagcgccctggagcagtacgccgccaaggtgagcatcgacggcagcgagagcgtggccggcaccggcatgatcggcgagaacgagcaggagaagaagatgcagatcgtgctgcagggccacgccaccagagtgaccgccaagagccagcagagcggcgagaaggccttcagatgcgagtacgacggctgcggcaagctgtacaccaccgcccaccacctgaaggtgcacgagagaagccacaccggcgacagaccctaccagtgcgagcacgccggctgcggcaaggccttcgccaccggctacggcctgaagagccacgtgagaacccacaccggcgagaagccctacagatgcagcgaggacaactgcaccaagagcttcaagaccagcggcgacctgcagaagcacatcagaacccacaccggcgagagacccttcaagtgccccttcgagggctgcggcagaagcttcaccaccagcaacatcagaaaggtgcacgtgagaacccacaccggcgagagaccctactactgcaccgagcccggctgcggcagagccttcgccagcgccaccaactacaagaaccacgtgagaatccacaccggcgagaagccctacgtgtgcaccgtgcccggctgcgacaagagattcaccgagtacagcagcctgtacaagcaccacgtggtgcacacccacagcaagccctacaactgcaaccactgcggcaagacctacaagcagatcagcaccctggccatgcacaagagaaccgcccacaacgacaccgagcccatcgaggaggagcaggaggccttcttcgagcccccccccggccagggcgaggacgtgctgaagggcagccagatcacctacgtgaccggcgtggagggcgacgacgtggtgagcacccaggtggccaccgtgacccagagcggcctgagccagcaggtgaccctgatcagccaggacggcacccagcacgtgaacatcagccaggccgacatgcaggccatcggcaacaccatcaccatggtgacccaggacggcacccccatcaccgtgcccgcccacgacgccgtgatcagcagcgccggcacccacagcgtggccatggtgaccgccgagggcaccgagggcgagcaggtggccatcgtggcccaggacctggccgccttccacaccgccagcagcgagatgggccaccagcagcacagccaccacctggtgaccaccgagaccagacccctgaccctggtggccaccagcaacggcacccagatcgccgtgcagctgggcgagcagcccagcctggaggaggccatcagaatcgccagcagaatccagcagggcgagacccccggcctggacgactag

SEQ ID NO: 105723 - DNA, 1917 bp, synthetic construct
  misc_feature 1..1917: note = Description of Artificial Sequence: Synthetic coding sequence
  source 1..1917: mol_type = other DNA
atgctgctggcccagatcaacagagacagccagggcatgaccgagttccccggcggcggcatggaggcccagcacgtgaccctgtgcctgaccgaggccgtgaccgtggccgacggcgacaacctggagaacatggagggcgtgagcctgcaggccgtgaccctggccgacggcagcaccgcctacatccagcacaacagcaaggacgccaagctgatcgacggccaggtgatccagctggaggacggcagcgccgcctacgtgcagcacgtgcccatccccaagagcaccggcgacagcctgagactggaggacggccaggccgtgcagctggaggacggcaccaccgccttcatccaccacaccagcaaggacagctacgaccagagcgccctgcaggccgtgcagctggaggacggcaccaccgcctacatccaccacgccgtgcaggtgccccagagcgacaccatcctggccatccaggccgacggcaccgtggccggcctgcacaccggcgacgccaccatcgaccccgacaccatcagcgccctggagcagtacgccgccaaggtgagcatcgacggcagcgagagcgtggccggcaccggcatgatcggcgagaacgagcaggagaagaagatgcagatcgtgctgcagggccacgccaccagagtgaccgccaagagccagcagagcggcgagaaggccttcagatgcgagtacgacggctgcggcaagctgtacaccaccgcccaccacctgaaggtgcacgagagaagccacaccggcgacagaccctaccagtgcgagcacgccggctgcggcaaggccttcgccaccggctacggcctgaagagccacgtgagaacccacaccggcgagaagccctacagatgcagcgaggacaactgcaccaagagcttcaagaccagcggcgacctgcagaagcacatcagaacccacaccggcgagagacccttcaagtgccccttcgagggctgcggcagaagcttcaccaccagcaacatcagaaaggtgcacgtgagaacccacaccggcgagagaccctactactgcaccgagcccggctgcggcagagccttcgccagcgccaccaactacaagaaccacgtgagaatccacaccggcgagaagccctacgtgtgcaccgtgcccggctgcgacaagagattcaccgagtacagcagcctgtacaagcaccacgtggtgcacacccacagcaagccctacaactgcaaccactgcggcaagacctacaagcagatcagcaccctggccatgcacaagagaaccgcccacaacgacaccgagcccatcgaggaggagcaggaggccttcttcgagcccccccccggccagggcgaggacgtgctgaagggcagccagatcacctacgtgaccggcgtggagggcgacgacgtggtgagcacccaggtggccaccgtgacccagagcggcctgagccagcaggtgaccctgatcagccaggacggcacccagcacgtgaacatcagccaggccgacatgcaggccatcggcaacaccatcaccatggtgacccaggacggcacccccatcaccgtgcccgcccacgacgccgtgatcagcagcgccggcacccacagcgtggccatggtgaccgccgagggcaccgagggcgagcaggtggccatcgtggcccaggacctggccgccttccacaccgccagcagcgagatgggccaccagcagcacagccaccacctggtgaccaccgagaccagacccctgaccctggtggccaccagcaacggcacccagatcgccgtgcagctgggcgagcagcccagcctggaggaggccatcagaatcgccagcagaatccagcagggcgagacccccggcctggacgactag

SEQ ID NO: 105724 - DNA, 429 bp, synthetic construct
  misc_feature 1..429: note = Description of Artificial Sequence: Synthetic coding sequence
  source 1..429: mol_type = other DNA
atgctgctggcccagatcaacagagacagccagggcatgaccgagttccccggcggcggcatggaggcccagcacgtgaccctgtgcctgaccgaggccgtgaccgtggccgacggcgacaacctggagaacatggagggcgtgagcctgcaggccgtgaccctggccgacggcagcaccgcctacatccagcacaacagcaaggacgccaagctgatcgacggccaggtgatccagctggaggacggcagcgccgcctacgtgcagcacgtgcccatccccaagagcagagacagcctgagactggaggacggccaggccgtgcagctggaggacggcaccaccgccttcatccaccacaccagcaaggacagctacgaccagagcgccctgcaggccgtgcagctggaggacggcaccaccgcctag

SEQ ID NO: 105725 - DNA, 255 bp, synthetic construct
  misc_feature 1..255: note = Description of Artificial Sequence: Synthetic coding sequence
  source 1..255: mol_type = other DNA
atgctgctggcccagatcaacagagacagccagggcatgaccgagttccccggcggcggcatggaggcccagcacgtgaccctgtgcctgaccgaggccgtgaccgtggccgacggcgacaacctggagaacatggagggcgtgagcctgcaggccgtgaccctggccgacggcagcaccgcctacatccagcacaacagcaaggacgccaagctgatcgacggccaggtgatccagctggaggacggcagctag

SEQ ID NO: 105726 - DNA, 222 bp, synthetic construct
  misc_feature 1..222: note = Description of Artificial Sequence: Synthetic coding sequence
  source 1..222: mol_type = other DNA
atgctgctggcccagatcaacagagacagccagggcatgaccgagttccccggcggcggcatggaggcccagcacgtgaccctgtgcctgaccgaggccgtgaccgtggccgacggcgacaacctggagaacatggagggcgtgagcctgcaggccgtgaccctggccgacggcagcaccgcctacatccagcacaacagcaaggacgccaagctgatctag

SEQ ID NO: 105727 - DNA, 573 bp, synthetic construct
  misc_feature 1..573: note = Description of Artificial Sequence: Synthetic coding sequence
  source 1..573: mol_type = other DNA
atgctgctggcccagatcaacagagacagccagggcatgaccgagttccccggcggcggcatggaggcccagcacgtgaccctgtgcctgaccgaggccgtgaccgtggccgacggcgacaacctggagaacatggagggcgtgagcctgcaggccgtgaccctggccgacggcagcaccgcctacatccagcacaacagcaaggacgccaagctgatcgacggccaggtgatccagctggaggacggcagcgccgcctacgtgcagcacgtgcccatccccaagagcaccggcgacagcctgagactggaggacggccaggccgtgcagctggaggacggcaccaccgccttcatccaccacaccagcaaggacagctacgaccagagcgccctgcaggccgtgcagctggaggacggcaccaccgcctacatccaccacgccgtgcaggtgccccagagcgacaccatcctggccatccaggccgacggcaccgtggccggcctgcacaccggcgacgccaccatcgaccccgacaccatcagcgccctggagcagtacgccgccaagtag

SEQ ID NO: 105728 - DNA, 411 bp, synthetic construct
  misc_feature 1..411: note = Description of Artificial Sequence: Synthetic coding sequence
  source 1..411: mol_type = other DNA
atgctgctggcccagatcaacagagacagccagggcatgaccgagttccccggcggcggcatggaggcccagcacgtgaccctgtgcctgaccgaggccgtgaccgtggccgacggcgacaacctggagaacatggagggcgtgagcctgcaggccgtgaccctggccgacggcagcaccgcctacatccagcacaacagcaaggacgccaagctgatcgacggccaggtgatccagctggaggacggcagcgccgcctacgtgcagcacgtgcccatccccaagagcaccggcgacagcctgagactggaggacggccaggccgtgcagctggaggacggcaccaccgccttcatccaccacaccagcaaggacagctacgaccagagcgccctgcaggccgtgcagtag

SEQ ID NO: 105729 - DNA, 528 bp, synthetic construct
  misc_feature 1..528: note = Description of Artificial Sequence: Synthetic coding sequence
  source 1..528: mol_type = other DNA
atgctgctggcccagatcaacagagacagccagggcatgaccgagttccccggcggcggcatggaggcccagcacgtgaccctgtgcctgaccgaggccgtgaccgtggccgacggcgacaacctggagaacatggagggcgtgagcctgcaggccgtgaccctggccgacggcagcaccgcctacatccagcacaacagcaaggacgccaagctgatcgacggccaggtgatccagctggaggacggcagcgccgcctacgtgcagcacgtgcccatccccaagagcaccggcgacagcctgagactggaggacggccaggccgtgcagctggaggacggcaccaccgccttcatccaccacaccagcaaggacagctacgaccagagcgccctgcaggccgtgcagctggaggacggcaccaccgcctacatccaccacgccgtgcaggtgccccagagcgacaccatcctggccatccaggccgacggcaccgtggccggcctgcacaccggcgacgccacctag

SEQ ID NO: 105730 - DNA, 879 bp, synthetic construct
  misc_feature 1..879: note = Description of Artificial Sequence: Synthetic coding sequence
  source 1..879: mol_type = other DNA
atgagccacctgagccagcagagaatctacagcggcgagaaccccttcgcctgcaaggtgtgcggcaaggtgttcagccacaagagcaacctgaccgagcacgagcacttccacaccagagagaagcccttcgagtgcaacgagtgcggcaaggccttcagccagaagcagtacgtgatcaagcaccagaacacccacaccggcgagaagctgttcgagtgcaacgagtgcggcaagagcttcagccagaaggagaacctgctgacccaccagaagatccacaccggcgagaagcccttcgagtgcaaggactgcggcaaggccttcatccagaagagcaacctgatcagacaccagagaacccacaccggcgagaagcccttcgtgtgcaaggagtgcggcaagaccttcagcggcaagagcaacctgaccgagcacgagaagatccacatcggcgagaagcccttcaagtgcagcgagtgcggcaccgccttcggccagaagaagtacctgatcaagcaccagaacatccacaccggcgagaagccctacgagtgcaacgagtgcggcaaggccttcagccagagaaccagcctgatcgtgcacgtgagaatccacagcggcgacaagccctacgagtgcaacgtgtgcggcaaggccttcagccagagcagcagcctgaccgtgcacgtgagaagccacaccggcgagaagccctacggctgcaacgagtgcggcaaggccttcagccagttcagcaccctggccctgcacctgagaatccacaccggcaagaagccctaccagtgcagcgagtgcggcaaggccttcagccagaagagccaccacatcagacaccagaagatccacacccactag

SEQ ID NO: 105731 - DNA, 879 bp, synthetic construct; identical to SEQ ID NO: 105730
  misc_feature 1..879: note = Description of Artificial Sequence: Synthetic coding sequence
  source 1..879: mol_type = other DNA

SEQ ID NO: 105732 - DNA, 2385 bp, synthetic construct
  misc_feature 1..2385: note = Description of Artificial Sequence: Synthetic coding sequence
  source 1..2385: mol_type = other DNA
atgaacatcgacgacaagctggagggcctgttcctgaagtgcggcggcatcgacgagatgcagagcagcagaaccatggtggtgatgggcggcgtgagcggccagagcaccgtgagcggcgagctgcaggacagcgtgctgcaggacagaagcatgccccaccaggagatcctggccgccgacgaggtgctgcaggagagcgagatgagacagcaggacatgatcagccacgacgagctgatggtgcacgaggagaccgtgaagaacgacgaggagcagatggagacccacgagagactgccccagggcctgcagtacgccctgaacgtgcccatcagcgtgaagcaggagatcaccttcaccgacgtgagcgagcagctgatgagagacaagaagcagatcagagagcccgtggacctgcagaagaagaagaagagaaagcagagaagccccgccaagatcctgaccatcaacgaggacggcagcctgggcctgaagacccccaagagccacgtgtgcgagcactgcaacgccgccttcagaaccaactaccacctgcagagacacgtgttcatccacaccggcgagaagcccttccagtgcagccagtgcgacatgagattcatccagaagtacctgctgcagagacacgagaagatccacaccggcgagaagcccttcagatgcgacgagtgcggcatgagattcatccagaagtaccacatggagagacacaagagaacccacagcggcgagaagccctaccagtgcgagtactgcctgcagtacttcagcagaaccgacagagtgctgaagcacaagagaatgtgccacgagaaccacgacaagaagctgaacagatgcgccatcaagggcggcctgctgaccagcgaggaggacagcggcttcagcaccagccccaaggacaacagcctgcccaagaagaagagacagaagaccgagaagaagagcagcggcatggacaaggagagcgccctggacaagagcgacctgaagaaggacaagaacgactacctgcccctgtacagcagcagcaccaaggtgaaggacgagtacatggtggccgagtacgccgtggagatgccccacagcagcgtgggcggcagccacctggaggacgccagcggcgagatccacccccccaagctggtgctgaagaagatcaacagcaagagaagcctgaagcagcccctggagcagaaccagaccatcagccccctgagcacctacgaggagagcaaggtgagcaagtacgccttcgagctggtggacaagcaggccctgctggacagcgagggcaacgccgacatcgaccaggtggacaacctgcaggagggccccagcaagcccgtgcacagcagcaccaactacgacgacgccatgcagttcctgaagaagaagagatacctgcaggccgccagcaacaacagcagagagtacgccctgaacgtgggcaccatcgccagccagcccagcgtgacccaggccgccgtggccagcgtgatcgacgagagcaccaccgccagcatcctggagagccaggccctgaacgtggagatcaagagcaaccacgacaagaacgtgatccccgacgaggtgctgcagaccctgctggaccactacagccacaaggccaacggccagcacgagatcagcttcagcgtggccgacaccgaggtgaccagcagcatcagcatcaacagcagcgaggtgcccgaggtgacccccagcgagaacgtgggcagcagcagccaggccagcagcagcgacaaggccaacatgctgcaggagtacagcaagttcctgcagcaggccctggacagaaccagccagaacgacgcctacctgaacagccccagcctgaacttcgtgaccgacaaccagaccctgcccaaccagcccgccttcagcagcatcgacaagcaggtgtacgccaccatgcccatcaacagcttcagaagcggcatgaacagccccctgagaaccacccccgacaagagccacttcggcctgatcgtgggcgacagccagcacagcttccccttcagcggcgacgagaccaaccacgccagcgccaccagcacccaggacttcctggaccaggtgaccagccagaagaaggccgaggcccagcccgtgcaccaggcctaccagatgagcagcttcgagcagcccttcagagccccctaccacggcagcagagccggcatcgccacccagttcagcaccgccaacggccaggtgaacctgagaggccccggcaccagcgccgagttcagcgagttccccctggtgaacgtgaacgacaacagagccggcatgaccagcagccccgacgccaccaccggccagaccttcggctag

SEQ ID NO: 105733 - DNA, 252 bp, synthetic construct
  misc_feature 1..252: note = Description of Artificial Sequence: Synthetic coding sequence
  source 1..252: mol_type = other DNA
atgaacatcgacgacaagctggagggcctgttcctgaagtgcggcggcatcgacgagatgcagagcagcagaaccatggtggtgatgggcggcgtgagcggccagagcaccgtgagcggcgagctgcaggacagcgtgctgcaggacagaagcatgccccaccaggagatcctggccgccgacgaggtgctgcaggagagcgagatgagacagcaggacatgatcagccacgacgagctgatggtgcactag

SEQ ID NO: 105734 - DNA, 435 bp, synthetic construct
  misc_feature 1..435: note = Description of Artificial Sequence: Synthetic coding sequence
  source 1..435: mol_type = other DNA
atgaagggcgagaagcccttccagtgcagccagtgcgacatgagattcatccagaagtacctgctgcagagacacgagaagatccacaccggcgagaagcccttcagatgcgacgagtgcggcgacgagaccaaccacgccagcgccaccagcacccaggacttcctggaccaggtgaccagccagaagaaggccgaggcccagcccgtgcaccaggcctaccagatgagcagcttcgagcagcccttcagagccccctaccacggcagcagagccggcatcgccacccagttcagcaccgccaacggccaggtgaacctgagaggccccggcaccagcgccgagttcagcgagttccccctggtgaacgtgaacgacaacagagccggcatgaccagcagccccgacgccaccaccggccagaccttcggctag

SEQ ID NO: 105735 - DNA, 78 bp, synthetic construct
  misc_feature 1..78: note = Description of Artificial Sequence: Synthetic coding sequence
  source 1..78: mol_type = other DNA
atgaacatcgacgacaagctggagggcctgttcctgaagtgcggcggcatcgacgagatgcagagcagcagaacctag

SEQ ID NO: 105736 - DNA, 2385 bp, synthetic construct; identical to SEQ ID NO: 105732
  misc_feature 1..2385: note = Description of Artificial Sequence: Synthetic coding sequence
  source 1..2385: mol_type = other DNA

SEQ ID NO: 105737 - DNA, 2385 bp, synthetic construct; identical to SEQ ID NO: 105732
  misc_feature 1..2385: note = Description of Artificial Sequence: Synthetic coding sequence
  source 1..2385: mol_type = other DNA

SEQ ID NO: 105738 - DNA, 2385 bp, synthetic construct; identical to SEQ ID NO: 105732
  misc_feature 1..2385: note = Description of Artificial Sequence: Synthetic coding sequence
  source 1..2385: mol_type = other DNA

SEQ ID NO: 105739 - DNA, 228 bp, synthetic construct
  misc_feature 1..228: note = Description of Artificial Sequence: Synthetic coding sequence
  source 1..228: mol_type = other DNA
atgaacatcgacgacaagctggagggcctgttcctgaagtgcggcggcatcgacgagatgcagagcagcagaaccatggtggtgatgggcggcgtgagcggccagagcaccgtgagcggcgagctgcaggacagcgtgctgcaggacagaagcatgccccaccaggagatcctggccgccgacgaggtgctgcaggagagcgagatgagacagcaggacatgatctag

SEQ ID NO: 105740 - DNA, 1365 bp, synthetic construct
  misc_feature 1..1365: note = Description of Artificial Sequence: Synthetic coding sequence
  source 1..1365: mol_type = other DNA
atgaacatcgacgacaagctggagggcctgttcctgaagtgcggcggcatcgacgagatgcagagcagcagaaccatggtggtgatgggcggcgtgagcggccagagcaccgtgagcggcgagctgcaggacagcgtgctgcaggacagaagcatgccccaccaggagatcctggccgccgacgaggtgctgcaggagagcgagatgagacagcaggacatgatcagccacgacgagctgatggtgcacgaggagaccgtgaagaacgacgaggagcagatggagacccacgagagactgccccagggcctgcagtacgccctgaacgtgcccatcagcgtgaagcaggagatcaccttcaccgacgtgagcgagcagctgatgagagacaagaagcagatcagagagcccgtggacctgcagaagaagaagaagagaaagcagagaagccccgccaagatcctgaccatcaacgaggacggcagcctgggcctgaagacccccaagagccacgtgtgcgagcactgcaacgccgccttcagaaccaactaccacctgcagagacacgtgttcatccacaccggcgagaagcccttccagtgcagccagtgcgacatgagattcatccagaagtacctgctgcagagacacgagaagatccacaccggcgagaagcccttcagatgcgacgagtgcggcatgagattcatccagaagtaccacatggagagacacaagagaacccacagcggcgagaagccctaccagtgcgagtactgcctgcagtacttcagcagaaccgacagagtgctgaagcacaagagaatgtgccacgagaaccacgacaagaagctgaacagatgcgccatcaagggcggcctgctgaccagcgaggaggacagcggcttcagcaccagccccaaggacaacagcctgcccaagaagaagagacagaagaccgagaagaagagcagcggcatggacaaggagagcgccctggacaagagcgacctgaagaaggacaagaacgactacctgcccctgtacagcagcagcaccaaggtgaaggacgagtacatggtggccgagtacgccgtggagatgccccacagcagcgtgggcggcagccacctggaggacgccagcggcgagatccacccccccaagctggtgctgaagaagatcaacagcaagagaagcctgaagcagcccctggagcagaaccagaccatcagccccctgagcacctacgaggagagcaagttccagagcatgctgctgaacctgtggatcaacagactgtactggacccagaaggccatgctgaccctgatcagactgatcatctgcagaagagcccagtag

SEQ ID NO: 105741 - DNA, 396 bp, synthetic construct
  misc_feature 1..396: note = Description of Artificial Sequence: Synthetic coding sequence
  source 1..396: mol_type = other DNA
atgagattcatccagaagtacctgctgcagagacacgagaagatccacaccggcgagaagcccttcagatgcgacgagtgcggcgacgagaccaaccacgccagcgccaccagcacccaggacttcctggaccaggtgaccagccagaagaaggccgaggcccagcccgtgcaccaggcctaccagatgagcagcttcgagcagcccttcagagccccctaccacggcagcagagccggcatcgccacccagttcagcaccgccaacggccaggtgaacctgagaggccccggcaccagcgccgagttcagcgagttccccctggtgaacgtgaacgacaacagagccggcatgaccagcagccccgacgccaccaccggccagaccttcggctag

SEQ ID NO: 105742 - DNA, 432 bp, synthetic construct
  misc_feature 1..432: note = Description of Artificial Sequence: Synthetic coding sequence
  source 1..432: mol_type = other DNA
aagacccactacaactgcggcgagcacaccaaggccttcagcggcaagcacaccctggtgcagcagcagagaaccctgaccaccgagagatgctacatctgcagcgagtgcggcaagagcttcagcaacaagagcaacctgatcaagcacagaagagtgcacaccggcgagagaccctacgagtgcagcgagtgcggcaagagcttcagccagagaagcgccctgctgcagcacagaggcgtgcacaccggcgagagaccctacgagtgcagcgagtgcggcaagttcttcacctaccacagcagcctgatcaagcaccagaaggtgcacagcggcagcagaccctacgagtgcagcgagtgcggcaagagcttcagccagaacagcagcctgatcgagcaccacagagtgcacaccggcgagagaccctag

SEQ ID NO: 105743 - DNA, 1314 bp, synthetic construct
  misc_feature 1..1314: note = Description of Artificial Sequence: Synthetic coding sequence
  source 1..1314: mol_type = other DNA
atggccgccgccaccctgagaacccccacccagggcaccgtgaccttcgaggacgtggccgtgcacttcagctgggaggagtggggcctgctggacgaggcccagagatgcctgtacagagacgtgatgctggagaacctggccctgctgaccagcctggacgtgcaccaccagaagcagcacctgggcgagaagcacttcagaagcaacgtgggcagagccctgttcgtgaagacctgcaccttccacgtgagcggcgagcccagcacctgcagagaggtgggcaaggacttcctggccaagctgggcttcctgcaccagcaggccgcccacaccggcgagcagagcaacagcaagagcgacggcggcgccatcagccacagaggcaagacccactacaactgcggcgagcacaccaaggccttcagcggcaagcacaccctggtgcagcagcagagaaccctgaccaccgagagatgctacatctgcagcgagtgcggcaagagcttcagcaagagctacagcctgaacgaccactggagactgcacaccggcgagaagccctacgagtgcagagagtgcggcaagagcttcagacagagcagcagcctgatccagcacagaagagtgcacaccgccgtgagaccccacgagtgcgacgagtgcggcaagctgttcagcaacaagagcaacctgatcaagcacagaagagtgcacaccggcgagagaccctacgagtgcagcgagtgcggcaagagcttcagccagagaagcgccctgctgcagcacagaggcgtgcacaccggcgagagaccctacgagtgcagcgagtgcggcaagttcttcacctaccacagcagcctgatcaagcaccagaaggtgcacagcggcagcagaccctacgagtgcagcgagtgcggcaagagcttcagccagaacagcagcctgatcgagcaccacagagtgcacaccggcgagagaccctacaagtgcagcgagtgcggcaagagcttcagccagagaagcgccctgctgcagcacagaggcgtgcacaccggcgagagaccctacgagtgcagcgagtgcggcaagttcttcccctacagcagcagcctgagaaagcaccagagagtgcacaccggcagcagaccctacgagtgcagcgagtgcggcaagagcttcacccagaacagcggcctgatcaagcacagaagagtgcacaccggcgagaagccctacgagtgcaccgagtgcggcaagagcttcagccacaacagcagcctgatcaagcaccagagaatccacagcagatag

SEQ ID NO: 105744 - DNA, 1314 bp, synthetic construct; identical to SEQ ID NO: 105743
  misc_feature 1..1314: note = Description of Artificial Sequence: Synthetic coding sequence
  source 1..1314: mol_type = other DNA

SEQ ID NO: 105745 - DNA, 1617 bp, synthetic construct
  misc_feature 1..1617: note = Description of Artificial Sequence: Synthetic coding sequence
  source 1..1617: mol_type = other DNA
atgaccaccttcaaggaggccgtgaccttcaaggacgtggccgtggtgttcaccgaggaggagctgggcctgctggaccccgcccagagaaagctgtacagagacgtgatgctggagaacttcagaaacctgctgagcgtgggccaccagcccttccaccaggacacctgccacttcctgagagaggagaagttctggatgatgggcaccgccacccagagagagggcaacagcggcggcaagatccagaccgagctggagagcgtgcccgaggccggcgcccacgaggagtggagctgccagcagatctgggagcagatcgccaaggacctgaccagaagccaggacagcatcatcaacaacagccagttcttcgagaacggcgacgtgcccagccaggtggaggccggcctgcccaccatccacaccggccagaagcccagccagggcggcaagtgcaagcagagcatcagcgacgtgcccatcttcgacctgccccagcagctgtacagcgaggagaagagctacacctgcgacgagtgcggcaagagcatctgctacatcagcgccctgcacgtgcaccagagagtgcacgtgggcgagaagctgttcatgtgcgacgtgtgcggcaaggagttcagccagagcagccacctgcagacccaccagagagtgcacaccggcgagaagcccttcaagtgcgagcagtgcggcaagggcttcagcagaagaagcgccctgaacgtgcacagaaagctgcacaccggcgagaagccctacatctgcgaggcctgcggcaaggccttcatccacgacagccagctgaaggagcacaagagaatccacaccggcgagaagcccttcaagtgcgacatctgcggcaagaccttctacttcagaagcagactgaagagccacagcatggtgcacaccggcgagaagcccttcagatgcgacacctgcgacaagagcttccaccagagaagcgccctgaacagacactgcatggtgcacaccggcgagaagccctacagatgcgagcagtgcggcaagggcttcatcggcagactggacttctacaagcaccaggtggtgcacaccggcgagaagccctacaactgcaaggagtgcggcaagagcttcagatggagcagctgcctgctgaaccaccagagagtgcacagcggcgagaagagcttcaagtgcgaggagtgcggcaagggcttctacaccaacagccagctgagcagccaccagagaagccacagcggcgagaagccctacaagtgcgaggagtgcggcaagggctacgtgaccaagttcaacctggacctgcaccagagagtgcacaccggcgagagaccctacaactgcaaggagtgcggcaagaacttcagcagagccagcagcatcctgaaccacaagagactgcactgccagaagaagcccttcaagtgcgaggactgcggcaagagactggtgcacagaacctacagaaaggaccagcccagagactacagcggcgagaaccccagcaagtgcgaggactgcggcagaagatacaagagaagactgaacctggacatcctgctgagcctgttcctgaacgacacctag

SEQ ID NO: 105746 - DNA, 1650 bp, synthetic construct
  misc_feature 1..1650: note = Description of Artificial Sequence: Synthetic coding sequence
  source 1..1650: mol_type = other DNA
atgatcaagagaagcaaggtgctggtgttctgcagcaagatcatggaggaggccgtgaccttcaaggacgtggccgtggtgttcaccgaggaggagctgggcctgctggaccccgcccagagaaagctgtacagagacgtgatgctggagaacttcagaaacctgctgagcgtgggccaccagcccttccaccaggacacctgccacttcctgagagaggagaagttctggatgatgggcaccgccacccagagagagggcaacagcggcggcaagatccagaccgagctggagagcgtgcccgaggccggcgcccacgaggagtggagctgccagcagatctgggagcagatcgccaaggacctgaccagaagccaggacagcatcatcaacaacagccagttcttcgagaacggcgacgtgcccagccaggtggaggccggcctgcccaccatccacaccggccagaagcccagccagggcggcaagtgcaagcagagcatcagcgacgtgcccatcttcgacctgccccagcagctgtacagcgaggagaagagctacacctgcgacgagtgcggcaagagcatctgctacatcagcgccctgcacgtgcaccagagagtgcacgtgggcgagaagctgttcatgtgcgacgtgtgcggcaaggagttcagccagagcagccacctgcagacccaccagagagtgcacaccggcgagaagcccttcaagtgcgagcagtgcggcaagggcttcagcagaagaagcgccctgaacgtgcacagaaagctgcacaccggcgagaagccctacatctgcgaggcctgcggcaaggccttcatccacgacagccagctgaaggagcacaagagaatccacaccggcgagaagcccttcaagtgcgacatctgcggcaagaccttctacttcagaagcagactgaagagccacagcatggtgcacaccggcgagaagcccttcagatgcgacacctgcgacaagagcttccaccagagaagcgccctgaacagacactgcatggtgcacaccggcgagaagccctacagatgcgagcagtgcggcaagggcttcatcggcagactggacttctacaagcaccaggtggtgcacaccggcgagaagccctacaactgcaaggagtgcggcaagagcttcagatggagcagctgcctgctgaaccaccagagagtgcacagcggcgagaagagcttcaagtgcgaggagtgcggcaagggcttctacaccaacagccagctgagcagccaccagagaagccacagcggcgagaagccctacaagtgcgaggagtgcggcaagggctacgtgaccaagttcaacctggacctgcaccagagagtgcacaccggcgagagaccctacaactgcaaggagtgcggcaagaacttcagcagagccagcagcatcctgaaccacaagagactgcactgccagaagaagcccttcaagtgcgaggactgcggcaagagactggtgcacagaacctacagaaaggaccagcccagagactacagcggcgagaaccccagcaagtgcgaggactgcggcagaagatacaagagaagactgaacctggacatcctgctgagcctgttcctgaacgacacctag

SEQ ID NO: 105747 - DNA, 693 bp, synthetic construct
  misc_feature 1..693: note = Description of Artificial Sequence: Synthetic coding sequence
  source 1..693: mol_type = other DNA
atggtgatgagcccccccagactgaagcaggactacccccagttcatccaggacagaaacctgcccagagtgggcagcgtgaacagccccagcgtgatgttccccagcctgatcttcctgagcagctacacccagaagagaagcctgatccacgtgatgagcgtggagaaggccagcgtgaccagccagctgttcatgttcatcagagagagcacctgggagagaaacagcctgtgcgtgatgtgcgtggccagaaacctggtgaaggcccacatctgcaagctgatcagagagagcaccctggagagaaaccacagcaacgtgagcaacgtgggcaaggtgagcgtggtggaccagcacctgatgttcatcgtgaactacacccaggagagaaacctgaccttcgtgagacacgtgggcagacccagcttcatgatccccagcctgagaaacatcagagagagcatcctgggcagaaaccacagcaacgtgatctacgtggtgagacccagcatcctgggccaggacctgagagccatcccctggttcacccaggagaagaaccacctgggcgtgatccacgtgatcagagccttcatcagagaccagcacctgatcggcatcgcctggagcacccaggagagaaacagaaccgacgtgagcagcgtggagaaggccctgctggtgggctag

SEQ ID NO: 105748 - DNA, 1521 bp, synthetic construct
  misc_feature 1..1521: note = Description of Artificial Sequence: Synthetic coding sequence
  source 1..1521: mol_type = other DNA
atgcccgccaacggcaccagcccccagagattccccgccctgatccccggcgagcccggcagaagcttcgagggcagcgtgagcttcgaggacgtggccgtggacttcaccagacaggagtggcacagactggaccccgcccagagaaccatgcacaaggacgtgatgctggagacctacagcaacctggccagcgtgggcctgtgcgtggccaagcccgagatgatcttcaagctggagagaggcgaggagctgtggatcctggaggaggagagcagcggccacggctacagcggcagcctgagcctgctgtgcggcaacggcagcgtgggcgacaacgccctgagacacgacaacgacctgctgcaccaccagaagatccagaccctggaccagaacgtggagtacaacggctgcagaaaggccttccacgagaagaccggcttcgtgagaagaaagagaacccccagaggcgacaagaacttcgagtgccacgagtgcggcaaggcctactgcagaaagagcaacctggtggagcacctgagaatccacaccggcgagagaccctacgagtgcggcgagtgcgccaagaccttcagcgccagaagctacctgatcgcccaccagaagacccacaccggcgagagacccttcgagtgcaacgagtgcggcaagagcttcggcagaaagagccagctgatcctgcacaccagaacccacaccggcgagagaccctacgagtgcaccgagtgcggcaagaccttcagcgagaaggccaccctgaccatccaccagagaacccacaccggcgagaagccctacgagtgcagcgagtgcggcaagaccttcagagtgaagatcagcctgacccagcaccacagaacccacaccggcgagaagccctacgagtgcggcgagtgcggcaagaacttcagagccaagaagagcctgaaccagcaccagagaatccacaccggcgagaagccctacgagtgcggcgagtgcggcaagttcttcagaatgaagatgaccctgaacaaccaccagagaacccacaccggcgagaagccctaccagtgcaacgagtgcggcaagagcttcagagtgcacagcagcctgggcatccaccagagaatccacaccggcgagaagccctacgagtgcaacgagtgcggcaacgccttctacgtgaaggccagactgatcgagcaccagagaatgcacagcggcgagaagccctacgagtgcagcgagtgcggcaagatcttcagcatgaagaagagcctgtgccagcacagaagaacccacaccggcgagaagccctacgagtgcagcgagtgcggcaacgccttctacgtgaaggtgagactgatcgagcaccagagaatccacaccggcgagagacccttcgagtgccaggagtgcggcaaggccttctgcagaaaggcccacctgaccgagcaccagagaacccacatcggctggagctggagatgcaccatgaagaaggccagccactag

SEQ ID NO: 105749 - DNA, 2049 bp, synthetic construct
  misc_feature 1..2049: note = Description of Artificial Sequence: Synthetic coding sequence
  source 1..2049: mol_type = other DNA
atgcccagcctgagaaccagaagagaggaggccgagatggagctgagcgtgcccggccccagcccctggacccccgccgcccaggccagagtgagagacgcccccgccgtgacccaccccggcagcgccgcctgcggcaccccctgctgcagcgacaccgagctggaggccatctgcccccactaccagcagcccgactgcgacaccagaaccgaggacaaggagttcctgcacaaggaggacatccacgaggacctggagagccaggccgagatcagcgagaactacgccggcgacgtgagccaggtgcccgagctgggcgacctgtgcgacgacgtgagcgagagagactggggcgtgcccgagggcagaagactgccccagagcctgagccaggagggcgacttcacccccgccgccatgggcctgctgagaggccccctgggcgagaaggacctggactgcaacggcttcgacagcagattcagcctgagccccaacctgatggcctgccaggagatccccaccgaggagagaccccacccctacgacatgggcggccagagcttccagcacagcgtggacctgaccggccacgagggcgtgcccaccgccgagagccccctgatctgcaacgagtgcggcaagaccttccagggcaaccccgacctgatccagagacagatcgtgcacaccggcgaggccagcttcatgtgcgacgactgcggcaagaccttcagccagaacagcgtgctgaagaacagacacagaagccacatgagcgagaaggcctaccagtgcagcgagtgcggcaaggccttcagaggccacagcgacttcagcagacaccagagccaccacagcagcgagagaccctacatgtgcaacgagtgcggcaaggccttcagccagaacagcagcctgaagaagcaccagaagagccacatgagcgagaagccctacgagtgcaacgagtgcggcaaggccttcagaagaagcagcaacctgatccagcaccagagaatccacagcggcgagaagccctacgtgtgcagcgagtgcggcaaggccttcagaagaagcagcaacctgatcaagcaccacagaacccacaccggcgagaagcccttcgagtgcggcgagtgcggcaaggccttcagccagagcgcccacctgagaaagcaccagagagtgcacaccggcgagaagccctacgagtgcaacgactgcggcaagcccttcagcagagtgagcaacctgatcaagcaccacagagtgcacaccggcgagaagccctacaagtgcagcgactgcggcaaggccttcagccagagcagcagcctgatccagcacagaagaatccacaccggcgagaagccccacgtgtgcaacgtgtgcggcaaggccttcagctacagcagcgtgctgagaaagcaccagatcatccacaccggcgagaagccctacagatgcagcgtgtgcggcaaggccttcagccacagcagcgccctgatccagcaccagggcgtgcacaccggcgacaagccctacgcctgccacgagtgcggcaagaccttcggcagaagcagcaacctgatcctgcaccagagagtgcacaccggcgagaagccctacgagtgcaccgagtgcggcaagaccttcagccagagcagcaccctgatccagcaccagagaatccacaacggcctgaagccccacgagtgcaaccagtgcggcaaggccttcaacagaagcagcaacctgatccaccaccagaaggtgcacaccggcgagaagccctacacctgcgtggagtgcggcaagggcttcagccagagcagccacctgatccagcaccagatcatccacaccggcgagagaccctacaagtgcagcgagtgcggcaaggccttcagccagagaagcgtgctgatccagcaccagagaatccacaccggcgtgaagccctacgactgcgccgcctgcggcaaggccttcagccagagaagcaagctgatcaagcaccagctgatccacaccagagagtag

SEQ ID NO: 105750 - DNA, 2049 bp, synthetic construct; identical to SEQ ID NO: 105749
  misc_feature 1..2049: note = Description of Artificial Sequence: Synthetic coding sequence
  source 1..2049: mol_type = other DNA

SEQ ID NO: 105751 - DNA, 444 bp, synthetic construct
  misc_feature 1..444: note = Description of Artificial Sequence: Synthetic coding sequence
  source 1..444: mol_type = other DNA
atggccctgacccaggtgagactgaccttcagagacgtggccatcgagttcagccaggaggagtggaagtgcctggaccccgcccagagaatcctgtacagagacgtgatgctggagaactactggaacctggtgagcctgggcctgtgccacttcgacatgaacatcatcagcatgctggaggagggcaaggagccctggaccgtgaagagctgcgtgaagatcgccagaaagcccagaacccccgagtgcgtgaagggcgtggtgaccgacctgctgagaagatggaagcactggctgctgctgctgggcatctgctgccccaagccccacggcagagtgagcagcagactgagactgagcagaagcctgggccacttcttccacagcgccttcgccaccttcatgggcgtgtgcgacaagagagtgggcagcatcttctag

SEQ ID NO: 105752 - DNA, 2457 bp, synthetic construct
  misc_feature 1..2457: note = Description of Artificial Sequence: Synthetic coding sequence
  source 1..2457: mol_type = other DNA
atggccctgacccaggtgagactgaccttcagagacgtggccatcgagttcagccaggaggagtggaagtgcctggaccccgcccagagaatcctgtacagagacgtgatgctggagaactactggaacctggtgagcctgggcctgtgccacttcgacatgaacatcatcagcatgctggaggagggcaaggagccctggaccgtgaagagctgcgtgaagatcgccagaaagcccagaacccccgagtgcgtgaagggcgtggtgaccgacatcccccccaagtgcaccatcaaggacctgctgcccaaggagaagagcagcaccgaggccgtgttccacaccgtggtgctggagagacacgagagccccgacatcgaggacttcagcttcaaggagccccagaagaacgtgcacgacttcgagtgccagtggagagacgacaccggcaactacaagggcgtgctgatggcccagaaggagggcaagagagaccagagagacagaagagacatcgagaacaagctgatgaacaaccagctgggcgtgagcttccacagccacctgcccgagctgcagctgttccagggcgagggcaagatgtacgagtgcaaccaggtggagaagagcaccaacaacggcagcagcgtgagccccctgcagcagatccccagcagcgtgcagacccacagaagcaagaagtaccacgagctgaaccacttcagcctgctgacccagagaagaaaggccaacagctgcggcaagccctacaagtgcaacgagtgcggcaaggccttcacccagaacagcaacctgaccagccacagaagaatccacagcggcgagaagccctacaagtgcagcgagtgcggcaagaccttcaccgtgagaagcaacctgaccatccaccaggtgatccacaccggcgagaagccctacaagtgccacgagtgcggcaaggtgttcagacacaacagctacctggccacccacagaagaatccacaccggcgagaagccctacaagtgcaacgagtgcggcaaggccttcagaggccacagcaacctgaccacccaccagctgatccacaccggcgagaagcccttcaagtgcaacgagtgcggcaagctgttcacccagaacagccacctgatcagccactggagaatccacaccggcgagaagccctacaagtgcaacgagtgcggcaaggccttcagcgtgagaagcagcctggccatccaccagaccatccacaccggcgagaagccctacaagtgcaacgagtgcggcaaggtgttcagatacaacagctacctgggcagacacagaagagtgcacaccggcgagaagccctacaagtgcaacgagtgcggcaaggccttcagcatgcacagcaacctggccacccaccaggtgatccacaccggcaccaagcccttcaagtgcaacgagtgcagcaaggtgttcacccagaacagccagctggccaaccacagaagaatccacaccggcgagaagccctacaagtgcaacgagtgcggcaaggccttcagcgtgagaagcagcctgaccacccaccaggccatccacagcggcgagaagccctacaagtgcatcgagtgcggcaagagcttcacccagaagagccacctgagaagccacagaggcatccacagcggcgagaagccctacaagtgcaacgagtgcggcaaggtgttcgcccagaccagccagctggccagacactggagagtgcacaccggcgagaagccctacaagtgcaacgactgcggcagagccttcagcgacagaagcagcctgaccttccaccaggccatccacaccggcgagaagccctacaagtgccacgagtgcggcaaggtgttcagacacaacagctacctggccacccacagaagaatccacaccggcgagaagccctacaagtgcaacgagtgcggcaaggccttcagcatgcacagcaacctgaccacccacaaggtgatccacaccggcgagaagccctacaagtgcaaccagtgcggcaaggtgttcacccagaacagccacctggccaaccaccagagaacccacaccggcgagaagccctacagatgcaacgagtgcggcaaggccttcagcgtgagaagcagcctgaccacccaccaggccatccacaccggcaagaagccctacaagtgcaacgagtgcggcaaggtgttcacccagaacgcccacctggccaaccacagaagaatccacaccggcgagaagccctacagatgcaccgagtgcggcaaggccttcagagtgagaagcagcctgaccacccacatggccatccacaccggcgagaagagatacaagtgcaacgagtgcggcaaggtgttcagacagagcagcaacctggccagccaccacagaatgcacaccggcgagaagccctacaagtag

SEQ ID NO: 105753 - DNA, 2457 bp, synthetic construct; identical to SEQ ID NO: 105752
  misc_feature 1..2457: note = Description of Artificial Sequence: Synthetic coding sequence
  source 1..2457: mol_type = other DNA

SEQ ID NO: 105754 - DNA, 2457 bp, synthetic construct; identical to SEQ ID NO: 105752
  misc_feature 1..2457: note = Description of Artificial Sequence: Synthetic coding sequence
  source 1..2457: mol_type = other DNA

SEQ ID NO: 105755 - DNA, 1350 bp, synthetic construct
  misc_feature 1..1350: note = Description of Artificial Sequence: Synthetic coding sequence
  source 1..1350: mol_type = other DNA
atggagttcttcatcagcatgagcgagaccatcaagtacaacgacgacgaccacaagaccctgttcctgaagaccctgaacgagcagagactggagggcgagttctgcgacatcgccatcgtggtggaggacgtgaagttcagagcccacagatgcgtgctggccgcctgcagcacctacttcaagaagctgttcaagaagctggaggtggacagcagcagcgtgatcgagatcgacttcctgagaagcgacatcttcgaggaggtgctgaactacatgtacaccgccaagatcagcgtgaagaaggaggacgtgaacctgatgatgagcagcggccagatcctgggcatcagattcctggacaagctgtgcagccagaagagagacgtgagcagccccgacgagaacaacggccagagcaagagcaagtactgcctgaagatcaacagacccatcggcgacgccgccgacacccaggacgacgacgtggaggagatcggcgaccaggacgacagccccagcgacgacaccgtggagggcaccccccccagccaggaggacggcaagagccccaccaccaccctgagagtgcaggaggccatcctgaaggagctgggcagcgaggaggtgagaaaggtgaactgctacggccaggaggtggagagcatggagacccccgagagcaaggacctgggcagccagaccccccaggccctgaccttcaacgacggcatgagcgaggtgaaggacgagcagacccccggctggaccaccgccgccagcgacatgaagttcgagtacctgctgtacggccaccacagagagcagatcgcctgccaggcctgcggcaagaccttcagcgacgagggcagactgagaaagcacgagaagctgcacaccgccgacagacccttcgtgtgcgagatgtgcaccaagggcttcaccacccaggcccacctgaaggagcacctgaagatccacaccggctacaagccctacagctgcgaggtgtgcggcaagagcttcatcagagcccccgacctgaagaagcacgagagagtgcacagcaacgagagacccttcgcctgccacatgtgcgacaaggccttcaagcacaagagccacctgaaggaccacgagagaagacacagaggcgagaagcccttcgtgtgcggcagctgcaccaaggccttcgccaaggccagcgacctgaagagacacgagaacaacatgcacagcgagagaaagcaggtgacccccagcgccatccagagcgagaccgagcagctgcaggccgccgccatggccgccgaggccgagcagcagctggagaccatcgcctgcagctag

SEQ ID NO: 105756 - DNA, 1350 bp, synthetic construct; identical to SEQ ID NO: 105755
  misc_feature 1..1350: note = Description of Artificial Sequence: Synthetic coding sequence
  source 1..1350: mol_type = other DNA

SEQ ID NO: 105757 - DNA, 1458 bp, synthetic construct
  misc_feature 1..1458: note = Description of Artificial Sequence: Synthetic coding sequence
  source 1..1458: mol_type = other DNA
atggccaccgagcccaagaaggccgccgcccagaacagccccgaggacgagggcctgctgatcgtgaagatcgaggaggaggagttcatccacggccaggacacctgcctgcagagaagcgagctgctgaagcaggagctgtgcagacagctgttcagacagttctgctaccaggacagccccggccccagagaggccctgagcagactgagagagctgtgctgccagtggctgaagcccgagatccacaccaaggagcagatcctggagctgctggtgctggagcagttcctgaccatcctgcccggcgacctgcaggcctgggtgcacgagcactaccccgagagcggcgaggaggccgtgaccatcctggaggacctggagagaggcaccgacgaggccgtgctgcaggtgcaggcccacgagcacggccaggagatcttccagaagaaggtgagcccccccggccccgccctgaacgtgaagctgcagcccgtggagaccaaggcccacttcgacagcagcgagccccagctgctgtgggactgcgacaacgagagcgagaacagcagaagcatgcccaagctggagatcttcgagaagatcgagagccagagaatcatcagcggcagaatcagcggctacatcagcgaggccagcggcgagagccaggacatctgcaagagcgccggcagagtgaagagacagtgggagaaggagagcggcgagagccagagactgagcagcgcccaggacgagggcttcggcaagatcctgacccacaagaacaccgtgagaggcgagatcatcagccacgacggctgcgagagaagactgaacctgaacagcaacgagttcacccaccagaagagctgcaagcacggcacctgcgaccagagcttcaagtggaacagcgacttcatcaaccaccagatcatctacgccggcgagaagaaccaccagtacggcaagagcttcaagagccccaagctggccaagcacgccgccgtgttcagcggcgacaagacccaccagtgcaacgagtgcggcaaggccttcagacacagcagcaagctggccagacaccagagaatccacaccggcgagagatgctacgagtgcaacgagtgcggcaagagcttcgccgagagcagcgacctgaccagacacagaagaatccacaccggcgagagacccttcggctgcaaggagtgcggcagagccttcaacctgaacagccacctgatcagacaccagagaatccacaccagagagaagccctacgagtgcagcgagtgcggcaagaccttcagagtgagcagccacctgatcagacacttcagaatccacaccggcgagaagccctacgagtgcagcgagtgcggcagagccttcagccagagcagcaacctgagccagcaccagagaatccacatgagagagaacctgctgatgtag

SEQ ID NO: 105758 - DNA, 1239 bp, synthetic construct
  misc_feature 1..1239: note = Description of Artificial Sequence: Synthetic coding sequence
  source 1..1239: mol_type = other DNA
atgagcctgggcggcagcgacaccatgctgaagggcgccgacaccagcgagagcggcgccgtgatcagaggcaactacagactgggcctgagcaagaagagcagcctgttcagccaccagaagcaccacgtgtgccccgagtgcggcagaggcttctgccagagaagcgacctgatcaagcaccagagaacccacaccggcgagaagccctacctgtgccccgagtgcggcagaagattcagccagaaggccagcctgagcatccaccagagaaagcacagcggcgagaagccctacgtgtgcagagagtgcggcagacacttcagatacaccagcagcctgaccaaccacaagagaatccacagcggcgagagacccttcgtgtgccaggagtgcggcagaggcttcagacagaagatcgccctgctgctgcaccagagaacccacctggaggagaagcccttcgtgtgccccgagtgcggcagaggcttctgccagaaggccagcctgctgcagcaccagagcagccacaccggcgagagacccttcctgtgcctggagtgcggcagaagcttcagacagcagagcctgctgctgagccaccaggtgacccacagcggcgagaagccctacgtgtgcgccgagtgcggccacagcttcagacagaaggtgaccctgatcagacaccagagaacccacaccggcgagaagccctacctgtgcccccagtgcggcagaggcttcagccagaaggtgaccctgatcggccaccagagaacccacaccggcgagaagccctacctgtgccccgactgcggcagaggcttcggccagaaggtgaccctgatcagacaccagagaacccacaccggcgagaagccctacctgtgccccaagtgcggcagagccttcggcttcaagagcctgctgaccagacaccagagaacccacagcgaggaggagctgtacgtggacagagtgtgcggccagggcctgggccagaagagccacctgatcagcgaccagagaacccacagcggcgagaagccctgcatctgcgacgagtgcggcagaggcttcggcttcaagagcgccctgatcagacaccagagaacccacagcggcgagaagccctacgtgtgcagagagtgcggcagaggcttcagccagaagagccacctgcacagacacagaagaaccaagagcggccaccagctgctgccccaggaggtgttctag

SEQ ID NO: 105759 - DNA, 291 bp, synthetic construct
  misc_feature 1..291: note = Description of Artificial Sequence: Synthetic coding sequence
  source 1..291: mol_type = other DNA
atgagccccggcctgctgaccaccagaaaggaggccctgatggccttcagagacgtggccgtggccttcacccagaaggagtggaagctgctgagcagcgcccagagaaccctgtacagagaggtgatgctggagaactacagccacctggtgagcctgggcatcgccttcagcaagcccaagctgatcgagcagctggagcagggcgacgagccctggagagaggagaacgagcacctgctggacctgtgccccggcagaagaatcaccagaagcggcgtgagagactag

SEQ ID NO: 105760 - DNA, 1812 bp, synthetic construct
  misc_feature 1..1812: note = Description of Artificial Sequence: Synthetic coding sequence
  source 1..1812: mol_type = other DNA
atgagccccggcctgctgaccaccagaaaggaggccctgatggccttcagagacgtggccgtggccttcacccagaaggagtggaagctgctgagcagcgcccagagaaccctgtacagagaggtgatgctggagaactacagccacctggtgagcctgggcatcgccttcagcaagcccaagctgatcgagcagctggagcagggcgacgagccctggagagaggagaacgagcacctgctggacctgtgccccgagcccagaaccgagttccagcccagcttcccccacctggtggccttcagcagcagccagctgctgagacagtacgccctgagcggccaccccacccagatcttccccagcagcagcgccggcggcgacttccagctggaggcccccagatgcagcagcgagaagggcgagagcggcgagaccgagggccccgacagcagcctgagaaagagacccagcagaatcagcagaaccttcttcagcccccaccagggcgaccccgtggagtgggtggagggcaacagagagggcggcaccgacctgagactggcccagagaatgagcctgggcggcagcgacaccatgctgaagggcgccgacaccagcgagagcggcgccgtgatcagaggcaactacagactgggcctgagcaagaagagcagcctgttcagccaccagaagcaccacgtgtgccccgagtgcggcagaggcttctgccagagaagcgacctgatcaagcaccagagaacccacaccggcgagaagccctacctgtgccccgagtgcggcagaagattcagccagaaggccagcctgagcatccaccagagaaagcacagcggcgagaagccctacgtgtgcagagagtgcggcagacacttcagatacaccagcagcctgaccaaccacaagagaatccacagcggcgagagacccttcgtgtgccaggagtgcggcagaggcttcagacagaagatcgccctgctgctgcaccagagaacccacctggaggagaagcccttcgtgtgccccgagtgcggcagaggcttctgccagaaggccagcctgctgcagcaccagagcagccacaccggcgagagacccttcctgtgcctggagtgcggcagaagcttcagacagcagagcctgctgctgagccaccaggtgacccacagcggcgagaagccctacgtgtgcgccgagtgcggccacagcttcagacagaaggtgaccctgatcagacaccagagaacccacaccggcgagaagccctacctgtgcccccagtgcggcagaggcttcagccagaaggtgaccctgatcggccaccagagaacccacaccggcgagaagccctacctgtgccccgactgcggcagaggcttcggccagaaggtgaccctgatcagacaccagagaacccacaccggcgagaagccctacctgtgccccaagtgcggcagagccttcggcttcaagagcctgctgaccagacaccagagaacccacagcgaggaggagctgtacgtggacagagtgtgcggccagggcctgggccagaagagccacctgatcagcgaccagagaacccacagcggcgagaagccctgcatctgcgacgagtgcggcagaggcttcggcttcaagagcgccctgatcagacaccagagaacccacagcggcgagaagccctacgtgtgcagagagtgcggcagaggcttcagccagaagagccacctgcacagacacagaagaaccaagagcggccaccagctgctgccccaggaggtgttctag

SEQ ID NO: 105761 - DNA, 1224 bp, synthetic construct
  misc_feature 1..1224: note = Description of Artificial Sequence: Synthetic coding sequence
  source 1..1224: mol_type = other DNA
atggccgccaagatggagatcaccctgagcagcaacaccgaggccagcagcaagcaggagagacacatcatcgccaagctggaggagaagagaggcccccccctgcagaagaactgccccgaccccgagctgtgcagacagagcttcagaagattctgctaccaggaggtgagcggcccccaggaggccctgagccagctgagacagctgtgcagacagtggctgcagcccgagctgcacaccaaggagcagatcctggagctgctggtgatggagcagttcctgaccatcctgccccccgagatccaggccagagtgagacacagatgccccatgagcagcaaggagatcgtgaccctggtggaggacttccacagagccagcaagaagcccaagcagtgggtggccgtgtgcatgcagggccagaaggtgctgctggagaagaccggcagccagctgggcgagcaggagctgcccgacttccagccccagacccccagaagagacctgagagagagcagccccgccgagcccagccaggccggcgcctacgacagactgagcccccaccactgggagaagagccccctgctgcaggagcccacccccaagctggccggcaccgaggcccccagaatgagaagcgacaacaaggagaacccccagcaggagggcgccaagggcgccaagccctgcgccgtgagcgccggcagaagcaagggcaacggcctgcagaaccccgagcccagaggcgccaacatgagcgagcccagactgagcagaagacaggtgagcagccccaacgcccagaagcccttcgcccactaccagagacactgcagagtggagtacatcagcagccccctgaagagccaccccctgagagagctgaagaagagcaagggcggcaagagaagcctgagcaacagactgcagcacctgggccaccagcccaccagaagcgccaagaagccctacaagtgcgacgactgcggcaagagcttcacctggaacagcgagctgaagagacacaagagagtgcacaccggcgagagaccctacacctgcggcgagtgcggcaactgcttcggcagacagagcaccctgaagctgcaccagagaatccacaccggcgagaagccctaccagtgcggccagtgcggcaagagcttcagacagagcagcaacctgcaccagcaccacagactgcaccacggcgactag

SEQ ID NO: 105762 - DNA, 705 bp, synthetic construct
  misc_feature 1..705: note = Description of Artificial Sequence: Synthetic coding sequence
  source 1..705: mol_type = other DNA
atggccgccaagatggagatcaccctgagcagcaacaccgaggccagcagcaagcaggagagacacatcatcgccaagctggaggagaagagaggcccccccctgcagaagaactgccccgaccccgagctgtgcagacagagcttcagaagattctgctaccaggaggtgagcggcccccaggaggccctgagccagctgagacagctgtgcagacagtggctgcagcccgagctgcacaccaaggagcagatcctggagctgctggtgatggagcagttcctgaccatcctgccccccgagatccaggccagagtgagacacagatgccccatgagcagcaaggagatcgtgaccctggtggaggacttccacagagccagcaagaagcccaagcagtgggtggccgtgtgcatgcagggccagaaggtgctgctggagaagaccggcagccagctgggcgagcaggagctgcccgacttccagccccagacccccagaagagacctgagagagagcagccccgccgagcccagccaggccggcgcctacgacagactgagcccccaccactgggagaagagccccctgctgcaggagcccacccccaagctggccggcaccgagctgctgatcgagaagaccgaccccaacatggccaccgacgagctgccctgcaagctgtggctgagcttcatcgcctag

SEQ ID NO: 105763 - DNA, 2136 bp, synthetic construct
  misc_feature 1..2136: note = Description of Artificial Sequence: Synthetic coding sequence
  source 1..2136: mol_type = other DNA
atgcccgccgacgtgaacctgagccagaagccccaggtgctgggccccgagaagcaggacggcagctgcgaggccagcgtgagcttcgaggacgtgaccgtggacttcagcagagaggagtggcagcagctggaccccgcccagagatgcctgtacagagacgtgatgctggagctgtacagccacctgttcgccgtgggctaccacatccccaaccccgaggtgatcttcagaatgctgaaggagaaggagcccagagtggaggaggccgaggtgagccaccagagatgccaggagagagagttcggcctggagatcccccagaaggagatcagcaagaaggccagcttccagaaggacatggtgggcgagttcaccagagacggcagctggtgcagcatcctggaggagctgagactggacgccgacagaaccaagaaggacgagcagaaccagatccagcccatgagccacagcgccttcttcaacaagaagaccctgaacaccgagagcaactgcgagtacaaggaccccggcaagatgatcagaaccagaccccacctggccagcagccagaagcagccccagaagtgctgcctgttcaccgagagcctgaagctgaacctggaggtgaacggccagaacgagagcaacgacaccgagcagctggacgacgtggtgggcagcggccagctgttcagccacagcagcagcgacgcctgcagcaagaacatccacaccggcgagaccttctgcaagggcaaccagtgcagaaaggtgtgcggccacaagcagagcctgaagcagcaccagatccacacccagaagaagcccgacggctgcagcgagtgcggcggcagcttcacccagaagagccacctgttcgcccagcagagaatccacagcgtgggcaacctgcacgagtgcggcaagtgcggcaaggccttcatgccccagctgaagctgagcgtgtacctgaccgaccacaccggcgacatcccctgcatctgcaaggagtgcggcaaggtgttcatccagagaagcgagctgctgacccaccagaagacccacaccagaaagaagccctacaagtgccacgactgcggcaaggccttcttccagatgctgagcctgttcagacaccagagaacccacagcagagagaagctgtacgagtgcagcgagtgcggcaagggcttcagccagaacagcaccctgatcatccaccagaagatccacaccggcgagagacagtacgcctgcagcgagtgcggcaaggccttcacccagaagagcaccctgagcctgcaccagagaatccacagcggccagaagagctacgtgtgcatcgagtgcggccaggccttcatccagaaggcccacctgatcgtgcaccagagaagccacaccggcgagaagccctaccagtgccacaactgcggcaagagcttcatcagcaagagccagctggacatccaccacagaatccacaccggcgagaagccctacgagtgcagcgactgcggcaagaccttcacccagaagagccacctgaacatccaccagaagatccacaccggcgagagacaccacgtgtgcagcgagtgcggcaaggccttcaaccagaagagcatcctgagcatgcaccagagaatccacaccggcgagaagccctacaagtgcagcgagtgcggcaaggccttcaccagcaagagccagttcaaggagcaccagagaatccacaccggcgagaagccctacgtgtgcaccgagtgcggcaaggccttcaacggcagaagcaacttccacaagcaccagatcacccacaccagagagagacccttcgtgtgctacaagtgcggcaaggccttcgtgcagaagagcgagctgatcacccaccagagaacccacatgggcgagaagccctacgagtgcctggactgcggcaagagcttcagcaagaagccccagctgaaggtgcaccagagaatccacaccggcgagagaccctacgtgtgcagcgagtgcggcaaggccttcaacaacagaagcaacttcaacaagcaccagaccacccacaccagagacaagagctacaagtgcagctacagcgtgaagggcttcaccaagcagtag

SEQ ID NO: 105764 - DNA, 966 bp, synthetic construct
  misc_feature 1..966: note = Description of Artificial Sequence: Synthetic coding sequence
  source 1..966: mol_type = other DNA
atggccgccggctggctgaccacctggagccagaacagcgtgaccttccaggaggtggccgtggacttcagccaggaggagtgggccctgctggaccccgcccagaagaacctgtacaaggacgtgatgctggagaacttcagaaacctggccagcgtgggctaccagctgtgcagacacagcctgatcagcaaggtggaccaggagcagctgaagaccgacgagagaggcatcctgcagggcgactgcgccgactgggagacccagctgaagcccaaggacaccatcgccatgcagaacatccccggcggcaagaccagcaacggcatcaacaccaactgcgtgagaacccacagcggcgagatgccctacgagtgcagcgactgcggcaaggccttcatcttccagagcagcctgaagaagcacatgagaagccacaccggcgagaagccctacgagtgcgaccactgcggcaagagcttcagccagagcagccacctgaacgtgcacaagagaacccacaccggcgagaagccctacgactgcaaggagtgcggcaaggccttcaccgtgcccagcagcctgcagaagcacgtgagaacccacaccggcgagaagccctacgagtgcagcgactgcggcaaggccttcatcgaccagagcagcctgaagaagcacaccagaagccacaccggcgagaagccctacgagtgcaaccagtgcggcaagagcttcagcaccggcagctacctgatcgtgcacaagagaacccacaccggcgagaagacctacgagtgcaaggagtgcggcaaggccttcagaaacagcagctgcctgagagtgcacgtgagaacccacaccggcgagaagccctacaagtgcatccagtgcgagaaggccttcagcaccagcaccaacctgatcatgcacaagagaatccacaacggccagaagctgcacgagtag

SEQ ID NO: 105765 - DNA, 1446 bp, synthetic construct
  misc_feature 1..1446: note = Description of Artificial Sequence: Synthetic coding sequence
  source 1..1446: mol_type = other DNA
atggccgccggctggctgaccacctggagccagaacagcgtgaccttccaggaggtggccgtggacttcagccaggaggagtgggccctgctggaccccgcccagaagaacctgtacaaggacgtgatgctggagaacttcagaaacctggccagcgtgggctaccagctgtgcagacacagcctgatcagcaaggtggaccaggagcagctgaagaccgacgagagaggcatcctgcagggcgactgcgccgactgggagacccagctgaagcccaaggacaccatcgccatgcagaacatccccggcggcaagaccagcaacggcatcaacaccgccgagaaccagcccggcgagcacagcctggagtgcaaccactgcggcaagttcagaaagaacaccagattcatctgcaccagatactgcaagggcgagaagtgctacaagtacatcaagtacagcaaggtgttcaaccaccccagcaccctgagaagccacgtgagcatccacatcggcgagaagaccctggagttcaccgactgcagaaaggccttcaaccaggagagcagcctgagaaagcacctgagaacccccaccggccagaagttccaggagtacgagcagtgcgacatgagcttcagcctgcacagcagctgcagcgtgagagagcagatccccaccggcgagaagggcgacgagtgcagcgactacggcaagatcagccccctgagcgtgcacaccaagaccggcagcgtggaggagggcctggagtgcaacgagcacgagaagaccttcaccgaccccctgagcctgcagaactgcgtgagaacccacagcggcgagatgccctacgagtgcagcgactgcggcaaggccttcatcttccagagcagcctgaagaagcacatgagaagccacaccggcgagaagccctacgagtgcgaccactgcggcaagagcttcagccagagcagccacctgaacgtgcacaagagaacccacaccggcgagaagccctacgactgcaaggagtgcggcaaggccttcaccgtgcccagcagcctgcagaagcacgtgagaacccacaccggcgagaagccctacgagtgcagcgactgcggcaaggccttcatcgaccagagcagcctgaagaagcacaccagaagccacaccggcgagaagccctacgagtgcaaccagtgcggcaagagcttcagcaccggcagctacctgatcgtgcacaagagaacccacaccggcgagaagacctacgagtgcaaggagtgcggcaaggccttcagaaacagcagctgcctgagagtgcacgtgagaacccacaccggcgagaagccctacaagtgcatccagtgcgagaaggccttcagcaccagcaccaacctgatcatgcacaagagaatccacaacggccagaagctgcacgagtag

SEQ ID NO: 105766 - DNA, 363 bp, synthetic construct
  misc_feature 1..363: note = Description of Artificial Sequence: Synthetic coding sequence
  source 1..363: mol_type = other DNA
atggccgccggctggctgaccacctggagccagaacagcgtgaccttccaggaggtggccgtggacttcagccaggaggagtgggccctgctggaccccgcccagaagaacctgtacaaggacgtgatgctggagaacttcagaaacctggccagcgtgggctaccagctgtgcagacacagcctgatcagcaaggtggaccaggagcagctgaagaccgacgagagaggcatcctgcagggcgactgcgccgactgggagacccagctgaagcccaaggacaccatcgccatgcagaacatccccggcggcaagaccagcaacggcatcaacaccaacccccacggcagagagttcctgtag

SEQ ID NO: 105767 - DNA, 966 bp, synthetic construct; identical to SEQ ID NO: 105764
  misc_feature 1..966: note = Description of Artificial Sequence: Synthetic coding sequence
  source 1..966: mol_type = other DNA

SEQ ID NO: 105768 - DNA, 1650 bp, synthetic construct
  misc_feature 1..1650: note = Description of Artificial Sequence: Synthetic coding sequence
  source 1..1650: mol_type = other DNA
atgcccgtggacctgggccaggccctgggcctgctgcccagcctggccaaggccgaggacagccagttcagcgagagcgacgccgccctgcaggaggagctgagcagccccgagaccgccagacagctgttcagacagttcagataccaggtgatgagcggcccccacgagaccctgaagcagctgagaaagctgtgcttccagtggctgcagcccgaggtgcacaccaaggagcagatcctggagatcctgatgctggagcagttcctgaccatcctgcccggcgagatccagatgtgggtgagaaagcagtgccccggcagcggcgaggaggccgtgaccctggtggagagcctgaagggcgacccccagagactgtggcagtggatcagcatccaggtgctgggccaggacatcctgagcgagaagatggagagccccagctgccaggtgggcgaggtggagccccacctggaggtggtgccccaggagctgggcctggagaacagcagcagcggccccggcgagctgctgagccacatcgtgaaggaggagagcgacaccgaggccgagctggccctggccgccagccagcccgccagactggaggagagactgatcagagaccaggacctgggcgccagcctgctgcccgccgccccccaggagcagtggagacagctggacagcacccagaaggagcagtactgggacctgatgctggagacctacggcaagatggtgagcggcgccggcatcagccaccccaagagcgacctgaccaacagcatcgagttcggcgaggagctggccggcatctacctgcacgtgaacgagaagatccccagacccacctgcatcggcgacagacaggagaacgacaaggagaacctgaacctggagaaccacagagaccaggagctgctgcacgccagctgccaggccagcggcgaggtgcccagccaggccagcctgagaggcttcttcaccgaggacgagcccggctgcttcggcgagggcgagaacctgcccgaggccctgcagaacatccaggacgagggcaccggcgagcagctgagcccccaggagagaatcagcgagaagcagctgggccagcacctgcccaacccccacagcggcgagatgagcaccatgtggctggaggagaagagagagaccagccagaagggccagcccagagcccccatggcccagaagctgcccacctgcagagagtgcggcaagaccttctacagaaacagccagctgatcttccaccagagaacccacaccggcgagacctacttccagtgcaccatctgcaagaaggccttcctgagaagcagcgacttcgtgaagcaccagagaacccacaccggcgagaagccctgcaagtgcgactactgcggcaagggcttcagcgacttcagcggcctgagacaccacgagaagatccacaccggcgagaagccctacaagtgccccatctgcgagaagagcttcatccagagaagcaacttcaacagacaccagagagtgcacaccggcgagaagccctacaagtgcagccactgcggcaagagcttcagctggagcagcagcctggacaagcaccagagaagccacctgggcaagaagcccttccagtag

SEQ ID NO: 105769 - DNA, 1650 bp, synthetic construct; identical to SEQ ID NO: 105768
  misc_feature 1..1650: note = Description of Artificial Sequence: Synthetic coding sequence
  source 1..1650: mol_type = other DNA

SEQ ID NO: 105770 - DNA, 1959 bp, synthetic construct
  misc_feature 1..1959: note = Description of Artificial Sequence: Synthetic coding sequence
  source 1..1959: mol_type = other DNA
atgatcaacgcccaggagctgctgaccctggaggacgtgaccgtggagttcacctgggaggagtggcagctgctgggccccttccagaaggacctgtacagagacgtgatgctggagatctacagcaacctgctgagcatgggctaccaggtgagcaagcccgacgccctgagcaagctggagagaggcgaggagccctggaccatggaggacgagagacacagcagaatctgccccgagaacaacgaggtggacgaccacctgcaggaccacctggagaaccagagaatgctgaagagcgtggagcagtaccacgagcacaacgccttcggcaacaccgccagccagaccaagagcctgtgcctgttcagagagaaccacgacaccttcgagctgtacatcaagaccctgaagagcaacctgagcctggtgaaccagaacaagagctgcgagatcaacaacagcaccaagttcagcggcgacggcaagagcttcctgcacggcaactacgaggagctgtacagcgccgccaagttcagcgtgagcaccaaggccaacagcaccaagagccaggtgagcaagcaccagagaacccacgagatcgagaagaaccacgtgtgcagcgagtgcggcaaggccttcgtgaagaagagccagctgaccgaccacgagagagtgcacaccggcgagaagccctacggctgcaccctgtgcgccaaggtgttcagcagaaagagcagactgaacgagcaccagagaatccacaagagagagaagagcttcatctgcagcgagtgcggcaaggtgttcaccatgaagagcagactgatcgagcaccagagaacccacaccggcgagaagccctacatctgcaacgagtgcggcaagggcttccccggcaagagaaacctgatcgtgcaccagagaaaccacaccggcgagaagagctacatctgcagcgagtgcggcaagggcttcaccggcaagagcatgctgatcatccaccagagaacccacaccggcgagaagccctacatctgcagcgagtgcggcaagggcttcaccaccaagcactacgtgatcatccaccagagaaaccacaccggcgagaagccctacatctgcaacgagtgcggcaagggcttcaccatgaagagcagaatgatcgagcaccagagaacccacaccggcgagaagccctacatctgcagcgagtgcggcaagggcttccccagaaagagcaacctgatcgtgcaccagagaaaccacaccgtggagaagagctacctgtgcagcgagtgcggcaagggcttcaccgtgaagagcatgctgatcatccaccagagaacccacaccggcgagaagccctacacctgcagcgagtgcggcaagggcttccccctgaagagcagactgatcgtgcaccagagaacccacaccggcgagaagccctacagatgcagcgagtgcggcaagggcttcatcgtgaacagcggcctgatgctgcaccagagaacccacaccggcgagaagccctacatctgcaacgagtgcggcaagggcttcgccttcaagagcaacctggtggtgcaccagagaacccacaccggcgagaagcccttcatgtgcagcgagtgcggcaagggcttcaccatgaagagatacctgatcgtgcaccagcagatccacaccgaggagaagagctgcatctgcagcgagtgcggcagaggcttcgccaaggagaccgagctggccctgcacaagcaggtgcacaccggcgagaagccctacggctgcaacgagtgcggcaagggcttcaccatgaagagcagactgatcgtgcaccagagaacccacaccggcgagaagcccttcgtgtgcagcgagtgcagaaaggccttcagcagcaagagaaacctgatcgtgcaccagagaacccacaacggcaacaagccctag

SEQ ID NO: 105771 - DNA, 2004 bp, synthetic construct
  misc_feature 1..2004: note = Description of Artificial Sequence: Synthetic coding sequence
  source 1..2004: mol_type = other DNA
atgagagcctgcgccggcagcaccagagaggccggcagcggcgcccaggacctgagcaccctgctgtgcctggaggagagcatggaggagcaggacgagaagccccccgagccccccaaggcctgcgcccaggagggcgtgaacttcaagatcgtgaccgtggacttcaccagagaggagcagggcacctggaaccccgcccagagaaccctggacagagacgtgatcctggagaaccacagagacctggtgagctgggacctggccaccgccgtgggcaagaaggacagcaccagcaagcagagaatcttcgacgaggagcccgccaacggcgtgaagatcgagagattcaccagagacgacccctggctgagcagctgcgaggaggtggacgactgcaaggaccagctggagaagcagcaggagaagcaggagatcctgctgcaggaggtggccttcacccagagaaaggccgtgatccacgagagagtgtgcaagagcgacgagaccggcgagaagagcggcctgaacagcagcctgttcagcagccccgtgatccccatcagaaaccacttccacaagcacgtgagccacgccaagaagtggcacctgaacgccgccgtgaacagccaccagaagatcaacgagaacgagaccctgtacgagaacaacgagtgcggcaagcccccccagagcatccacctgatccagttcaccagaacccagaccaaggacaagtgctacggcttcagcgacagaatccagagcttctgccacggcacccccctgcacatccacgagaagatccacggcggcggcaagaccttcgacttcaaggagtgcggccaggtgctgaaccccaagatcagccacaacgagcagcagagaatccccttcgaggagagccagtacaagtgcagcgagaccagccacagcagcagcctgacccagaacatgagaaacaacagcgaggagaagcccttcgagtgcaaccagtgcggcaagagcttcagctggagcagccacctggtggcccaccagagaacccacaccggcgagaagccctacgagtgcagcgagtgcggcaagagcttcagcagaagcagccacctggtgagccaccagagaacccacaccggcgagaagccctacagatgcaaccagtgcggcaagagcttcagccagagctacgtgctggtggtgcaccagagaacccacaccggcgagaagccctacgagtgcaaccagtgcggcaagagcttcagacagagctacaagctgatcgcccaccagagaacccacaccggcgagaagccctacgagtgcaaccagtgcggcaagagcttcatccagagctacaagctgatcgcccaccagagaatccacaccggcgagaagccctacgagtgcaaccagtgcggcaagagcttcagccagagctacaagctggtggcccaccagagaacccacaccggcgagaagcccttcgagtgcaaccagtgcggcaagagcttcagctggagcagccagctggtggcccaccagagaacccacaccggcgagaagccctacgagtgcagcgagtgcggcaagagcttcaacagaagcagccacctggtgatgcaccagagaatccacaccggcgagaagccctacgagtgcaaccagtgcggcaagagcttcagccagagctacgtgctggtggtgcaccagagaacccacaccggcgagaagccctacgagtgcagccagtgcggcaagagcttcagacagagcagctgcctgacccagcaccagagaacccacaccggcgagaagcccttcgagtgcaaccagtgcggcaagaccttcagcctgagcgccagactgatcgtgcaccagagaacccacaccggcgagaagcccttcacctgcatccagtgcggcaaggccttcatcaacagctacaagctgatcagacaccaggccacccacaccgaggagaagctgtacgagtgcaactag

SEQ ID NO: 105772 - DNA, 1848 bp, synthetic construct
  misc_feature 1..1848: note = Description of Artificial Sequence: Synthetic coding sequence
  source 1..1848: mol_type = other DNA
atgccccagctgcagtaccccgagggctacctggcccccaacagatgcctggtgagcaactgcggcgtgaacaagatgagcaacgacgagctggtgggccagaaccacggcatggagggcgaggcctgcatcggcggcgacgtgaccttcaacgacgtggccatcgacttcacccacgaggagtggggctggctgagcagcgcccagagagacctgtacaaggacgtgatggtgcagaactacgagaacctggtgagcgtggccggcctgagcgtgaccaagccctacgtgatcaccctgctggaggacggcaaggagccctggatgatggagaagaagctgagcaagggcatgatccccgactgggagagcagatgggagaacaaggagctgagcaccaagaaggacaactacgacgaggacagcccccagaccgtgatcatcgagaaggtggtgaagcagagctacgagttcagcaacagcaagaagaacctggagtacatcgagaagctggagggcaagcacggcagccaggtggaccacttcagacccgccatcctgaccagcagagagagccccaccgccgacagcgtgtacaagtacaacatcttcagaagcaccttccacagcaagagcaccctgagcgagccccagaagatcagcgccgagggcaacagccacaagtacgacatcctgaagaagaacctgcccaagaagagcgtgatcaagaacgagaaggtgaacggcggcaagaagctgctgaacagcaacaagagcggcgccgccttcagccagggcaagagcctgaccctgccccagacctgcaacagagagaagatctacacctgcagcgagtgcggcaaggccttcggcaagcagagcatcctgaacagacactggagaatccacaccggcgagaagccctacgagtgcagagagtgcggcaagaccttcagccacggcagcagcctgaccagacacctgatcagccacagcggcgagaagccctacaagtgcatcgagtgcggcaaggccttcagccacgtgagcagcctgaccaaccaccagagcacccacaccggcgagaagccctacgagtgcatgaactgcggcaagagcttcagcagagtgagccacctgatcgagcacctgagaatccacacccaggagaagctgtacgagtgcagaatctgcggcaaggccttcatccacagaagcagcctgatccaccaccagaagatccacaccggcgagaagccctacgagtgcagagagtgcggcaaggccttctgctgcagcagccacctgaccagacaccagagaatccacaccatggagaagcagtacgagtgcaacaagtgcctgaaggtgttcagcagcctgagcttcctggtgcagcaccagagcatccacaccgaggagaagcccttcgagtgccagaagtgcagaaagagcttcaaccagctggagagcctgaacatgcacctgagaaaccacatcagactgaagccctacgagtgcagcatctgcggcaaggccttcagccacagaagcagcctgctgcagcaccacagaatccacaccggcgagaagccctacgagtgcatcaagtgcggcaagaccttcagctgcagcagcaacctgaccgtgcaccagagaatccacaccggcgagaagccctacaagtgcaacgagtgcggcaaggccttcagcaagggcagcaacctgaccgcccaccagagagtgcacaacggcgagaagcccaacagcgtggtgagcgtggagaagcccctggactacatgaaccactacacctgcgagaagagctacagaagagagaccgtgtag

SEQ ID NO: 105773 - DNA, 1404 bp, synthetic construct
  misc_feature 1..1404: note = Description of Artificial Sequence: Synthetic coding sequence
  source 1..1404: mol_type = other DNA
atgccccaggtgaccttcaacgacgtggccatcgacttcacccacgaggagtggggctggctgagcagcgcccagagagacctgtacaaggacgtgatggtgcagaactacgagaacctggtgagcgtgggcctgagcgtgaccaagccctacgtgatcaccctgctggaggacggcaaggagccctggatgatggagaagaagctgagcaagggcatgatccccgactgggagagcagatgggagaacaaggagctgagcaccaagaaggacaactacgacgaggacagcccccagaccgtgatcatcgagaaggtggtgaagcagagctacgagttcagcaacagcaagaagaacctggagtacatcgagaagctggagggcaagcacggcagccaggtggaccacttcagacccgccatcctgaccagcagagagagccccaccgccgacagcgtgtacaagtacaacatcttcagaagcaccttccacagcaagagcaccctgagcgagccccagaagatcagcgccgagggcaacagccacaagtacgacatcctgaagaagaacctgcccaagaagagcgtgatcaagaacgagaaggtgaacggcggcaagaagctgctgaacagcaacaagagcggcgccgccttcagccagggcaagagcctgaccctgccccagacctgcaacagagagaagatctacacctgcagcgagtgcggcaaggccttcggcaagcagagcatcctgaacagacactggagaatccacaccggcgagaagccctacgagtgcagagagtgcggcaagaccttcagccacggcagcagcctgaccagacacctgatcagccacagcggcgagaagccctacaagtgcatcgagtgcggcaaggccttcagccacgtgagcagcctgaccaaccaccagagcacccacaccggcgagaagccctacgagtgcatgaactgcggcaagagcttcagcagagtgagccacctgatcgagcacctgagaatccacacccaggagaagctgtacgagtgcagaatctgcggcaaggccttcatccacagaagcagcctgatccaccaccagaagatccacaccggcgagaagccctacgagtgcagagagtgcggcaaggccttctgctgcagcagccacctgaccagacaccagagaatccacaccatggagaagcagtacgagtgcaacaagtgcctgaaggtgttcagcagcctgagcttcctggtgcagcaccagagcatccacaccgaggagaagcccttcgagtgccagaagtgcagaaagagcttcaaccagctggagagcctgaacatgcacctgagaaaccacatcgagaccctgagaatgcagtacatgtgggagagcctgtag

SEQ ID NO: 105774 - DNA, 1713 bp, synthetic construct
  misc_feature 1..1713: note = Description of Artificial Sequence: Synthetic coding sequence
  source 1..1713: mol_type = other DNA
atgccccaggtgaccttcaacgacgtggccatcgacttcacccacgaggagtggggctggctgagcagcgcccagagagacctgtacaaggacgtgatggtgcagaactacgagaacctggtgagcgtgggcctgagcgtgaccaagccctacgtgatcaccctgctggaggacggcaaggagccctggatgatggagaagaagctgagcaagggcatgatccccgactgggagagcagatgggagaacaaggagctgagcaccaagaaggacaactacgacgaggacagcccccagaccgtgatcatcgagaaggtggtgaagcagagctacgagttcagcaacagcaagaagaacctggagtacatcgagaagctggagggcaagcacggcagccaggtggaccacttcagacccgccatcctgaccagcagagagagccccaccgccgacagcgtgtacaagtacaacatcttcagaagcaccttccacagcaagagcaccctgagcgagccccagaagatcagcgccgagggcaacagccacaagtacgacatcctgaagaagaacctgcccaagaagagcgtgatcaagaacgagaaggtgaacggcggcaagaagctgctgaacagcaacaagagcggcgccgccttcagccagggcaagagcctgaccctgccccagacctgcaacagagagaagatctacacctgcagcgagtgcggcaaggccttcggcaagcagagcatcctgaacagacactggagaatccacaccggcgagaagccctacgagtgcagagagtgcggcaagaccttcagccacggcagcagcctgaccagacacctgatcagccacagcggcgagaagccctacaagtgcatcgagtgcggcaaggccttcagccacgtgagcagcctgaccaaccaccagagcacccacaccggcgagaagccctacgagtgcatgaactgcggcaagagcttcagcagagtgagccacctgatcgagcacctgagaatccacacccaggagaagctgtacgagtgcagaatctgcggcaaggccttcatccacagaagcagcctgatccaccaccagaagatccacaccggcgagaagccctacgagtgcagagagtgcggcaaggccttctgctgcagcagccacctgaccagacaccagagaatccacaccatggagaagcagtacgagtgcaacaagtgcctgaaggtgttcagcagcctgagcttcctggtgcagcaccagagcatccacaccgaggagaagcccttcgagtgccagaagtgcagaaagagcttcaaccagctggagagcctgaacatgcacctgagaaaccacatcagactgaagccctacgagtgcagcatctgcggcaaggccttcagccacagaagcagcctgctgcagcaccacagaatccacaccggcgagaagccctacgagtgcatcaagtgcggcaagaccttcagctgcagcagcaacctgaccgtgcaccagagaatccacaccggcgagaagccctacaagtgcaacgagtgcggcaaggccttcagcaagggcagcaacctgaccgcccaccagagagtgcacaacggcgagaagcccaacagcgtggtgagcgtggagaagcccctggactacatgaaccactacacctgcgagaagagctacagaagagagaccgtgtag

SEQ ID NO: 105775 - DNA, 1716 bp, synthetic construct
  misc_feature 1..1716: note = Description of Artificial Sequence: Synthetic coding sequence
  source 1..1716: mol_type = other DNA
atgccccaggtgaccttcaacgacgtggccatcgacttcacccacgaggagtggggctggctgagcagcgcccagagagacctgtacaaggacgtgatggtgcagaactacgagaacctggtgagcgtggccggcctgagcgtgaccaagccctacgtgatcaccctgctggaggacggcaaggagccctggatgatggagaagaagctgagcaagggcatgatccccgactgggagagcagatgggagaacaaggagctgagcaccaagaaggacaactacgacgaggacagcccccagaccgtgatcatcgagaaggtggtgaagcagagctacgagttcagcaacagcaagaagaacctggagtacatcgagaagctggagggcaagcacggcagccaggtggaccacttcagacccgccatcctgaccagcagagagagccccaccgccgacagcgtgtacaagtacaacatcttcagaagcaccttccacagcaagagcaccctgagcgagccccagaagatcagcgccgagggcaacagccacaagtacgacatcctgaagaagaacctgcccaagaagagcgtgatcaagaacgagaaggtgaacggcggcaagaagctgctgaacagcaacaagagcggcgccgccttcagccagggcaagagcctgaccctgccccagacctgcaacagagagaagatctacacctgcagcgagtgcggcaaggccttcggcaagcagagcatcctgaacagacactggagaatccacaccggcgagaagccctacgagtgcagagagtgcggcaagaccttcagccacggcagcagcctgaccagacacctgatcagccacagcggcgagaagccctacaagtgcatcgagtgcggcaaggccttcagccacgtgagcagcctgaccaaccaccagagcacccacaccggcgagaagccctacgagtgcatgaactgcggcaagagcttcagcagagtgagccacctgatcgagcacctgagaatccacacccaggagaagctgtacgagtgcagaatctgcggcaaggccttcatccacagaagcagcctgatccaccaccagaagatccacaccggcgagaagccctacgagtgcagagagtgcggcaaggccttctgctgcagcagccacctgaccagacaccagagaatccacaccatggagaagcagtacgagtgcaacaagtgcctgaaggtgttcagcagcctgagcttcctggtgcagcaccagagcatccacaccgaggagaagcccttcgagtgccagaagtgcagaaagagcttcaaccagctggagagcctgaacatgcacctgagaaaccacatcagactgaagccctacgagtgcagcatctgcggcaaggccttcagccacagaagcagcctgctgcagcaccacagaatccacaccggcgagaagccctacgagtgcatcaagtgcggcaagaccttcagctgcagcagcaacctgaccgtgcaccagagaatccacaccggcgagaagccctacaagtgcaacgagtgcggcaaggccttcagcaagggcagcaacctgaccgcccaccagagagtgcacaacggcgagaagcccaacagcgtggtgagcgtggagaagcccctggactacatgaaccactacacctgcgagaagagctacagaagagagaccgtgtag

SEQ ID NO: 105776 - DNA, 1920 bp, synthetic construct
  misc_feature 1..1920: note = Description of Artificial Sequence: Synthetic coding sequence
  source 1..1920: mol_type = other DNA
atgacccccgccagcgccagcggcgaggacagcggcagcttctacagctggcagaaggccaagagagagcagggcctggtgaccttcgaggacgtggccgtggacttcacccaggaggagtggcagtacctgaaccccccccagagaaccctgtacagagacgtgatgctggagacctacagcaacctggtgttcgtgggccagcaggtgaccaagcccaacctgatcctgaagctggaggtggaggagtgccccgccgagggcaagatccccttctggaacttccccgaggtgtgccaggtggacgagcagatcgagagacagcaccaggacgaccaggacaagtgcctgctgatgcaggtgggcttcagcgacaagaagaccatcatcaccaagagcgccagagactgccacgagttcggcaacatcctgcacctgagcaccaacctggtggccagcatccagagacccgacaagcacgagagcttcggcaacaacatggtggacaacctggacctgttcagcagaagcagcgccgagaacaagtacgacaacggctgcgccaagctgttcttccacaccgagtacgagaagaccaaccccggcatgaagccctacggctacaaggagtgcggcaagggcctgagaagaaagaagggcctgagcctgcaccagagaatcaagaacggcgagaagcccttcgagtgcaccgcctgcagaaagaccttcagcaagaagagccacctgatcgtgcactggagaacccacaccggcgagaagcccttcggctgcaccgagtgcggcaaggccttcagccagaagagccagctgatcatccacctgagaacccacaccggcgagagacccttcgagtgccccgagtgcggcaaggccttcagagagaagagcaccgtgatcatccactacagaacccacaccggcgagaagccctacgagtgcaacgagtgcggcaaggccttcacccagaagagcaacctgatcgtgcaccagaagacccacaccggcgagaagacctacgagtgcaccaagtgcggcgagagcttcatccagaagctggacctgatcatccaccacagcacccacaccggcaagaagccccacgagtgcaacgagtgcaagaagaccttcagcgacaagagcaccctgatcatccaccagagaacccacaccggcgagaagccccacaagtgcaccgagtgcggcaagagcttcaacgagaagagcaccctgatcgtgcaccagagaacccacaccggcgagaagccctacgagtgcgacgtgtgcggcaagaccttcacccagaagagcaacctgggcgtgcaccagagaacccacagcggcgagaagcccttcgagtgcaacgagtgcgagaaggccttcagccagaagagctacctgatgctgcaccagagaggccacaccggcgagaagccctacgagtgcaacgagtgcgagaaggccttcagccagaagagctacctgatcatccaccagagaacccacaccgaggagaagccctacaagtgcaacgagtgcggcaaggccttcagagagaagagcaagctgatcatccaccagagaatccacaccggcgagaagccctacgagtgccccgtgtgctggaaggccttcagccagaagagccagctgatcatccaccagagaacccacaccggcgagaagccctacgcctgcaccgagtgcggcaaggccttcagagagaagagcaccttcaccgtgcaccagagaacccacaccggcgagaagccctacaagtgcaccgagtgcggcaaggccttcacccagaagagcaacctgatcgtgcaccagagaacccacgccggcaagaaggcccacggcagaggccacaccagaaagagcaagttcatggcccactag

SEQ ID NO: 105777 - DNA, 1863 bp, synthetic construct
  misc_feature 1..1863: note = Description of Artificial Sequence: Synthetic coding sequence
  source 1..1863: mol_type = other DNA
atggccaagccccagggcctggtgaccttcgaggacgtggccgtggacttcacccaggaggagtggcagtacctgaaccccccccagagaaccctgtacagagacgtgatgctggagacctacagcaacctggtgttcgtgggccagcaggtgaccaagcccaacctgatcctgaagctggaggtggaggagtgccccgccgagggcaagatccccttctggaacttccccgaggtgtgccaggtggacgagcagatcgagagacagcaccaggacgaccaggacaagtgcctgctgatgcaggtgggcttcagcgacaagaagaccatcatcaccaagagcgccagagactgccacgagttcggcaacatcctgcacctgagcaccaacctggtggccagcatccagagacccgacaagcacgagagcttcggcaacaacatggtggacaacctggacctgttcagcagaagcagcgccgagaacaagtacgacaacggctgcgccaagctgttcttccacaccgagtacgagaagaccaaccccggcatgaagccctacggctacaaggagtgcggcaagggcctgagaagaaagaagggcctgagcctgcaccagagaatcaagaacggcgagaagcccttcgagtgcaccgcctgcagaaagaccttcagcaagaagagccacctgatcgtgcactggagaacccacaccggcgagaagcccttcggctgcaccgagtgcggcaaggccttcagccagaagagccagctgatcatccacctgagaacccacaccggcgagagacccttcgagtgccccgagtgcggcaaggccttcagagagaagagcaccgtgatcatccactacagaacccacaccggcgagaagccctacgagtgcaacgagtgcggcaaggccttcacccagaagagcaacctgatcgtgcaccagaagacccacaccggcgagaagacctacgagtgcaccaagtgcggcgagagcttcatccagaagctggacctgatcatccaccacagcacccacaccggcaagaagccccacgagtgcaacgagtgcaagaagaccttcagcgacaagagcaccctgatcatccaccagagaacccacaccggcgagaagccccacaagtgcaccgagtgcggcaagagcttcaacgagaagagcaccctgatcgtgcaccagagaacccacaccggcgagaagccctacgagtgcgacgtgtgcggcaagaccttcacccagaagagcaacctgggcgtgcaccagagaacccacagcggcgagaagcccttcgagtgcaacgagtgcgagaaggccttcagccagaagagctacctgatgctgcaccagagaggccacaccggcgagaagccctacgagtgcaacgagtgcgagaaggccttcagccagaagagctacctgatcatccaccagagaacccacaccgaggagaagccctacaagtgcaacgagtgcggcaaggccttcagagagaagagcaagctgatcatccaccagagaatccacaccggcgagaagccctacgagtgccccgtgtgctggaaggccttcagccagaagagccagctgatcatccaccagagaacccacaccggcgagaagccctacgcctgcaccgagtgcggcaaggccttcagagagaagagcaccttcaccgtgcaccagagaacccacaccggcgagaagccctacaagtgcaccgagtgcggcaaggccttcacccagaagagcaacctgatcgtgcaccagagaacccacgccggcaagaaggcccacggcagaggccacaccagaaagagcaagttcatggcccactag

SEQ ID NO: 105778 - DNA, 1920 bp, synthetic construct; identical to SEQ ID NO: 105776
  misc_feature 1..1920: note = Description of Artificial Sequence: Synthetic coding sequence
  source 1..1920: mol_type = other DNA

SEQ ID NO: 105779 - DNA, 921 bp, synthetic construct
  misc_feature 1..921: note = Description of Artificial Sequence: Synthetic coding sequence
  source 1..921: mol_type = other DNA
atgagcagcgagaagagcggcctgcccgacagcgtgccccacaccagcccccccccctacaacgccccccagccccccgccgagccccccgccccccccccccaggccgcccccagcagccaccaccaccaccaccaccactaccaccagagcggcaccgccaccctgcccagactgggcgccggcggcctggccagcagcgccgccaccgcccagagaggccccagcagcagcgccaccctgcccagacccccccaccacgccccccccggccccgccgccggcgcccccccccccggctgcgccaccctgcccagaatgccccccgacccctacctgcaggagaccagattcgagggccccctgcccccccccccccccgccgccgccgccccccccccccccgcccccgcccagaccgcccaggcccccggcttcgtggtgcccacccacgccggcaccgtgggcaccctgcccctgggcggctacgtggcccccggctaccccctgcagctgcagccctgcaccgcctacgtgcccgtgtaccccgtgggcaccccctacgccggcggcacccccggcggcaccggcgtgaccagcaccctgcccccccccccccagggccccggcctggccctgctggagcccagaagacccccccacgactacatgcccatcgccgtgctgaccaccatctgctgcttctggcccaccggcatcatcgccatcttcaaggccgtgcaggtgagaaccgccctggccagaggcgacatggtgagcgccgagatcgccagcagagaggccagaaacttcagcttcatcagcctggccgtgggcatcgccgccatggtgctgtgcaccatcctgaccgtggtgatcatcatcgccgcccagcaccacgagaactactgggacccctag

SEQ ID NO: 105780 - DNA, 2004 bp, synthetic construct
  misc_feature 1..2004: note = Description of Artificial Sequence: Synthetic coding sequence
  source 1..2004: mol_type = other DNA
atggaggacctgagcagccccgacagcaccctgctgcagggcggccacaacctgctgagcagcgccagcttccaggaggccgtgaccttcaaggacgtgatcgtggacttcacccaggaggagtggaagcagctggaccccggccagagagacctgttcagagacgtgaccctggagaactacacccacctggtgagcatcggcctgcaggtgagcaagcccgacgtgatcagccagctggagcagggcaccgagccctggatcatggagcccagcatccccgtgggcacctgcgccgactgggagaccagactggagaacagcgtgagcgcccccgagcccgacatcagcgaggaggagctgagccccgaggtgatcgtggagaagcacaagagagacgacagctggagcagcaacctgctggagagctgggagtacgagggcagcctggagagacagcaggccaaccagcagaccctgcccaaggagatcaaggtgaccgagaagaccatccccagctgggagaagggccccgtgaacaacgagttcggcaagagcgtgaacgtgagcagcaacctggtgacccaggagcccagccccgaggagaccagcaccaagagaagcatcaagcagaacagcaaccccgtgaagaaggagaagagctgcaagtgcaacgagtgcggcaaggccttcagctactgcagcgccctgatcagacaccagagaacccacaccggcgagaagccctacaagtgcaacgagtgcgagaaggccttcagcagaagcgagaacctgatcaaccaccagagaatccacaccggcgacaagccctacaagtgcgaccagtgcggcaagggcttcatcgagggccccagcctgacccagcaccagagaatccacaccggcgagaagccctacaagtgcgacgagtgcggcaaggccttcagccagagaacccacctggtgcagcaccagagaatccacaccggcgagaagccctacacctgcaacgagtgcggcaaggccttcagccagagaggccacttcatggagcaccagaagatccacaccggcgagaagcccttcaagtgcgacgagtgcgacaagaccttcaccagaagcacccacctgacccagcaccagaagatccacaccggcgagaagacctacaagtgcaacgagtgcggcaaggccttcaacggccccagcaccttcatcagacaccacatgatccacaccggcgagaagccctacgagtgcaacgagtgcggcaaggccttcagccagcacagcaacctgacccagcaccagaagacccacacccaggagaaggcctacgagtgcaaggagtgcggcaaggccttcatcagaagcagcagcctggccaagcacgagagaatccacaccggcgagaagccctaccagtgccacgagtgcggcaagaccttcagctacggcagcagcctgatccagcacagaaagatccacaccggcgagagaccctacaagtgcaacgagtgcggcagagccttcaaccagaacatccacctgacccagcacaagagaatccacaccggcgccaagccctacgagtgcgccgagtgcggcaaggccttcagacactgcagcagcctggcccagcaccagaagacccacaccgaggagaagccctaccagtgcaacaagtgcgagaagaccttcagccagagcagccacctgacccagcaccagagaatccacaccggcgagaagccctacaagtgcaacgagtgcgacaaggccttcagcagaagcacccacctgaccgagcaccagaacacccacaccggcgagaagccctacaactgcaacgagtgcagaaagaccttcagccagagcacctacctgatccagcaccagagaatccacagcggcgagaagcccttcggctgcaacgactgcggcaagagcttcagatacagaagcgccctgaacaagcaccagagactgcaccccggcatctag

SEQ ID NO: 105781 - DNA, 2256 bp, synthetic construct
  misc_feature 1..2256: note = Description of Artificial Sequence: Synthetic coding sequence
  source 1..2256: mol_type = other DNA
atggaggacctgagcagccccgacagcaccctgctgcagggcggccacaacctgctgagcagcgccagcttccaggaggccgtgaccttcaaggacgtgatcgtggacttcacccaggaggagtggaagcagctggaccccggccagagagacctgttcagagacgtgaccctggagaactacacccacctggtgagcatcggcctgcaggtgagcaagcccgacgtgatcagccagctggagcagggcaccgagccctggatcatggagcccagcatccccgtgggcacctgcgccgactgggagaccagactggagaacagcgtgagcgcccccgagcccgacatcagcgaggaggagctgagccccgaggtgatcgtggagaagcacaagagagacgacagctggagcagcaacctgctggagagctgggagtacgagggcagcctggagagacagcaggccaaccagcagaccctgcccaaggagatcaaggtgaccgagaagaccatccccagctgggagaagggccccgtgaacaacgagttcggcaagagcgtgaacgtgagcagcaacctggtgacccaggagcccagccccgaggagaccagcaccaagagaagcatcaagcagaacagcaaccccgtgaagaaggagaagagctgcaagtgcaacgagtgcggcaaggccttcagctactgcagcgccctgatcagacaccagagaacccacaccggcgagaagccctacaagtgcaacgagtgcgagaaggccttcagcagaagcgagaacctgatcaaccaccagagaatccacaccggcgacaagccctacaagtgcgaccagtgcggcaagggcttcatcgagggccccagcctgacccagcaccagagaatccacaccggcgagaagccctacaagtgcgacgagtgcggcaaggccttcagccagagaacccacctggtgcagcaccagagaatccacaccggcgagaagccctacacctgcaacgagtgcggcaaggccttcagccagagaggccacttcatggagcaccagaagatccacaccggcgagaagcccttcaagtgcgacgagtgcgacaagaccttcaccagaagcacccacctgacccagcaccagaagatccacaccggcgagaagacctacaagtgcaacgagtgcggcaaggccttcaacggccccagcaccttcatcagacaccacatgatccacaccggcgagaagccctacgagtgcaacgagtgcggcaaggccttcagccagcacagcaacctgacccagcaccagaagacccacaccggcgagaagccctacgactgcgccgagtgcggcaagagcttcagctactggagcagcctggcccagcacctgaagatccacaccggcgagaagccctacaagtgcaacgagtgcggcaaggccttcagctactgcagcagcctgacccagcacagaagaatccacaccagagagaagcccttcgagtgcagcgagtgcggcaaggccttcagctacctgagcaacctgaaccagcaccagaagacccacacccaggagaaggcctacgagtgcaaggagtgcggcaaggccttcatcagaagcagcagcctggccaagcacgagagaatccacaccggcgagaagccctaccagtgccacgagtgcggcaagaccttcagctacggcagcagcctgatccagcacagaaagatccacaccggcgagagaccctacaagtgcaacgagtgcggcagagccttcaaccagaacatccacctgacccagcacaagagaatccacaccggcgccaagccctacgagtgcgccgagtgcggcaaggccttcagacactgcagcagcctggcccagcaccagaagacccacaccgaggagaagccctaccagtgcaacaagtgcgagaagaccttcagccagagcagccacctgacccagcaccagagaatccacaccggcgagaagccctacaagtgcaacgagtgcgacaaggccttcagcagaagcacccacctgaccgagcaccagaacacccacaccggcgagaagccctacaactgcaacgagtgcagaaagaccttcagccagagcacctacctgatccagcaccagagaatccacagcggcgagaagcccttcggctgcaacgactgcggcaagagcttcagatacagaagcgccctgaacaagcaccagagactgcaccccggcatctag

SEQ ID NO: 105782 - DNA, 234 bp, synthetic construct
  misc_feature 1..234: note = Description of Artificial Sequence: Synthetic coding sequence
  source 1..234: mol_type = other DNA
aaggccttcagccagagaacccacctggtgcagcaccagagaatccacaccggcgagaagccctacacctgcaacgagtgcggcaaggccttcagccagagaggccacttcatggagcaccagaagatccacaccggcgagaagcccttcaagtgcgacgagtgcgacaagaccttcaccagaagcacccacctgaccaccagcaagaacagctactggagaaagaacctgtag

SEQ ID NO: 105783 - DNA, 1755 bp, synthetic construct
  misc_feature 1..1755: note = Description of Artificial Sequence: Synthetic coding sequence
  source 1..1755: mol_type = other DNA
atgatggagaactacggcaacctggtgagcctggacgtgctgaacagagacaaggacgaggagcccaccgtgaagcaggagatcgaggagatcgaggaggaggtggagccccagggcgtgatcgtgaccagaatcaagagcgagatcgaccaggaccccatgggcagagagaccttcgagctggtgggcagactggacaagcagagaggcatcttcctgtgggagatccccagagagagcctgacccaggagcagagaatgttcagagagaacaccaacatcatcagaaagagacccaacagcgaggagaagtgccacaagtgcgaggagtgcggcaagggcttcgtgagaaaggcccacttcatccagcaccagagagtgcacaccggcgagaagcccttccagtgcaacgagtgcggcaagagcttcagcagaagcagcttcgtgatcgagcaccagagaatccacaccggcgagagaccctacgagtgcaactactgcggcaagaccttcagcgtgagcagcaccctgatcagacaccagagaatccacaccggcgagagaccctaccagtgcaaccagtgcaagcagagcttcagccagagaagaagcctggtgaagcaccagagaatccacaccggcgagaagccccacaagtgcagcgactgcggcaaggccttcagctggaagagccacctgatcgagcaccagagaacccacaccggcgagaagccctaccactgcaccaagtgcaagaagagcttcagcagaaacagcctgctggtggagcaccagagaatccacaccggcgagagaccccacaagtgcggcgagtgcggcaaggccttcagactgagcacctacctgatccagcaccagaagatccacaccggcgagaagcccttcctgtgcatcgagtgcggcaagagcttcagcagaagcagcttcctgatcgagcaccagagaatccacaccggcgagagaccctaccagtgcaaggagtgcggcaagagcttcagccagctgtgcaacctgaccagacaccagagaatccacaccggcgacaagccccacaagtgcgaggagtgcggcaaggccttcagcagaagcagcggcctgatccagcaccagagaatccacaccagagagaagacctacccctacaacgagaccaaggagagcttcgaccccaactgcagcctggtgatccagcaggaggtgtaccccaaggagaagagctacaagtgcgacgagtgcggcaagaccttcagcgtgagcgcccacctggtgcagcaccagagaatccacaccggcgagaagccctacctgtgcaccgtgtgcggcaagagcttcagcagaagcagcttcctgatcgagcaccagagaatccacaccggcgagagaccctacctgtgcagacagtgcggcaagagcttcagccagctgtgcaacctgatcagacaccagggcgtgcacaccggcaacaagccccacaagtgcgacgagtgcggcaaggccttcagcagaaacagcggcctgatccagcaccagagaatccacaccggcgagaagccctacaagtgcgagaagtgcgacaagagcttcagccagcagagaagcctggtgaaccaccagaagatccacgccgaggtgaagacccaggagacccacgagtgcgacgcctgcggcgaggccttcaactgcagaatcagcctgatccagcaccagaagctgcacaccgcctggatgcagtag

SEQ ID NO: 105784 - DNA, 1881 bp, synthetic construct
  misc_feature 1..1881: note = Description of Artificial Sequence: Synthetic coding sequence
  source 1..1881: mol_type = other DNA
atggccagccccagccccccccccgagagcaagggcctgctgaccttcgaggacgtggccgtgttcttcacccaggaggagtgggactacctggaccccgcccagagaagcctgtacaaggacgtgatgatggagaactacggcaacctggtgagcctggacgtgctgaacagagacaaggacgaggagcccaccgtgaagcaggagatcgaggagatcgaggaggaggtggagccccagggcgtgatcgtgaccagaatcaagagcgagatcgaccaggaccccatgggcagagagaccttcgagctggtgggcagactggacaagcagagaggcatcttcctgtgggagatccccagagagagcctgacccaggagcagagaatgttcagagagaacaccaacatcatcagaaagagacccaacagcgaggagaagtgccacaagtgcgaggagtgcggcaagggcttcgtgagaaaggcccacttcatccagcaccagagagtgcacaccggcgagaagcccttccagtgcaacgagtgcggcaagagcttcagcagaagcagcttcgtgatcgagcaccagagaatccacaccggcgagagaccctacgagtgcaactactgcggcaagaccttcagcgtgagcagcaccctgatcagacaccagagaatccacaccggcgagagaccctaccagtgcaaccagtgcaagcagagcttcagccagagaagaagcctggtgaagcaccagagaatccacaccggcgagaagccccacaagtgcagcgactgcggcaaggccttcagctggaagagccacctgatcgagcaccagagaacccacaccggcgagaagccctaccactgcaccaagtgcaagaagagcttcagcagaaacagcctgctggtggagcaccagagaatccacaccggcgagagaccccacaagtgcggcgagtgcggcaaggccttcagactgagcacctacctgatccagcaccagaagatccacaccggcgagaagcccttcctgtgcatcgagtgcggcaagagcttcagcagaagcagcttcctgatcgagcaccagagaatccacaccggcgagagaccctaccagtgcaaggagtgcggcaagagcttcagccagctgtgcaacctgaccagacaccagagaatccacaccggcgacaagccccacaagtgcgaggagtgcggcaaggccttcagcagaagcagcggcctgatccagcaccagagaatccacaccagagagaagacctacccctacaacgagaccaaggagagcttcgaccccaactgcagcctggtgatccagcaggaggtgtaccccaaggagaagagctacaagtgcgacgagtgcggcaagaccttcagcgtgagcgcccacctggtgcagcaccagagaatccacaccggcgagaagccctacctgtgcaccgtgtgcggcaagagcttcagcagaagcagcttcctgatcgagcaccagagaatccacaccggcgagagaccctacctgtgcagacagtgcggcaagagcttcagccagctgtgcaacctgatcagacaccagggcgtgcacaccggcaacaagccccacaagtgcgacgagtgcggcaaggccttcagcagaaacagcggcctgatccagcaccagagaatccacaccggcgagaagccctacaagtgcgagaagtgcgacaagagcttcagccagcagagaagcctggtgaaccaccagaagatccacgccgaggtgaagacccaggagacccacgagtgcgacgcctgcggcgaggccttcaactgcagaatcagcctgatccagcaccagaagctgcacaccgcctggatgcagtag

SEQ ID NO: 105785 - DNA, 1839 bp, synthetic construct
  misc_feature 1..1839: note = Description of Artificial Sequence: Synthetic coding sequence
  source 1..1839: mol_type = other DNA
atggccagccccagccccccccccgagagcaaggaggagtgggactacctggaccccgcccagagaagcctgtacaaggacgtgatgatggagaactacggcaacctggtgagcctggacgtgctgaacagagacaaggacgaggagcccaccgtgaagcaggagatcgaggagatcgaggaggaggtggagccccagggcgtgatcgtgaccagaatcaagagcgagatcgaccaggaccccatgggcagagagaccttcgagctggtgggcagactggacaagcagagaggcatcttcctgtgggagatccccagagagagcctgacccaggagcagagaatgttcagagagaacaccaacatcatcagaaagagacccaacagcgaggagaagtgccacaagtgcgaggagtgcggcaagggcttcgtgagaaaggcccacttcatccagcaccagagagtgcacaccggcgagaagcccttccagtgcaacgagtgcggcaagagcttcagcagaagcagcttcgtgatcgagcaccagagaatccacaccggcgagagaccctacgagtgcaactactgcggcaagaccttcagcgtgagcagcaccctgatcagacaccagagaatccacaccggcgagagaccctaccagtgcaaccagtgcaagcagagcttcagccagagaagaagcctggtgaagcaccagagaatccacaccggcgagaagccccacaagtgcagcgactgcggcaaggccttcagctggaagagccacctgatcgagcaccagagaacccacaccggcgagaagccctaccactgcaccaagtgcaagaagagcttcagcagaaacagcctgctggtggagcaccagagaatccacaccggcgagagaccccacaagtgcggcgagtgcggcaaggccttcagactgagcacctacctgatccagcaccagaagatccacaccggcgagaagcccttcctgtgcatcgagtgcggcaagagcttcagcagaagcagcttcctgatcgagcaccagagaatccacaccggcgagagaccctaccagtgcaaggagtgcggcaagagcttcagccagctgtgcaacctgaccagacaccagagaatccacaccggcgacaagccccacaagtgcgaggagtgcggcaaggccttcagcagaagcagcggcctgatccagcaccagagaatccacaccagagagaagacctacccctacaacgagaccaaggagagcttcgaccccaactgcagcctggtgatccagcaggaggtgtaccccaaggagaagagctacaagtgcgacgagtgcggcaagaccttcagcgtgagcgcccacctggtgcagcaccagagaatccacaccggcgagaagccctacctgtgcaccgtgtgcggcaagagcttcagcagaagcagcttcctgatcgagcaccagagaatccacaccggcgagagaccctacctgtgcagacagtgcggcaagagcttcagccagctgtgcaacctgatcagacaccagggcgtgcacaccggcaacaagccccacaagtgcgacgagtgcggcaaggccttcagcagaaacagcggcctgatccagcaccagagaatccacaccggcgagaagccctacaagtgcgagaagtgcgacaagagcttcagccagcagagaagcctggtgaaccaccagaagatccacgccgaggtgaagacccaggagacccacgagtgcgacgcctgcggcgaggccttcaactgcagaatcagcctgatccagcaccagaagctgcacaccgcctggatgcagtag

SEQ ID NO: 105786 - DNA, 1377 bp, synthetic construct
  misc_feature 1..1377: note = Description of Artificial Sequence: Synthetic coding sequence
  source 1..1377: mol_type = other DNA
atggccgccatgcccctgaaggcccagtaccaggagatggtgaccttcgaggacgtggccgtgcacttcaccaagaccgagtggaccggcctgagccccgcccagagagccctgtacagaagcgtgatgctggagaacttcggcaacctgaccgccctgggctaccccgtgcccaagcccgccctgatcagcctgctggagagaggcgacatggcctggggcctggaggcccaggacgacccccccgccgagagaaccaagaacgtgtgcaaggacgtggagaccaacatcgacagcgagagcaccctgatccagggcatcagcgaggagagagacggcatgatgagccacggccagctgaagagcgtgccccagagaaccgacttccccgagaccagaaacgtggagaagcaccaggacatccccaccgtgaagaacatccagggcaaggtgcccagaatcccctgcgccagaaagcccttcatctgcgaggagtgcggcaagagcttcagctacttcagctactacgccagacaccagagaatccacaccggcgagaagcccttcgagtgcagcgagtgcggcaaggccttcaacggcaacagcagcctgatcagacaccagagaatccacaccggcgagagaccctaccagtgcgaggagtgcggcagagccttcaacgacaacgccaacctgatcagacaccagagaatccacagcggcgacagaccctactactgcaccgagtgcggcaacagcttcaccagcagcagcgagttcgtgatccaccagagaatccacaccggcgagaagccctacgagtgcaacgagtgcggcaaggccttcgtgggcaacagccccctgctgagacaccagaagatccacaccggcgagaagccctacgagtgcaacgagtgcggcaagagcttcggcagaaccagccacctgagccagcaccagagaatccacaccggcgagaagccctacagctgcaaggtgtgcggccaggccttcaacttccacaccaagctgaccagacaccagagaatccacagcgaggagaagcccttcgactgcgtggactgcggcaaggccttcagcgcccaggagcagctgaagagacacctgagaatccacacccaggagagcagctacgtgtgcgacgagtgcggcaaggccctgaccagcaagagaaacctgcaccagcaccagagaatccacaccggcgagaagccctacgagtgcagcaagtacgagaaggccttcggcaccagcagccagctgggccacctggagcacgtgtacagcggcgagaagcccgtgctggacatctgcagattcggcctgcccgagttcttcacccccttctactggtag

SEQ ID NO: 105787 - DNA, 1737 bp, synthetic construct
  misc_feature 1..1737: note = Description of Artificial Sequence: Synthetic coding sequence
  source 1..1737: mol_type = other DNA
atggccgaggagagcagaaagcccagcgcccccagcccccccgaccagacccccgaggaggacctggtgatcgtgaaggtggaggaggaccacggctgggaccaggagagcagcctgcacgagagcaaccccctgggccaggaggtgttcagactgagattcagacagctgagataccaggagaccctgggccccagagaggccctgatccagctgagagccctgtgccaccagtggctgagacccgacctgaacaccaaggagcagatcctggagctgctggtgctggagcagttcctgaccatcctgcccgaggagctgcagaccctggtgaaggagcaccagctggagaacggcgaggaggtggtgaccctgctggaggacctggagagacagatcgacatcctgggcagacccgtgagcgccagagtgcacggccacagagtgctgtgggaggaggtggtgcacagcgccagcgcccccgagccccccaacacccagctgcagagcgaggccacccagcacaagagccccgtgccccaggagagccaggagagagccatgagcaccagccagagccccaccagaagccagaagggcagcagcggcgaccaggagatgaccgccaccctgctgaccgccggcttccagaccctggagaagatcgaggacatggccgtgagcctgatcagagaggagtggctgctggaccccagccagaaggacctgtgcagagacaacagacccgagaacttcagaaacatgttcagcctgggcggcgagaccagaagcgagaacagagagctggccagcaagcaggtgatcagcaccggcatccagccccacggcgagaccgccgccaagtgcaacggcgacgtgatcagaggcctggagcacgaggaggccagagacctgctgggcagactggagagacagagaggcaaccccacccaggagagaagacacaagtgcgacgagtgcggcaagagcttcgcccagagcagcggcctggtgagacactggagaatccacaccggcgagaagccctaccagtgcaacgtgtgcggcaaggccttcagctacagaagcgccctgctgagccaccaggacatccacaacaaggtgaagagataccactgcaaggagtgcggcaaggccttcagccagaacaccggcctgatcctgcaccagagaatccacaccggcgagaagccctaccagtgcaaccagtgcggcaaggccttcagccagagcgccggcctgatcctgcaccagagaatccacagcggcgagagaccctacgagtgcaacgagtgcggcaaggccttcagccacagcagccacctgatcggccaccagagaatccacaccggcgagaagccctacgagtgcgacgagtgcggcaagaccttcagaagaagcagccacctgatcggccaccagagaagccacaccggcgagaagccctacaagtgcaacgagtgcggcagagccttcagccagaagagcggcctgatcgagcaccagagaatccacaccggcgagagaccctacaagtgcaaggagtgcggcaaggccttcaacggcaacaccggcctgatccagcacctgagaatccacaccggcgagaagccctaccagtgcaacgagtgcggcaaggccttcatccagagaagcagcctgatcagacaccagagaatccacagcggcgagaagagcgagagcatcagcgtgtag

SEQ ID NO: 105788 - DNA, 1737 bp, synthetic construct; identical to SEQ ID NO: 105787
  misc_feature 1..1737: note = Description of Artificial Sequence: Synthetic coding sequence
  source 1..1737: mol_type = other DNA

SEQ ID NO: 105789 - DNA, 477 bp, synthetic construct
  misc_feature 1..477: note = Description of Artificial Sequence: Synthetic coding sequence
  source 1..477: mol_type = other DNA
atggccgaggagagcagaaagcccagcgcccccagcccccccgaccagacccccgaggaggacctggtgatcgtgaaggtggaggaggaccacggctgggaccaggagagcagcctgcacgagagcaaccccctgggccaggaggtgttcagactgagattcagacagctgagataccaggagaccctgggccccagagaggccctgatccagctgagagccctgtgccaccagtggctgagacccgacctgaacaccaaggagcagatcctggagctgctggtgctggagcagttcctgaccatcctgcccgaggagctgcagaccctggtgaaggagcaccagctggagaacggcgaggaggtggtgaccctgctggaggacctggagagacagatcgacatcctgggcagacccgtgagcagaagaagaagccagctggcctacatggacatcggctacagcggcagaagatag

SEQ ID NO: 105790 - DNA, 1185 bp, synthetic construct
  misc_feature 1..1185: note = Description of Artificial Sequence: Synthetic coding sequence
  source 1..1185: mol_type = other DNA
atgaacaccaacagcaaggaggtgctgagcctgggcgtgcaggtgcccgaggcctgggaggagctgctgaccatgaaggtggaggccaagagccacctgcagtggcaggagagcagactgaagagaagcaaccccctggccagagagatcttcagaagacacttcagacagctgtgctaccaggagacccccggccccagagaggccctgaccagactgcaggagctgtgctaccagtggctgagaccccacgtgagcaccaaggagcagatcctggacctgctggtgctggagcagttcctgagcatcctgcccaaggagctgcagggctgggtgagagagcactgccccgagagcggcgaggaggccgtgatcctgctggaggacctggagagagagctggacgagccccagcacgagatggtggcccacagacacagacaggaggtgctgtgcaaggagatggtgcccctggccgagcagacccccctgaccctgcagagccagcccaaggagccccagctgacctgcgacagcgcccagaagtgccacagcatcggcgagaccgacgaggtgaccaagaccgaggacagagagctggtgctgagaaaggactgccccaagatcgtggagccccacggcaagatgttcaacgagcagacctgggaggtgagccagcaggaccccagccacggcgaggtgggcgagcacaaggacagaatcgagagacagtggggcaacctgctgggcgagggccagcacaagtgcgacgagtgcggcaagagcttcacccagagcagcggcctgatcagacaccagagaatccacaccggcgagagaccctacgagtgcaacgagtgcggcaaggccttcagcagaagcagcggcctgttcaaccacagaggcatccacaacatccagaagagataccactgcaaggagtgcggcaaggtgttcagccagagcgccggcctgatccagcaccagagaatccacaagggcgagaagccctaccagtgcagccagtgcagcaagagctacagcagaagaagcttcctgatcgagcaccagagaagccacaccggcgagagaccccaccagtgcatcgagtgcggcaagagcttcaacagacactgcaacctgatcagacaccagaagatccacaccgtggccgagctggtgtag

SEQ ID NO: 105791 - DNA, 126 bp, synthetic construct
  misc_feature 1..126: note = Description of Artificial Sequence: Synthetic coding sequence
  source 1..126: mol_type = other DNA
atgaacaccaacagcaaggaggtgctgagcctgggcgtgcaggtgcccgaggcctgggaggagctgctgaccatgaaggtggaggccaagagccacctgcagtggcaggagagcagactgaagtag

SEQ ID NO: 105792 - DNA, 1185 bp, synthetic construct; identical to SEQ ID NO: 105790
  misc_feature 1..1185: note = Description of Artificial Sequence: Synthetic coding sequence
  source 1..1185: mol_type = other DNA

SEQ ID NO: 105793 - DNA, 1338 bp, synthetic construct
  misc_feature 1..1338: note = Description of Artificial Sequence: Synthetic coding sequence
  source 1..1338: mol_type = other DNA
atgaacaccaacagcaaggaggtgctgagcctgggcgtgcaggtgcccgaggcctgggaggagctgctgaccatgaaggtggaggccaagagccacctgcagtggcaggagagcagactgaagagaagcaaccccctggccagagagatcttcagaagacacttcagacagctgtgctaccaggagacccccggccccagagaggccctgaccagactgcaggagctgtgctaccagtggctgagaccccacgtgagcaccaaggagcagatcctggacctgctggtgctggagcagttcctgagcatcctgcccaaggagctgcagggctgggtgagagagcactgccccgagagcggcgaggaggccgtgatcctgctggaggacctggagagagagctggacgagccccagcacgagatggtggcccacagacacagacaggaggtgctgtgcaaggagatggtgcccctggccgagcagacccccctgaccctgcagagccagcccaaggagccccagctgacctgcgacagcgcccagaagtgccacagcatcggcgagaccgacctgatcagaagcctgagaagaagagccgtgctgatccccctgggcgcccacctgttcagcaccgacaccttcctgttcagcaagcccgtggtgatcccccagctgaagggcggcggcgagacctggcccaacaacagaggcgtgctgagagacgaggtgaccaagaccgaggacagagagctggtgctgagaaaggactgccccaagatcgtggagccccacggcaagatgttcaacgagcagacctgggaggtgagccagcaggaccccagccacggcgaggtgggcgagcacaaggacagaatcgagagacagtggggcaacctgctgggcgagggccagcacaagtgcgacgagtgcggcaagagcttcacccagagcagcggcctgatcagacaccagagaatccacaccggcgagagaccctacgagtgcaacgagtgcggcaaggccttcagcagaagcagcggcctgttcaaccacagaggcatccacaacatccagaagagataccactgcaaggagtgcggcaaggtgttcagccagagcgccggcctgatccagcaccagagaatccacaagggcgagaagccctaccagtgcagccagtgcagcaagagctacagcagaagaagcttcctgatcgagcaccagagaagccacaccggcgagagaccccaccagtgcatcgagtgcggcaagagcttcaacagacactgcaacctgatcagacaccagaagatccacaccgtggccgagctggtgtag

SEQ ID NO: 105794 - DNA, 1821 bp, synthetic construct
  misc_feature 1..1821: note = Description of Artificial Sequence: Synthetic coding sequence
  source 1..1821: mol_type = other DNA
atgaccctgctgaccttcagagacgtggccatcgagttcagcctggaggagtggaagtgcctggacctggcccagcagaacctgtacagagacgtgatgctggagaactacagaaacctgttcagcgtgggcctgaccgtgtgcaagcccggcctgatcacctgcctggagcagagaaaggagccctggaacgtgaagagacaggaggccgccgacggccaccccgagatgggcttccaccacgccacccaggcctgcctggagctgctgggcagcagcgacctgcccgccagcgccagccagagcgccggcatcaccggcgtgaaccacagagcccagcccggcctgaacgtgagcgtggacaagttcaccgccatgagcagccacttcacccaggacctgctgcccgagcagggcatccaggacgccttccccaagagaatcctgagaggctacggcaactgcggcctggacaacctgtacctgagaaaggactgggagagcctggacgagtgcaagctgcagaaggactacaacggcctgaaccagtgcagcagcaccacccacagcaagatcttccagtacaacaagtacgtgaagatcttcgacaacttcagcaacctgcacagaagaaacatcagcaacaccggcgagaagcccttcaagtgccaggagtgcggcaagagcttccagatgctgagcttcctgaccgagcaccagaagatccacaccggcaagaagttccagaagtgcggcgagtgcggcaagaccttcatccagtgcagccacttcaccgagcccgagaacatcgacaccggcgagaagccctacaagtgccaggagtgcaacaacgtgatcaagacctgcagcgtgctgaccaagaacagaatctacgccggcggcgagcactacagatgcgaggagttcggcaaggtgttcaaccagtgcagccacctgaccgagcacgagcacggcaccgaggagaagccctgcaagtacgaggagtgcagcagcgtgttcatcagctgcagcagcctgagcaaccagcagatgatcctggccggcgagaagctgagcaagtgcgagacctggtacaagggcttcaaccacagccccaaccccagcaagcaccagagaaacgagatcggcggcaagcccttcaagtgcgaggagtgcgacagcatcttcaagtggttcagcgacctgaccaagcacaagagaatccacaccggcgagaagccctacaagtgcgacgagtgcggcaaggcctacacccagagcagccacctgagcgagcacagaagaatccacaccggcgagaagccctaccagtgcgaggagtgcggcaaggtgttcagaacctgcagcagcctgagcaaccacaagagaacccacagcgaggagaagccctacacctgcgaggagtgcggcaacatcttcaagcagctgagcgacctgaccaagcacaagaagacccacaccggcgagaagccctacaagtgcgacgagtgcggcaagaacttcacccagagcagcaacctgatcgtgcacaagagaatccacaccggcgagaagccctacaagtgcgaggagtgcggcagagtgttcatgtggttcagcgacatcaccaagcacaagaagacccacaccggcgagaagccctacaagtgcgacgagtgcggcaagaacttcacccagagcagcaacctgatcgtgcacaagagaatccacaccggcgagaagccctacaagtgcgagaagtgcggcaaggccttcacccagttcagccacctgaccgtgcacgagagcatccacacctag

SEQ ID NO: 105795 - DNA, 1686 bp, synthetic construct
  misc_feature 1..1686: note = Description of Artificial Sequence: Synthetic coding sequence
  source 1..1686: mol_type = other DNA
atggccggcgcccagaccctgctgaccttcagagacgtggccatcgagttcagcctggaggagtggaagtgcctggacctggcccagcagaacctgtacagagacgtgatgctggagaactacagaaacctgttcagcgtgggcctgaccgtgtgcaagcccggcctgatcacctgcctggagcagagaaaggagccctggaacgtgaagagacaggaggccgccgacggccaccccgccatgagcagccacttcacccaggacctgctgcccgagcagggcatccaggacgccttccccaagagaatcctgagaggctacggcaactgcggcctggacaacctgtacctgagaaaggactgggagagcctggacgagtgcaagctgcagaaggactacaacggcctgaaccagtgcagcagcaccacccacagcaagatcttccagtacaacaagtacgtgaagatcttcgacaacttcagcaacctgcacagaagaaacatcagcaacaccggcgagaagcccttcaagtgccaggagtgcggcaagagcttccagatgctgagcttcctgaccgagcaccagaagatccacaccggcaagaagttccagaagtgcggcgagtgcggcaagaccttcatccagtgcagccacttcaccgagcccgagaacatcgacaccggcgagaagccctacaagtgccaggagtgcaacaacgtgatcaagacctgcagcgtgctgaccaagaacagaatctacgccggcggcgagcactacagatgcgaggagttcggcaaggtgttcaaccagtgcagccacctgaccgagcacgagcacggcaccgaggagaagccctgcaagtacgaggagtgcagcagcgtgttcatcagctgcagcagcctgagcaaccagcagatgatcctggccggcgagaagctgagcaagtgcgagacctggtacaagggcttcaaccacagccccaaccccagcaagcaccagagaaacgagatcggcggcaagcccttcaagtgcgaggagtgcgacagcatcttcaagtggttcagcgacctgaccaagcacaagagaatccacaccggcgagaagccctacaagtgcgacgagtgcggcaaggcctacacccagagcagccacctgagcgagcacagaagaatccacaccggcgagaagccctaccagtgcgaggagtgcggcaaggtgttcagaacctgcagcagcctgagcaaccacaagagaacccacagcgaggagaagccctacacctgcgaggagtgcggcaacatcttcaagcagctgagcgacctgaccaagcacaagaagacccacaccggcgagaagccctacaagtgcgacgagtgcggcaagaacttcacccagagcagcaacctgatcgtgcacaagagaatccacaccggcgagaagccctacaagtgcgaggagtgcggcagagtgttcatgtggttcagcgacatcaccaagcacaagaagacccacaccggcgagaagccctacaagtgcgacgagtgcggcaagaacttcacccagagcagcaacctgatcgtgcacaagagaatccacaccggcgagaagccctacaagtgcgagaagtgcggcaaggccttcacccagttcagccacctgaccgtgcacgagagcatccacacctag

SEQ ID NO: 105796 - DNA, 1674 bp, synthetic construct
  misc_feature 1..1674: note = Description of Artificial Sequence: Synthetic coding sequence
  source 1..1674: mol_type = other DNA
atgaccctgctgaccttcagagacgtggccatcgagttcagcctggaggagtggaagtgcctggacctggcccagcagaacctgtacagagacgtgatgctggagaactacagaaacctgttcagcgtgggcctgaccgtgtgcaagcccggcctgatcacctgcctggagcagagaaaggagccctggaacgtgaagagacaggaggccgccgacggccaccccgccatgagcagccacttcacccaggacctgctgcccgagcagggcatccaggacgccttccccaagagaatcctgagaggctacggcaactgcggcctggacaacctgtacctgagaaaggactgggagagcctggacgagtgcaagctgcagaaggactacaacggcctgaaccagtgcagcagcaccacccacagcaagatcttccagtacaacaagtacgtgaagatcttcgacaacttcagcaacctgcacagaagaaacatcagcaacaccggcgagaagcccttcaagtgccaggagtgcggcaagagcttccagatgctgagcttcctgaccgagcaccagaagatccacaccggcaagaagttccagaagtgcggcgagtgcggcaagaccttcatccagtgcagccacttcaccgagcccgagaacatcgacaccggcgagaagccctacaagtgccaggagtgcaacaacgtgatcaagacctgcagcgtgctgaccaagaacagaatctacgccggcggcgagcactacagatgcgaggagttcggcaaggtgttcaaccagtgcagccacctgaccgagcacgagcacggcaccgaggagaagccctgcaagtacgaggagtgcagcagcgtgttcatcagctgcagcagcctgagcaaccagcagatgatcctggccggcgagaagctgagcaagtgcgagacctggtacaagggcttcaaccacagccccaaccccagcaagcaccagagaaacgagatcggcggcaagcccttcaagtgcgaggagtgcgacagcatcttcaagtggttcagcgacctgaccaagcacaagagaatccacaccggcgagaagccctacaagtgcgacgagtgcggcaaggcctacacccagagcagccacctgagcgagcacagaagaatccacaccggcgagaagccctaccagtgcgaggagtgcggcaaggtgttcagaacctgcagcagcctgagcaaccacaagagaacccacagcgaggagaagccctacacctgcgaggagtgcggcaacatcttcaagcagctgagcgacctgaccaagcacaagaagacccacaccggcgagaagccctacaagtgcgacgagtgcggcaagaacttcacccagagcagcaacctgatcgtgcacaagagaatccacaccggcgagaagccctacaagtgcgaggagtgcggcagagtgttcatgtggttcagcgacatcaccaagcacaagaagacccacaccggcgagaagccctacaagtgcgacgagtgcggcaagaacttcacccagagcagcaacctgatcgtgcacaagagaatccacaccggcgagaagccctacaagtgcgagaagtgcggcaaggccttcacccagttcagccacctgaccgtgcacgagagcatccacacctag

SEQ ID NO: 105797 - DNA, 1890 bp, synthetic construct
  misc_feature 1..1890: note = Description of Artificial Sequence: Synthetic coding sequence
  source 1..1890: mol_type = other DNA
atgaccctgctgaccttcagagacgtggccatcgagttcagcctggaggagtggaagtgcctggacctggcccagcagaacctgtacagagacgtgatgctggagaactacagaaacctgttcagcgtgggcctgaccgtgtgcaagcccggcctgatcacctgcctggagcagagaaaggagccctggaacgtgaagagacaggaggccgccgacggccaccccgagatgggcttccaccacgccacccaggcctgcctggagctgctgggcagcagcgacctgcccgccagcgccagccagagcgccggcatcaccggcgtgaaccacagagcccagcccggcctgaacgtgagcgtggacaagttcaccgccctgtgcagccccggcgtgctgcagaccgtgaagtggttcctggagttcagatgcatcttcagcctggccatgagcagccacttcacccaggacctgctgcccgagcagggcatccaggacgccttccccaagagaatcctgagaggctacggcaactgcggcctggacaacctgtacctgagaaaggactgggagagcctggacgagtgcaagctgcagaaggactacaacggcctgaaccagtgcagcagcaccacccacagcaagatcttccagtacaacaagtacgtgaagatcttcgacaacttcagcaacctgcacagaagaaacatcagcaacaccggcgagaagcccttcaagtgccaggagtgcggcaagagcttccagatgctgagcttcctgaccgagcaccagaagatccacaccggcaagaagttccagaagtgcggcgagtgcggcaagaccttcatccagtgcagccacttcaccgagcccgagaacatcgacaccggcgagaagccctacaagtgccaggagtgcaacaacgtgatcaagacctgcagcgtgctgaccaagaacagaatctacgccggcggcgagcactacagatgcgaggagttcggcaaggtgttcaaccagtgcagccacctgaccgagcacgagcacggcaccgaggagaagccctgcaagtacgaggagtgcagcagcgtgttcatcagctgcagcagcctgagcaaccagcagatgatcctggccggcgagaagctgagcaagtgcgagacctggtacaagggcttcaaccacagccccaaccccagcaagcaccagagaaacgagatcggcggcaagcccttcaagtgcgaggagtgcgacagcatcttcaagtggttcagcgacctgaccaagcacaagagaatccacaccggcgagaagccctacaagtgcgacgagtgcggcaaggcctacacccagagcagccacctgagcgagcacagaagaatccacaccggcgagaagccctaccagtgcgaggagtgcggcaaggtgttcagaacctgcagcagcctgagcaaccacaagagaacccacagcgaggagaagccctacacctgcgaggagtgcggcaacatcttcaagcagctgagcgacctgaccaagcacaagaagacccacaccggcgagaagccctacaagtgcgacgagtgcggcaagaacttcacccagagcagcaacctgatcgtgcacaagagaatccacaccggcgagaagccctacaagtgcgaggagtgcggcagagtgttcatgtggttcagcgacatcaccaagcacaagaagacccacaccggcgagaagccctacaagtgcgacgagtgcggcaagaacttcacccagagcagcaacctgatcgtgcacaagagaatccacaccggcgagaagccctacaagtgcgagaagtgcggcaaggccttcacccagttcagccacctgaccgtgcacgagagcatccacacctag

SEQ ID NO: 105798 - DNA, 1686 bp, synthetic construct; identical to SEQ ID NO: 105795
  misc_feature 1..1686: note = Description of Artificial Sequence: Synthetic coding sequence
  source 1..1686: mol_type = other DNA

SEQ ID NO: 105799 - DNA, 1833 bp, synthetic construct
  misc_feature 1..1833: note = Description of Artificial Sequence: Synthetic coding sequence
  source 1..1833: mol_type = other DNA
atggccggcgcccagaccctgctgaccttcagagacgtggccatcgagttcagcctggaggagtggaagtgcctggacctggcccagcagaacctgtacagagacgtgatgctggagaactacagaaacctgttcagcgtgggcctgaccgtgtgcaagcccggcctgatcacctgcctggagcagagaaaggagccctggaacgtgaagagacaggaggccgccgacggccaccccgagatgggcttccaccacgccacccaggcctgcctggagctgctgggcagcagcgacctgcccgccagcgccagccagagcgccggcatcaccggcgtgaaccacagagcccagcccggcctgaacgtgagcgtggacaagttcaccgccatgagcagccacttcacccaggacctgctgcccgagcagggcatccaggacgccttccccaagagaatcctgagaggctacggcaactgcggcctggacaacctgtacctgagaaaggactgggagagcctggacgagtgcaagctgcagaaggactacaacggcctgaaccagtgcagcagcaccacccacagcaagatcttccagtacaacaagtacgtgaagatcttcgacaacttcagcaacctgcacagaagaaacatcagcaacaccggcgagaagcccttcaagtgccaggagtgcggcaagagcttccagatgctgagcttcctgaccgagcaccagaagatccacaccggcaagaagttccagaagtgcggcgagtgcggcaagaccttcatccagtgcagccacttcaccgagcccgagaacatcgacaccggcgagaagccctacaagtgccaggagtgcaacaacgtgatcaagacctgcagcgtgctgaccaagaacagaatctacgccggcggcgagcactacagatgcgaggagttcggcaaggtgttcaaccagtgcagccacctgaccgagcacgagcacggcaccgaggagaagccctgcaagtacgaggagtgcagcagcgtgttcatcagctgcagcagcctgagcaaccagcagatgatcctggccggcgagaagctgagcaagtgcgagacctggtacaagggcttcaaccacagccccaaccccagcaagcaccagagaaacgagatcggcggcaagcccttcaagtgcgaggagtgcgacagcatcttcaagtggttcagcgacctgaccaagcacaagagaatccacaccggcgagaagccctacaagtgcgacgagtgcggcaaggcctacacccagagcagccacctgagcgagcacagaagaatccacaccggcgagaagccctaccagtgcgaggagtgcggcaaggtgttcagaacctgcagcagcctgagcaaccacaagagaacccacagcgaggagaagccctacacctgcgaggagtgcggcaacatcttcaagcagctgagcgacctgaccaagcacaagaagacccacaccggcgagaagccctacaagtgcgacgagtgcggcaagaacttcacccagagcagcaacctgatcgtgcacaagagaatccacaccggcgagaagccctacaagtgcgaggagtgcggcagagtgttcatgtggttcagcgacatcaccaagcacaagaagacccacaccggcgagaagccctacaagtgcgacgagtgcggcaagaacttcacccagagcagcaacctgatcgtgcacaagagaatccacaccggcgagaagccctacaagtgcgagaagtgcggcaaggccttcacccagttcagccacctgaccgtgcacgagagcatccacacctag

SEQ ID NO: 105800 - DNA, 396 bp, synthetic construct
  misc_feature 1..396: note = Description of Artificial Sequence: Synthetic coding sequence
  source 1..396: mol_type = other DNA
atggccggcgcccagaccctgctgaccttcagagacgtggccatcgagttcagcctggaggagtggaagtgcctggacctggcccagcagaacctgtacagagacgtgatgctggagaactacagaaacctgttcagcgtgggcctgaccgtgtgcaagcccggcctgatcacctgcctggagcagagaaaggagccctggaacgtgaagagacaggaggccgccgacggccaccccgccatgagcagccacttcacccaggacctgctgcccgagcagggcatccaggacgccttccccaagagaatcctgagaggctacggcaactgcggcctggacaacctgtacctgagaaaggactgggagagcctggacgagtgcaagctgcagaagtag

SEQ ID NO: 105801 - DNA, 348 bp, synthetic construct
  misc_feature 1..348: note = Description of Artificial Sequence: Synthetic coding sequence
  source 1..348: mol_type = other DNA
atggccggcgcccagaccctgctgaccttcagagacgtggccatcgagttcagcctggaggagtggaagtgcctggacctggcccagcagaacctgtacagagacgtgatgctggagaactacagaaacctgttcagcgtgggcctgaccgtgtgcaagcccggcctgatcacctgcctggagcagagaaaggagccctggaacgtgaagagacaggaggccgccgacggccaccccgagatgggcttccaccacgccacccaggcctgcctggagctgctgggcagcagcgacctgcccgccagcgccagccagagcgccggcatcaccggcgtgaaccacagatag

SEQ ID NO: 105802 - DNA, 1281 bp, synthetic construct
  misc_feature 1..1281: note = Description of Artificial Sequence: Synthetic coding sequence
  source 1..1281: mol_type = other DNA
atggccgccgtgagccccaccaccagatgccaggagagcgtgaccttcgaggacgtggccgtggtgttcaccgacgaggagtggagcagactggtgcccatccagagagacctgtacaaggaggtgatgctggagaactacaacagcatcgtgagcctgggcctgcccgtgccccagcccgacgtgatcttccagctgaagagaggcgacaagccctggatggtggacctgcacggcagcgaggagagagagtggcccgagagcgtgagcctggactgggagaccaagcccgagatccacgacgccagcgacaagaagagcgagggcagcctgagagagtgcctgggcagacagagccccctgtgccccaagttcgaggtgcacacccccaacggcagaatgggcaccgagaagcagagccccagcggcgagaccagaaagaagagcctgagcagagacaagggcctgagaagaagaagaagcgccctgagcagagagatcctgaccaaggagagacaccaggagtgcagcgactgcggcaagaccttcttcgaccacagcagcctgaccagacaccagagaacccacaccggcgagaagccctacgactgcagagagtgcggcaaggccttcagccacagaagcagcctgagcagacacctgatgagccacaccggcgagagcccctacgagtgcagcgtgtgcagcaaggccttcttcgacagaagcagcctgaccgtgcaccagagaatccacaccggcgagaagcccttccagtgcaacgagtgcggcaaggccttcttcgacagaagcagcctgaccagacaccagagaatccacaccggcgagagcccctacgagtgccaccagtgcggcaaggccttcagccagaagagcatcctgaccagacaccagctgatccacaccggcagaaagccctacgagtgcaacgagtgcggcaaggccttctacggcgtgagcagcctgaacagacaccagaaggcccacgccggcgaccccagataccagtgcaacgagtgcggcaaggccttcttcgacagaagcagcctgacccagcaccagaagatccacaccggcgacaagccctacgagtgcagcgagtgcggcaaggccttcagccagagatgcagactgaccagacaccagagagtgcacaccggcgagaagcccttcgagtgcaccgtgtgcggcaaggtgttcagcagcaagagcagcgtgatccagcaccagagaagatacgccaagcagggcatcgactag

SEQ ID NO: 105803 - DNA, 1155 bp, synthetic construct
  misc_feature 1..1155: note = Description of Artificial Sequence: Synthetic coding sequence
  source 1..1155: mol_type = other DNA
atgctggagaactacaacagcatcgtgagcctgggcctgcccgtgccccagcccgacgtgatcttccagctgaagagaggcgacaagccctggatggtggacctgcacggcagcgaggagagagagtggcccgagagcgtgagcctggactgggagaccaagcccgagatccacgacgccagcgacaagaagagcgagggcagcctgagagagtgcctgggcagacagagccccctgtgccccaagttcgaggtgcacacccccaacggcagaatgggcaccgagaagcagagccccagcggcgagaccagaaagaagagcctgagcagagacaagggcctgagaagaagaagaagcgccctgagcagagagatcctgaccaaggagagacaccaggagtgcagcgactgcggcaagaccttcttcgaccacagcagcctgaccagacaccagagaacccacaccggcgagaagccctacgactgcagagagtgcggcaaggccttcagccacagaagcagcctgagcagacacctgatgagccacaccggcgagagcccctacgagtgcagcgtgtgcagcaaggccttcttcgacagaagcagcctgaccgtgcaccagagaatccacaccggcgagaagcccttccagtgcaacgagtgcggcaaggccttcttcgacagaagcagcctgaccagacaccagagaatccacaccggcgagagcccctacgagtgccaccagtgcggcaaggccttcagccagaagagcatcctgaccagacaccagctgatccacaccggcagaaagccctacgagtgcaacgagtgcggcaaggccttctacggcgtgagcagcctgaacagacaccagaaggcccacgccggcgaccccagataccagtgcaacgagtgcggcaaggccttcttcgacagaagcagcctgacccagcaccagaagatccacaccggcgacaagccctacgagtgcagcgagtgcggcaaggccttcagccagagatgcagactgaccagacaccagagagtgcacaccggcgagaagcccttcgagtgcaccgtgtgcggcaaggtgttcagcagcaagagcagcgtgatccagcaccagagaagatacgccaagcagggcatcgactag

SEQ ID NO: 105804 - DNA, 1041 bp, synthetic construct
  misc_feature 1..1041: note = Description of Artificial Sequence: Synthetic coding sequence
  source 1..1041: mol_type = other DNA
atgctggagaactacaacagcatcgtgagcctggactgggagaccaagcccgagatccacgacgccagcgacaagaagagcgagggcagcctgagagagtgcctgggcagacagagccccctgtgccccaagttcgaggtgcacacccccaacggcagaatgggcaccgagaagcagagccccagcggcgagaccagaaagaagagcctgagcagagacaagggcctgagaagaagaagaagcgccctgagcagagagatcctgaccaaggagagacaccaggagtgcagcgactgcggcaagaccttcttcgaccacagcagcctgaccagacaccagagaacccacaccggcgagaagccctacgactgcagagagtgcggcaaggccttcagccacagaagcagcctgagcagacacctgatgagccacaccggcgagagcccctacgagtgcagcgtgtgcagcaaggccttcttcgacagaagcagcctgaccgtgcaccagagaatccacaccggcgagaagcccttccagtgcaacgagtgcggcaaggccttcttcgacagaagcagcctgaccagacaccagagaatccacaccggcgagagcccctacgagtgccaccagtgcggcaaggccttcagccagaagagcatcctgaccagacaccagctgatccacaccggcagaaagccctacgagtgcaacgagtgcggcaaggccttctacggcgtgagcagcctgaacagacaccagaaggcccacgccggcgaccccagataccagtgcaacgagtgcggcaaggccttcttcgacagaagcagcctgacccagcaccagaagatccacaccggcgacaagccctacgagtgcagcgagtgcggcaaggccttcagccagagatgcagactgaccagacaccagagagtgcacaccggcgagaagcccttcgagtgcaccgtgtgcggcaaggtgttcagcagcaagagcagcgtgatccagcaccagagaagatacgccaagcagggcatcgactag

SEQ ID NO: 105805 - DNA, 1320 bp, synthetic construct
  misc_feature 1..1320: note = Description of Artificial Sequence: Synthetic coding sequence
  source 1..1320: mol_type = other DNA
atggccgccgtgagccccaccaccagatgccaggagagcgtgaccttcgaggacgtggccgtggtgttcaccgacgaggagtggagcagactggtgcccatccagagagacctgtacaaggaggtgatgctggagaactacaacagcatcgtgagcctgggcctgcccgtgccccagcccgacgtgatcttccagctgaagagaggcgacaagccctggatggtggacctgcacggcagcgaggagagagagtggcccgagagcgtgagcctggcccaggagaagaactgcatctgcttcctgttcgtgcccgactgggagaccaagcccgagatccacgacgccagcgacaagaagagcgagggcagcctgagagagtgcctgggcagacagagccccctgtgccccaagttcgaggtgcacacccccaacggcagaatgggcaccgagaagcagagccccagcggcgagaccagaaagaagagcctgagcagagacaagggcctgagaagaagaagaagcgccctgagcagagagatcctgaccaaggagagacaccaggagtgcagcgactgcggcaagaccttcttcgaccacagcagcctgaccagacaccagagaacccacaccggcgagaagccctacgactgcagagagtgcggcaaggccttcagccacagaagcagcctgagcagacacctgatgagccacaccggcgagagcccctacgagtgcagcgtgtgcagcaaggccttcttcgacagaagcagcctgaccgtgcaccagagaatccacaccggcgagaagcccttccagtgcaacgagtgcggcaaggccttcttcgacagaagcagcctgaccagacaccagagaatccacaccggcgagagcccctacgagtgccaccagtgcggcaaggccttcagccagaagagcatcctgaccagacaccagctgatccacaccggcagaaagccctacgagtgcaacgagtgcggcaaggccttctacggcgtgagcagcctgaacagacaccagaaggcccacgccggcgaccccagataccagtgcaacgagtgcggcaaggccttcttcgacagaagcagcctgacccagcaccagaagatccacaccggcgacaagccctacgagtgcagcgagtgcggcaaggccttcagccagagatgcagactgaccagacaccagagagtgcacaccggcgagaagcccttcgagtgcaccgtgtgcggcaaggtgttcagcagcaagagcagcgtgatccagcaccagagaagatacgccaagcagggcatcgactag

SEQ ID NO: 105806 - DNA, 1611 bp, synthetic construct
  misc_feature 1..1611: note = Description of Artificial Sequence: Synthetic coding sequence
  source 1..1611: mol_type = other DNA
atgatgttccaggacagcgtggccttcgaggacgtggccgtgagcttcacccaggaggagtgggccctgctggaccccagccagaagaacctgtacagagacgtgatgcaggagaccttcaagaacctgaccagcgtgggcaagacctggaaggtgcagaacatcgaggacgagtacaagaaccccagaagaaacctgagcctgatgagagagaagctgtgcgagagcaaggagagccaccactgcggcgagagcttcaaccagatcgccgacgacatgctgaacagaaagaccctgcccggcatcaccccctgcgagagcagcgtgtgcggcgaggtgggcaccggccacagcagcctgaacacccacatcagagccgacaccggccacaagagcagcgagtaccaggagtacggcgagaacccctacagaaacaaggagtgcaagaaggccttcagctacctggacagcttccagagccacgacaaggcctgcaccaaggagaagccctacgacggcaaggagtgcaccgagaccttcatcagccacagctgcatccagagacacagagtgatgcacagcggcgacggcccctacaagtgcaagttctgcggcaaggccttctacttcctgaacctgtgcctgatccacgagagaatccacaccggcgtgaagccctacaagtgcaagcagtgcggcaaggccttcaccagaagcaccaccctgcccgtgcacgagagaacccacaccggcgtgaacgccgacgagtgcaaggagtgcggcaacgccttcagcttccccagcgagatcagaagacacaagagaagccacaccggcgagaagccctacgagtgcaagcagtgcggcaaggtgttcatcagcttcagcagcatccagtaccacaagatgacccacaccggcgagaagccctacgagtgcaagcagtgcggcaaggccttcagatgcggcagccacctgcagaagcacggcagaacccacaccggcgagaagccctacgagtgcagacagtgcggcaaggccttcagatgcaccagcgacctgcagagacacgagaagacccacaccgaggacaagccctacggctgcaagcagtgcggcaagggcttcagatgcgccagccagctgcagatccacgagagaacccacagcggcgagaagccccacgagtgcaaggagtgcggcaaggtgttcaagtacttcagcagcctgagaatccacgagagaacccacaccggcgagaagccccacgagtgcaagcagtgcggcaaggccttcagatacttcagcagcctgcacatccacgagagaacccacaccggcgacaagccctacgagtgcaaggtgtgcggcaaggccttcacctgcagcagcagcatcagataccacgagagaacccacaccggcgagaagccctacgagtgcaagcactgcggcaaggccttcatcagcaactacatcagataccacgagagaacccacaccggcgagaagccctaccagtgcaagcagtgcggcaaggccttcatcgtgcccgtgcacgtggagaacatgaaggagctgatccccctgatcgacgagaagagcttctag

SEQ ID NO: 105807 - DNA, 1599 bp, synthetic construct
  misc_feature 1..1599: note = Description of Artificial Sequence: Synthetic coding sequence
  source 1..1599: mol_type = other DNA
atgatgttccaggacagcgtggccttcgaggacgtggccgtgagcttcacccaggaggagtgggccctgctggaccccagccagaagaacctgtacagagacgtgatgcaggagaccttcaagaacctgaccagcgtgggcaagacctggaaggtgcagaacatcgaggacgagtacaagaaccccagaagaaacctgagcctgatgagagagaagctgtgcgagagcaaggagagccaccactgcggcgagagcttcaaccagatcgccgacgacatgctgaacagaaagaccctgcccggcatcaccccctgcgagagcagcgtgtgcggcgaggtgggcaccggccacagcagcctgaacacccacatcagagccgacaccggccacaagagcagcgagtaccaggagtacggcgagaacccctacagaaacaaggagtgcaagaaggccttcagctacctggacagcttccagagccacgacaaggcctgcaccaaggagaagccctacgacggcaaggagtgcaccgagaccttcatcagccacagctgcatccagagacacagagtgatgcacagcggcgacggcccctacaagtgcaagttctgcggcaaggccttctacttcctgaacctgtgcctgatccacgagagaatccacaccggcgtgaagccctacaagtgcaagcagtgcggcaaggccttcaccagaagcaccaccctgcccgtgcacgagagaacccacaccggcgtgaacgccgacgagtgcaaggagtgcggcaacgccttcagcttccccagcgagatcagaagacacaagagaagccacaccggcgagaagccctacgagtgcaagcagtgcggcaaggtgttcatcagcttcagcagcatccagtaccacaagatgacccacaccggcgagaagccctacgagtgcaagcagtgcggcaaggccttcagatgcggcagccacctgcagaagcacggcagaacccacaccggcgagaagccctacgagtgcagacagtgcggcaaggccttcagatgcaccagcgacctgcagagacacgagaagacccacaccgaggacaagccctacggctgcaagcagtgcggcaagggcttcagatgcgccagccagctgcagatccacgagagaacccacagcggcgagaagccccacgagtgcaaggagtgcggcaaggtgttcaagtacttcagcagcctgagaatccacgagagaacccacaccggcgagaagccccacgagtgcaagcagtgcggcaaggccttcagatacttcagcagcctgcacatccacgagagaacccacaccggcgacaagccctacgagtgcaaggtgtgcggcaaggccttcacctgcagcagcagcatcagataccacgagagaacccacaccggcgagaagccctacgagtgcaagcactgcggcaaggccttcatcagcaactacatcagataccacgagagaacccacaccggcgagaagccctaccagtgcaagcagtgcggcaaggccttcatcagagccagcagctgcagagagcacgagagaacccacaccatcaacagatag

SEQ ID NO: 105808 - DNA, 1185 bp, synthetic construct
  misc_feature 1..1185: note = Description of Artificial Sequence: Synthetic coding sequence
  source 1..1185: mol_type = other DNA
atgatggccgccaaggtggtgcccatgccccccaagcccaagcagagcttcatcctgagagtgccccccgacagcaagctgggccaggacctgctgagagacgccaccaacggccccaagaccatccaccagctggtgctggagcacttcctgaccttcctgcccaagcccagcctggtgcagcccagccagaaggtgaaggagaccctggtgatcatgaaggacgtgagcagcagcctgcagaacagagtgcaccccagacccctggtgaagctgctgcccaagggcgtgcagaaggagcaggagaccgtgagcctgtacctgaaggccaaccccgagctggtggtgttcgaggacctgaacgtgttccactgccaggaggagtgcgtgagcctggaccccacccagcagctgaccagcgagaaggaggacgacagcagcgtgggcgagatgatgctgctggccgtgaacggcagcaaccccgagggcgaggaccccgagagagagcccgtggagaacgaggactacagagagaagagcagcgacgacgacgagatggacagcagcctggtgagccagcagccccccgacaaccaggagaaggagagactgaacaccagcatcccccagaagagaaagatgagaaacctgctggtgaccatcgagaacgacacccccctggaggagctgagcaagtacgtggacatcagcatcatcgccctgaccagaaacagaagaaccagaagatggtacacctgccccctgtgcggcaagcagttcaacgagagcagctacctgatcagccaccagagaacccacaccggcgagaagccctacgactgcaaccactgcggcaagagcttcaaccacaagaccaacctgaacaagcacgagagaatccacaccggcgagaagccctacagctgcagccagtgcggcaagaacttcagacagaacagccacagaagcagacacgagggcatccacatcagagagaagatcttcaagtgccccgagtgcggcaagaccttccccaagaacgaggagttcgtgctgcacctgcagagccacgaggccgagagaccctacggctgcaagaagtgcggcagaagattcggcagactgagcaactgcaccagacacgagaagacccacagcgcctgcaagaccagaaagcagaagtag

SEQ ID NO: 105809 - DNA, 1188 bp, synthetic construct
  misc_feature 1..1188: note = Description of Artificial Sequence: Synthetic coding sequence
  source 1..1188: mol_type = other DNA
atgatggccgccaaggtggtgcccatgccccccaagcccaagcagagcttcatcctgagagtgccccccgacagcaagctgggccaggacctgctgagagacgccaccaacggccccaagaccatccaccagctggtgctggagcacttcctgaccttcctgcccaagcccagcctggtgcagcccagccagaaggtgaaggagaccctggtgatcatgaaggacgtgagcagcagcctgcagaacagagtgcaccccagacccctggtgaagctgctgcccaagggcgtgcagaaggagcaggagaccgtgagcctgtacctgaaggccaaccccgaggagctggtggtgttcgaggacctgaacgtgttccactgccaggaggagtgcgtgagcctggaccccacccagcagctgaccagcgagaaggaggacgacagcagcgtgggcgagatgatgctgctggccgtgaacggcagcaaccccgagggcgaggaccccgagagagagcccgtggagaacgaggactacagagagaagagcagcgacgacgacgagatggacagcagcctggtgagccagcagccccccgacaaccaggagaaggagagactgaacaccagcatcccccagaagagaaagatgagaaacctgctggtgaccatcgagaacgacacccccctggaggagctgagcaagtacgtggacatcagcatcatcgccctgaccagaaacagaagaaccagaagatggtacacctgccccctgtgcggcaagcagttcaacgagagcagctacctgatcagccaccagagaacccacaccggcgagaagccctacgactgcaaccactgcggcaagagcttcaaccacaagaccaacctgaacaagcacgagagaatccacaccggcgagaagccctacagctgcagccagtgcggcaagaacttcagacagaacagccacagaagcagacacgagggcatccacatcagagagaagatcttcaagtgccccgagtgcggcaagaccttccccaagaacgaggagttcgtgctgcacctgcagagccacgaggccgagagaccctacggctgcaagaagtgcggcagaagattcggcagactgagcaactgcaccagacacgagaagacccacagcgcctgcaagaccagaaagcagaagtag

SEQ ID NO: 105810 - DNA, 1185 bp, synthetic construct
  misc_feature 1..1185: note = Description of Artificial Sequence: Synthetic coding sequence
  source 1..1185: mol_type = other DNA
atgatggccgccaaggtggtgcccatgccccccaagcccaagcagagcttcatcctgagagtgccccccgacagcaagctgggccaggacctgctgagagacgccaccaacggccccaagaccatccaccagctggtgctggagcacttcctgaccttcctgcccaagcccagcctggtgcagcccagccagaaggtgaaggagaccctggtgatcatgaaggacgtgagcagcagcctgcagaacagagtgcaccccagacccctggtgaagctgctgcccaagggcgtgcagaaggagcaggagaccgtgagcctgtacctgaaggccaaccccgaggagctggtggtgttcgaggacctgaacgtgttccactgccaggaggagtgcgtgagcctggaccccacccagcagctgaccagcgagaaggaggacgacagcagcgtgggcgagatgatgctgctggtgaacggcagcaaccccgagggcgaggaccccgagagagagcccgtggagaacgaggactacagagagaagagcagcgacgacgacgagatggacagcagcctggtgagccagcagccccccgacaaccaggagaaggagagactgaacaccagcatcccccagaagagaaagatgagaaacctgctggtgaccatcgagaacgacacccccctggaggagctgagcaagtacgtggacatcagcatcatcgccctgaccagaaacagaagaaccagaagatggtacacctgccccctgtgcggcaagcagttcaacgagagcagctacctgatcagccaccagagaacccacaccggcgagaagccctacgactgcaaccactgcggcaagagcttcaaccacaagaccaacctgaacaagcacgagagaatccacaccggcgagaagccctacagctgcagccagtgcggcaagaacttcagacagaacagccacagaagcagacacgagggcatccacatcagagagaagatcttcaagtgccccgagtgcggcaagaccttccccaagaacgaggagttcgtgctgcacctgcagagccacgaggccgagagaccctacggctgcaagaagtgcggcagaagattcggcagactgagcaactgcaccagacacgagaagacccacagcgcctgcaagaccagaaagcagaagtag

SEQ ID NO: 105811 - DNA, 1185 bp, synthetic construct; identical to SEQ ID NO: 105810
  misc_feature 1..1185: note = Description of Artificial Sequence: Synthetic coding sequence
  source 1..1185: mol_type = other DNA

SEQ ID NO: 105812 - DNA, 1188 bp, synthetic construct; identical to SEQ ID NO: 105809
  misc_feature 1..1188: note = Description of Artificial Sequence: Synthetic coding sequence
  source 1..1188: mol_type = other DNA

SEQ ID NO: 105813 - DNA, 1947 bp, synthetic construct
  misc_feature 1..1947: note = Description of Artificial Sequence: Synthetic coding sequence
  source 1..1947: mol_type = other DNA
atggccaccgccgtggagcccgaggaccaggacctgtgggaggaggagggcatcctgatggtgaagctggaggacgacttcacctgcagacccgagagcgtgctgcagagagacgaccccgtgctggagaccagccaccagaacttcagaagattcagataccaggaggccgccagccccagagaggccctgatcagactgagagagctgtgccaccagtggctgagacccgagagaagaaccaaggagcagatcctggagctgctggtgctggagcagttcctgaccgtgctgcccggcgagctgcagagctgggtgagaggccagagacccgagagcggcgaggaggccgtgaccctggtggagggcctgcagaagcagcccagaagacccagaagatgggtgaccgtgcacgtgcacggccaggaggtgctgagcgaggagaccgtgcacctgggcgtggagcccgagagccccaacgagctgcaggaccccgtgcagagcagcacccccgagcagagccccgaggagaccacccagagccccgacctgggcgcccccgccgagcagagaccccaccaggaggaggagctgcagaccctgcaggagagcgaggtgcccgtgcccgaggaccccgacctgcccgccgagagaagcagcggcgacagcgagatggtggccctgctgaccgccctgagccagggcctggtgaccttcaaggacgtggccgtgtgcttcagccaggaccagtggagcgacctggaccccacccagaaggagttctacggcgagtacgtgctggaggaggactgcggcatcgtggtgagcctgagcttccccatccccagacccgacgagatcagccaggtgagagaggaggagccctgggtgcccgacatccaggagccccaggagacccaggagcccgagatcctgagcttcacctacaccggcgacagaagcaaggacgaggaggagtgcctggagcaggaggacctgagcctggaggacatccacagacccgtgctgggcgagcccgagatccaccagacccccgactgggagatcgtgttcgaggacaaccccggcagactgaacgagagaagattcggcaccaacatcagccaggtgaacagcttcgtgaacctgagagagaccacccccgtgcaccccctgctgggcagacaccacgactgcagcgtgtgcggcaagagcttcacctgcaacagccacctggtgagacacctgagaacccacaccggcgagaagccctacaagtgcatggagtgcggcaagagctacaccagaagcagccacctggccagacaccagaaggtgcacaagatgaacgccccctacaagtaccccctgaacagaaagaacctggaggagaccagccccgtgacccaggccgagagaacccccagcgtggagaagccctacagatgcgacgactgcggcaagcacttcagatggaccagcgacctggtgagacaccagagaacccacaccggcgagaagcccttcttctgcaccatctgcggcaagagcttcagccagaagagcgtgctgaccacccaccagagaatccacctgggcggcaagccctacctgtgcggcgagtgcggcgaggacttcagcgagcacagaagatacctggcccacagaaagacccacgccgccgaggagctgtacctgtgcagcgagtgcggcagatgcttcacccacagcgccgccttcgccaagcacctgagaggccacgccagcgtgagaccctgcagatgcaacgagtgcggcaagagcttcagcagaagagaccacctggtgagacaccagagaacccacaccggcgagaagcccttcacctgccccacctgcggcaagagcttcagcagaggctaccacctgatcagacaccagagaacccacagcgagaagaccagctag

SEQ ID NO: 105814 - DNA, 1947 bp, synthetic construct; identical to SEQ ID NO: 105813
  misc_feature 1..1947: note = Description of Artificial Sequence: Synthetic coding sequence
  source 1..1947: mol_type = other DNA

SEQ ID NO: 105815 - DNA, 1947 bp, synthetic construct; identical to SEQ ID NO: 105813
  misc_feature 1..1947: note = Description of Artificial Sequence: Synthetic coding sequence
  source 1..1947: mol_type = other DNA

SEQ ID NO: 105816 - DNA, 399 bp, synthetic construct
  misc_feature 1..399: note = Description of Artificial Sequence: Synthetic coding sequence
  source 1..399: mol_type = other DNA
atgaccgccgccgccagcctgctggccagcctgctgcccgccctgccccccctgaacctgcaggacgccaagttcgtggaggagagaagaaagcagctgcagaactacctgagaagcgtgatgaacaaggtgatccagatggtgcccgagttcgccgccagccccaagaaggagaccctgatccagctgatgcccttcttcgtgatgggcctgcaggtgggcatgtacggcctgttccacttcggcgtgatgatggaccagccccagcccagcctgaccagagccgacgagagcccctgcgacagagtgctgagcccctgcgccgcccacagaaagcagagagactgctgcctgagctggaaggccgagcccgagagattcctggtgaagaagaagtag

SEQ ID NO: 105817 - DNA, 1665 bp, synthetic construct; identical to SEQ ID NO: 92025
  misc_feature 1..1665: note = Description of Artificial Sequence: Synthetic coding sequence
  source 1..1665: mol_type = other DNA

SEQ ID NO: 105818 - DNA, 840 bp, synthetic construct
  misc_feature 1..840: note = Description of Artificial Sequence: Synthetic coding sequence
  source 1..840: mol_type = other DNA
atgagcgccgacggcggcggcatccaggacacccaggacaaggagaccccccccgaggtgcccgacagaggccacccccaccaggagatgcccagcaagctgggcgaggccgtgcccagcggcgacacccaggagagcctgcacatcaagatggagcccgaggagccccacagcgagggcgccagccaggaggacggcgcccagggcgcctggggctgggcccccctgagccacggcagcaaggagaaggccctgttcctgcccggcggcgccctgcccagccccagaatccccgtgctgagcagagagggcagaaccagagacagacagatggccgccgccctgctgaccgcctggagccagatgcccgtgaccttcgaggacgtggccctgtacctgagcagagaggagtggggcagactggaccacacccagcagaacttctacagagacgtgctgcagaagaagaacggcctgagcctgggcttccccttcagcagacccttctgggccccccaggcccacggcaagggcgaggccagcggcagcagcagacaggccggcgacgagaaggagtggagaggcgcctgcaccggcgccgtggaggtgggccagagagtgcagaccagcagcgtggccgccctgggcaacgtgaagcccttcagaaccagagccggcagagtgcagtggggcgtgccccagtgcgcccaggaggccgcctgcggcagaagcagcggccccgccaaggacagcggccagcccgccgagcccgacagaacccccgacgccgccccccccgaccccagccccaccgagccccaggagtacagagtgccctag

SEQ ID NO: 105819 - DNA, 357 bp, synthetic construct
  misc_feature 1..357: note = Description of Artificial Sequence: Synthetic coding sequence
  source 1..357: mol_type = other DNA
atgagcgccgacggcggcggcatccaggacacccaggacaaggagaccccccccgaggtgcccgacagaggccacccccaccaggagatgcccagcaagctgggcgaggccgtgcccagcggcgacacccaggagagcctgcacatcaagatggagcccgaggagccccacagcgagggcgccagccaggaggacggcgcccagggcgcctggggctgggcccccctgagccacggcagcaaggagaaggccctgttcctgcccggcggcgccctgcccagccccagaatccccgtgctgagcagagagggcagaaccagagacagacagatggccgccgccctgctgaccgcctag

SEQ ID NO: 105820 - DNA, 1392 bp, synthetic construct
  misc_feature 1..1392: note = Description of Artificial Sequence: Synthetic coding sequence
  source 1..1392: mol_type = other DNA
atgggcagaaagaagaagaagcagctgaagccctggtgctggtactgcaacagagacttcgacgacgagaagatcctgatccagcaccagaaggccaagcacttcaagtgccacatctgccacaagaagctgtacaccggccccggcctggccatccactgcatgcaggtgcacaaggagaccatcgacgccgtgcccaacgccatccccggcagaaccgacatcgagctggagatctacggcatggagggcatccccgagaaggacatggacgagagaagaagactgctggagcagaagacccaggagagccagaagaagaagcagcaggacgacagcgacgagtacgacgacgacgacagcgccgccagcaccagcttccagccccagcccgtgcagccccagcagggctacatcccccccatggcccagcccggcctgccccccgtgcccggcgcccccggcatgccccccggcatcccccccctgatgcccggcgtgccccccctgatgcccggcatgccccccgtgatgcccggcatgccccccggcctgcaccaccagagaaagtacacccagagcttctgcggcgagaacatcatgatgcccatgggcggcatgatgccccccggccccggcatcccccccctgatgcccggcatgccccccggcatgcccccccccgtgcccagacccggcatcccccccatgacccaggcccaggccgtgagcgcccccggcatcctgaacagaccccccgcccccaccgccaccgtgcccgccccccagccccccgtgaccaagcccctgttccccagcgccggccaggcccaggccgccgtgcagggccccgtgggcaccgacttcaagcccctgaacagcacccccgccaccaccaccgagccccccaagcccaccttccccgcctacacccagagcaccgccagcaccaccagcaccaccaacagcaccgccgccaagcccgccgccagcatcaccagcaagcccgccaccctgaccaccaccagcgccaccagcaagctgatccaccccgacgaggacatcagcctggaggagagaagagcccagctgcccaagtaccagagaaacctgcccagacccggccaggcccccatcggcaacccccccgtgggccccatcggcggcatgatgcccccccagcccggcatcccccagcagcagggcatgagaccccccatgcccccccacggccagtacggcggccaccaccagggcatgcccggctacctgcccggcgccatgcccccctacggccagggcccccccatggtgcccccctaccagggcggcccccccagaccccccatgggcatgagaccccccgtgatgagccagggcggcagatactag

SEQ ID NO: 105821 - DNA, 1188 bp, synthetic construct
  misc_feature 1..1188: note = Description of Artificial Sequence: Synthetic coding sequence
  source 1..1188: mol_type = other DNA
atgggcagaaagaagaagaagcagctgaagccctggtgctggtactgcaacagagacttcgacgacgagaagatcctgatccagcaccagaaggccaagcacttcaagtgccacatctgccacaagaagctgtacaccggcctgccccccgtgcccggcgcccccggcatgccccccggcatcccccccctgatgcccggcgtgccccccctgatgcccggcatgccccccgtgatgcccggcatgccccccggcctgcaccaccagagaaagtacacccagagcttctgcggcgagaacatcatgatgcccatgggcggcatgatgccccccggccccggcatcccccccctgatgcccggcatgccccccggcatgcccccccccgtgcccagacccggcatcccccccatgacccaggcccaggccgtgagcgcccccggcatcctgaacagaccccccgcccccaccgccaccgtgcccgccccccagccccccgtgaccaagcccctgttccccagcgccggccagatgggcacccccgtgaccagcagcagcaccgccagcagcaacagcgagagcctgagcgccagcagcaaggccctgttccccagcaccgcccaggcccaggccgccgtgcagggccccgtgggcaccgacttcaagcccctgaacagcacccccgccaccaccaccgagccccccaagcccaccttccccgcctacacccagagcaccgccagcaccaccagcaccaccaacagcaccgccgccaagcccgccgccagcatcaccagcaagcccgccaccctgaccaccaccagcgccaccagcaagctgatccaccccgacgaggacatcagcctggaggagagaagagcccagctgcccaagtaccagagaaacctgcccagacccggccaggcccccatcggcaacccccccgtgggccccatcggcggcatgatgcccccccagcccggcatcccccagcagcagggcatgagaccccccatgcccccccacggccagtacggcggccaccaccagggcatgcccggctacctgcccggcgccatgcccccctacggccagggcccccccatggtgcccccctaccagggcggcccccccagaccccccatgggcatgagaccccccgtgatgagccagggcggcagatactag

SEQ ID NO: 105822 - DNA, 1437 bp, synthetic construct
  misc_feature 1..1437: note = Description of Artificial Sequence: Synthetic coding sequence
  source 1..1437: mol_type = other DNA
atgggcagaaagaagaagaagcagctgaagccctggtgctggtactgcaacagagacttcgacgacgagaagatcctgatccagcaccagaaggccaagcacttcaagtgccacatctgccacaagaagctgtacaccggccccggcctggccatccactgcatgcaggtgcacaaggagaccatcgacgccgtgcccaacgccatccccggcagaaccgacatcgagctggagatctacggcatggagggcatccccgagaaggacatggacgagagaagaagactgctggagcagaagacccaggagagccagaagaagaagcagcaggacgacagcgacgagtacgacgacgacgacagcgccgccagcaccagcttccagccccagcccgtgcagccccagcagggctacatcccccccatggcccagcccggcctgccccccgtgcccggcgcccccggcatgccccccggcatcccccccctgatgcccggcgtgccccccctgatgcccggcatgccccccgtgatgcccggcatgccccccggcatgatgcccatgggcggcatgatgccccccggccccggcatcccccccctgatgcccggcatgccccccggcatgcccccccccgtgcccagacccggcatcccccccatgacccaggcccaggccgtgagcgcccccggcatcctgaacagaccccccgcccccaccgccaccgtgcccgccccccagccccccgtgaccaagcccctgttccccagcgccggccagatgggcacccccgtgaccagcagcagcaccgccagcagcaacagcgagagcctgagcgccagcagcaaggccctgttccccagcaccgcccaggcccaggccgccgtgcagggccccgtgggcaccgacttcaagcccctgaacagcacccccgccaccaccaccgagccccccaagcccaccttccccgcctacacccagagcaccgccagcaccaccagcaccaccaacagcaccgccgccaagcccgccgccagcatcaccagcaagcccgccaccctgaccaccaccagcgccaccagcaagctgatccaccccgacgaggacatcagcctggaggagagaagagcccagctgcccaagtaccagagaaacctgcccagacccggccaggcccccatcggcaacccccccgtgggccccatcggcggcatgatgcccccccagcccggcatcccccagcagcagggcatgagaccccccatgcccccccacggccagtacggcggccaccaccagggcatgcccggctacctgcccggcgccatgcccccctacggccagggcccccccatggtgcccccctaccagggcggcccccccagaccccccatgggcatgagaccccccgtgatgagccagggcggcagatactag

SEQ ID NO: 105823 - DNA, 1485 bp, synthetic construct
  misc_feature 1..1485: note = Description of Artificial Sequence: Synthetic coding sequence
  source 1..1485: mol_type = other DNA
atgggcagaaagaagaagaagcagctgaagccctggtgctggtactgcaacagagacttcgacgacgagaagatcctgatccagcaccagaaggccaagcacttcaagtgccacatctgccacaagaagctgtacaccggccccggcctggccatccactgcatgcaggtgcacaaggagaccatcgacgccgtgcccaacgccatccccggcagaaccgacatcgagctggagatctacggcatggagggcatccccgagaaggacatggacgagagaagaagactgctggagcagaagacccaggagagccagaagaagaagcagcaggacgacagcgacgagtacgacgacgacgacagcgccgccagcaccagcttccagccccagcccgtgcagccccagcagggctacatcccccccatggcccagcccggcctgccccccgtgcccggcgcccccggcatgccccccggcatcccccccctgatgcccggcgtgccccccctgatgcccggcatgccccccgtgatgcccggcatgccccccggcctgcaccaccagagaaagtacacccagagcttctgcggcgagaacatcatgatgcccatgggcggcatgatgccccccggccccggcatcccccccctgatgcccggcatgccccccggcatgcccccccccgtgcccagacccggcatcccccccatgacccaggcccaggccgtgagcgcccccggcatcctgaacagaccccccgcccccaccgccaccgtgcccgccccccagccccccgtgaccaagcccctgttccccagcgccggccagatgggcacccccgtgaccagcagcagcaccgccagcagcaacagcgagagcctgagcgccagcagcaaggccctgttccccagcaccgcccaggcccaggccgccgtgcagggccccgtgggcaccgacttcaagcccctgaacagcacccccgccaccaccaccgagccccccaagcccaccttccccgcctacacccagagcaccgccagcaccaccagcaccaccaacagcaccgccgccaagcccgccgccagcatcaccagcaagcccgccaccctgaccaccaccagcgccaccagcaagctgatccaccccgacgaggacatcagcctggaggagagaagagcccagctgcccaagtaccagagaaacctgcccagacccggccaggcccccatcggcaacccccccgtgggccccatcggcggcatgatgcccccccagcccggcatcccccagcagcagggcatgagaccccccatgcccccccacggccagtacggcggccaccaccagggcatgcccggctacctgcccggcgccatgcccccctacggccagggcccccccatggtgcccccctaccagggcggcccccccagaccccccatgggcatgagaccccccgtgatgagccagggcggcagatactag

SEQ ID NO: 105824 - DNA, 1344 bp, synthetic construct
  misc_feature 1..1344: note = Description of Artificial Sequence: Synthetic coding sequence
  source 1..1344: mol_type = other DNA
atgggcagaaagaagaagaagcagctgaagccctggtgctggtactgcaacagagacttcgacgacgagaagatcctgatccagcaccagaaggccaagcacttcaagtgccacatctgccacaagaagctgtacaccggccccggcctggccatccactgcatgcaggtgcacaaggagaccatcgacgccgtgcccaacgccatccccggcagaaccgacatcgagctggagatctacggcatggagggcatccccgagaaggacatggacgagagaagaagactgctggagcagaagacccaggagagccagaagaagaagcagcaggacgacagcgacgagtacgacgacgacgacagcgccgccagcaccagcttccagccccagcccgtgcagccccagcagggctacatcccccccatggcccagcccggcctgccccccgtgcccggcgcccccggcatgccccccggcatcccccccctgatgcccggcgtgccccccctgatgcccggcatgccccccgtgatgcccggcatgccccccggcatgatgcccatgggcggcatgatgccccccggccccggcatcccccccctgatgcccggcatgccccccggcatgcccccccccgtgcccagacccggcatcccccccatgacccaggcccaggccgtgagcgcccccggcatcctgaacagaccccccgcccccaccgccaccgtgcccgccccccagccccccgtgaccaagcccctgttccccagcgccggccaggcccaggccgccgtgcagggccccgtgggcaccgacttcaagcccctgaacagcacccccgccaccaccaccgagccccccaagcccaccttccccgcctacacccagagcaccgccagcaccaccagcaccaccaacagcaccgccgccaagcccgccgccagcatcaccagcaagcccgccaccctgaccaccaccagcgccaccagcaagctgatccaccccgacgaggacatcagcctggaggagagaagagcccagctgcccaagtaccagagaaacctgcccagacccggccaggcccccatcggcaacccccccgtgggccccatcggcggcatgatgcccccccagcccggcatcccccagcagcagggcatgagaccccccatgcccccccacggccagtacggcggccaccaccagggcatgcccggctacctgcccggcgccatgcccccctacggccagggcccccccatggtgcccccctaccagggcggcccccccagaccccccatgggcatgagaccccccgtgatgagccagggcggcagatactag

SEQ ID NO: 105825 - DNA, 1491 bp, synthetic construct
  misc_feature 1..1491: note = Description of Artificial Sequence: Synthetic coding sequence
  source 1..1491: mol_type = other DNA
aacaccgtgatgggcagaaagaagaagaagcagctgaagccctggtgctggtactgcaacagagacttcgacgacgagaagatcctgatccagcaccagaaggccaagcacttcaagtgccacatctgccacaagaagctgtacaccggccccggcctggccatccactgcatgcaggtgcacaaggagaccatcgacgccgtgcccaacgccatccccggcagaaccgacatcgagctggagatctacggcatggagggcatccccgagaaggacatggacgagagaagaagactgctggagcagaagacccaggagagccagaagaagaagcagcaggacgacagcgacgagtacgacgacgacgacagcgccgccagcaccagcttccagccccagcccgtgcagccccagcagggctacatcccccccatggcccagcccggcctgccccccgtgcccggcgcccccggcatgccccccggcatcccccccctgatgcccggcgtgccccccctgatgcccggcatgccccccgtgatgcccggcatgccccccggcctgcaccaccagagaaagtacacccagagcttctgcggcgagaacatcatgatgcccatgggcggcatgatgccccccggccccggcatcccccccctgatgcccggcatgccccccggcatgcccccccccgtgcccagacccggcatcccccccatgacccaggcccaggccgtgagcgcccccggcatcctgaacagaccccccgcccccaccgccaccgtgcccgccccccagccccccgtgaccaagcccctgttccccagcgccggccagatgggcacccccgtgaccagcagcagcaccgccagcagcaacagcgagagcctgagcgccagcagcaaggccctgttccccagcaccgcccaggcccaggccgccgtgcagggccccgtgggcaccgacttcaagcccctgaacagcacccccgccaccaccaccgagccccccaagcccaccttccccgcctacacccagagcaccgccagcaccaccagcaccaccaacagcaccgccgccaagcccgccgccagcatcaccagcaagcccgccaccctgaccaccaccagcgccaccagcaagctgatccaccccgacgaggacatcagcctggaggagagaagagcccagctgcccaagtaccagagaaacctgcccagacccggccaggcccccatcggcaacccccccgtgggccccatcggcggcatgatgcccccccagcccggcatcccccagcagcagggcatgagaccccccatgcccccccacggccagtacggcggccaccaccagggcatgcccggctacctgcccggcgccatgcccccctacggccagggcccccccatggtgcccccctaccagggcggcccccccagaccccccatgggcatgagaccccccgtgatgagccagggcctgccctag

SEQ ID NO: 105826 - DNA, 3843 bp, synthetic construct
  misc_feature 1..3843: note = Description of Artificial Sequence: Synthetic coding sequence
  source 1..3843: mol_type = other DNA
atgggcagcctgaccttcagagacgtggccatcgagttcagcctggaggagtggcagtgcctggacaccgcccagcagaacctgtacagaaacgtgatgctggagaactacagaaacctggtgttcctgggcatcgccgccttcaagcccgacctgatcatcttcctggaggagggcaaggagagctggaacatgaagagacacgagatggtggaggagagccccgtgatctgcagccacttcgcccaggacctgtggcccgagcagggcatcgaggacagcttccagaaggtgatcctgagaagatacgagaagtgcggccacgagaacctgcacctgaagatcggctacaccaacgtggacgagtgcaaggtgcacaaggagggctacaacaagctgaaccagagcctgaccaccacccagagcaaggtgttccagagaggcaagtacgccaacgtgttccacaagtgcagcaacagcaacagacacaagatcagacacaccggcaagaagcacctgcagtgcaaggagtacgtgagaagcttctgcatgctgagccacctgagccagcacaagagaatctacaccagagagaacagctacaagtgcgaggagggcggcaaggccttcaactggagcagcaccctgacctactacaagagcgcccacaccggcgagaagccctacagatgcaaggagtgcggcaaggccttcagcaagttcagcatcctgaccaagcacaaggtgatccacaccggcgagaagagctacaagtgcgaggagtgcggcaaggccttcaaccagagcgccatcctgaccaagcacaagatcatccacaccggcgagaagcccaacaagtgcgaggagtgcggcaaggccttcagcaaggtgagcaccctgaccacccacaaggccatccacgccggcgagaagccctacaagtgcaaggagtgcggcaaggccttcagcaaggtgagcaccctgatcacccacaaggccatccacgccggcgagaagccctacaagtgcaaggagtgcggcaaggccttcagcaagttcagcatcctgaccaagcacaaggtgatccacaccggcgagaagccctacaagtgcgaggagtgcggcaaggcctacaagtggcccagcaccctgagctaccacaagaagatccacaccggcgagaagccctacaagtgcgaggagtgcggcaagggcttcagcatgttcagcatcctgaccaagcacgaggtgatccacaccggcgagaagccctacaagtgcgaggagtgcggcaaggccttcaactggagcagcaacctgatggagcacaagaagatccacaccggcgagaccccctacaagtgcgaggagtgcggcaagggcttcagcatgttcagcatcctgaccaagcacaaggtgatccacaacggcgagaagccctacaagtgcgaggagtgcgacaaggccacccacgccggcgagaagccctacaagtgcgaggagtgcggcaaggccttcaactggagcagcaacctgatggagcacaagagaatccacaccggcgagaagccctacaagtgcgaggagtgcggcaagagcttcagcaccttcagcatcctgaccaagcacaaggtgatccacaccggcgagaagccctacaagtgcgaggagtgcggcaaggcctacaagtggagcagcaccctgagctaccacaagaagatccacaccgtggagaagccctacaagtgcgaggagtgcggcaaggccttcaaccagagcgccatcctgatcaagcacaagagaatccacaccggcgagaagccctacaagtgcgaggagtgcggcaagaccttcagcaaggtgagcaccctgaccacccacaaggccatccacgccggcgagaagccctacaagtgcaaggagtgcggcaagaccttcatcaaggtgagcaccctgaccacccacaaggccatccacgccggcgagaagccctacaagtgcaaggagtgcggcaaggccttcagcaagttcagcatcctgaccaagcacaaggtgatccacaccggcgagaagccctacaagtgcgaggagtgcggcaaggccttcaactggagcagcaacctgatggagcacaagagaatccacaccggcgagaagccctacaagtgcgaggagtgcggcaagagcttcagcaccttcagcgtgctgaccaagcacaaggtgatccacaccggcgagaagccctacaagtgcgaggagtgcggcaaggcctacaagtggagcagcaccctgagctaccacaagaagatccacaccgtggagaagccctacaagtgcgaggagtgcggcaaggccttcaacagaagcgccatcctgatcaagcacaagagaatccacaccgacgagaagccctacaagtgcgaggagtgcggcaagaccttcagcaaggtgagcaccctgaccacccacaaggccatccacgccggcgagaagccctacaagtgcaaggagtgcggcaaggccttcagcaagttcagcatcctgaccaagcacaaggtgatccacaccggcgagaagccctacaagtgcgaggagtgcggcaaggcctacaagtggcccagcaccctgagctaccacaagaagatccacaccggcgagaagccctacaagtgcgaggagtgcggcaagggcttcagcatgttcagcatcctgaccaagcacgaggtgatccacaccggcgagaagccctacaagtgcgaggagtgcggcaaggccttcagctggctgagcgtgttcagcaagcacaagaagacccacgccggcgagaagttctacaagtgcgaggcctgcggcaaggcctacaagagcagcagcaccctgagctaccacaagaagatccacaccgaggagaagccctacaagtacgaggagtgcggcaagggcttcagcaccttcagcatcctgaccaagcacaaggtgatccacaccggcgagaagccctacaagtgcgaggagtgcggcaaggccttcaactggagcagcaacctgatggagcacaagaagatccacaccggcgagaccccctacaagtgcgaggagtgcgacaaggccttcagctggcccagcagcctgaccgagcacaaggccacccacgccggcgagaagccctacaagtgcgaggagtgcggcaaggccttcagctggcccagcagactgaccgagcacaaggccacccacgccggcgaggagccctacaagtgcgaggagtgcggcaaggccttcaactggagcagcaacctgatggagcacaagagaatccacaccggcgagaagccctacaagtgcgaggagtgcggcaagagcttcagcaccttcagcatcctgaccaagcacaaggtgatccacaccggcgagaagccctacaagtgcgaggagtgcggcaaggcctacaagtggagcagcaccctgagctaccacaagaagatccacaccgtggagaagccctacaagtgcgaggagtgcggcaagggcttcgtgatgttcagcatcctggccaagcacaaggtgatccacaccggcgagaagctgtacaagtgcgaggagtgcggcaaggcctacaagtggcccagcaccctgagataccacaagaagatccacaccggcgagaagccctacaagtgcgaggagtgcggcaaggccttcagcaccttcagcatcctgaccaagcacaaggtgatccacaccggcgagaagccctacaagtgcgaggagtgcggcaaggccttcagctggctgagcgtgttcagcaagcacaagaagatccacaccggcgagaagctgtag

SEQ ID NO: 105827 - DNA, 123 bp, synthetic construct
  misc_feature 1..123: note = Description of Artificial Sequence: Synthetic coding sequence
  source 1..123: mol_type = other DNA
ggcaagggcttcagcatgttcagcatcctgaccaagcacaaggccacccacgccggcgagaagccctacaagtgcgaggagtgcggcaaggccttcaactggagcagcaacctgatggagtag

SEQ ID NO: 105828 - DNA, 3504 bp, synthetic construct
  misc_feature 1..3504: note = Description of Artificial Sequence: Synthetic coding sequence
  source 1..3504: mol_type = other DNA
atgggcagcctgaccttcagagacgtggccatcgagttcagcctggaggagtggcagtgcctggacaccgcccagcagaacctgtacagaaacgtgatgctggagaactacagaaacctggtgttcctgggcatcgccgccttcaagcccgacctgatcatcttcctggaggagggcaaggagagctggaacatgaagagacacgagatggtggaggagagccccgtgatctgcagccacttcgcccaggacctgtggcccgagcagggcatcgaggacagcttccagaaggtgatcctgagaagatacgagaagtgcggccacgagaacctgcacctgaagatcggctacaccaacgtggacgagtgcaaggtgcacaaggagggctacaacaagctgaaccagagcctgaccaccacccagagcaaggtgttccagagaggcaagtacgccaacgtgttccacaagtgcagcaacagcaacagacacaagatcagacacaccggcaagaagcacctgcagtgcaaggagtacgtgagaagcttctgcatgctgagccacctgagccagcacaagagaatctacaccagagagaacagctacaagtgcgaggagggcggcaaggccttcaactggagcagcaccctgacctactacaagagcgcccacaccggcgagaagccctacagatgcaaggagtgcggcaaggccttcagcaagttcagcatcctgaccaagcacaaggtgatccacaccggcgagaagagctacaagtgcgaggagtgcggcaaggccttcaaccagagcgccatcctgaccaagcacaagatcatccacaccggcgagaagcccaacaagtgcgaggagtgcggcaaggccttcagcaaggtgagcaccctgaccacccacaaggccatccacgccggcgagaagccctacaagtgcaaggagtgcggcaaggccttcagcaaggtgagcaccctgatcacccacaaggccatccacgccggcgagaagccctacaagtgcaaggagtgcggcaaggccttcagcaagttcagcatcctgaccaagcacaaggtgatccacaccggcgagaagccctacaagtgcgaggagtgcggcaaggcctacaagtggcccagcaccctgagctaccacaagaagatccacaccggcgagaagccctacaagtgcgaggagtgcggcaagggcttcagcatgttcagcatcctgaccaagcacgaggtgatccacaccggcgagaagccctacaagtgcgaggagtgcggcaaggccttcaactggagcagcaacctgatggagcacaagaagatccacaccggcgagaccccctacaagtgcgaggagtgcggcaagggcttcaagtggagcagcaccctgagctaccacaagaagatccacaccgtggagaagccctacaagtgcgaggagtgcggcaaggccttcaaccagagcgccatcctgatcaagcacaagagaatccacaccggcgagaagccctacaagtgcgaggagtgcggcaagaccttcagcaaggtgagcaccctgaccacccacaaggccatccacgccggcgagaagccctacaagtgcaaggagtgcggcaagaccttcatcaaggtgagcaccctgaccacccacaaggccatccacgccggcgagaagccctacaagtgcaaggagtgcggcaaggccttcagcaagttcagcatcctgaccaagcacaaggtgatccacaccggcgagaagccctacaagtgcgaggagtgcggcaaggccttcaactggagcagcaacctgatggagcacaagagaatccacaccggcgagaagccctacaagtgcgaggagtgcggcaagagcttcagcaccttcagcgtgctgaccaagcacaaggtgatccacaccggcgagaagccctacaagtgcgaggagtgcggcaaggcctacaagtggagcagcaccctgagctaccacaagaagatccacaccgtggagaagccctacaagtgcgaggagtgcggcaaggccttcaacagaagcgccatcctgatcaagcacaagagaatccacaccgacgagaagccctacaagtgcgaggagtgcggcaagaccttcagcaaggtgagcaccctgaccacccacaaggccatccacgccggcgagaagccctacaagtgcaaggagtgcggcaaggccttcagcaagttcagcatcctgaccaagcacaaggtgatccacaccggcgagaagccctacaagtgcgaggagtgcggcaaggcctacaagtggcccagcaccctgagctaccacaagaagatccacaccggcgagaagccctacaagtgcgaggagtgcggcaagggcttcagcatgttcagcatcctgaccaagcacgaggtgatccacaccggcgagaagccctacaagtgcgaggagtgcggcaaggccttcagctggctgagcgtgttcagcaagcacaagaagacccacgccggcgagaagttctacaagtgcgaggcctgcggcaaggcctacaacaccttcagcatcctgaccaagcacaaggtgatccacaccggcgagaagccctacaagtgcgaggagtgcggcaaggccttcaactggagcagcaacctgatggagcacaagaagatccacaccggcgagaccccctacaagtgcgaggagtgcgacaaggccttcagctggcccagcagcctgaccgagcacaaggccacccacgccggcgagaagccctacaagtgcgaggagtgcggcaaggccttcagctggcccagcagactgaccgagcacaaggccacccacgccggcgaggagccctacaagtgcgaggagtgcggcaaggccttcaactggagcagcaacctgatggagcacaagagaatccacaccggcgagaagccctacaagtgcgaggagtgcggcaagagcttcagcaccttcagcatcctgaccaagcacaaggtgatccacaccggcgagaagccctacaagtgcgaggagtgcggcaaggcctacaagtggagcagcaccctgagctaccacaagaagatccacaccgtggagaagccctacaagtgcgaggagtgcggcaagggcttcgtgatgttcagcatcctggccaagcacaaggtgatccacaccggcgagaagctgtacaagtgcgaggagtgcggcaaggcctacaagtggcccagcaccctgagataccacaagaagatccacaccggcgagaagccctacaagtgcgaggagtgcggcaaggccttcagcaccttcagcatcctgaccaagcacaaggtgatccacaccggcgagaagccctacaagtgcgaggagtgcggcaaggccttcagctggctgagcgtgttcagcaagcacaagaagatccacaccggcgtgcccaacccccccacccacaagaagatccacgccggcgagaagctgtacaagtag

SEQ ID NO: 105829 - DNA, 1488 bp, synthetic construct
  misc_feature 1..1488: note = Description of Artificial Sequence: Synthetic coding sequence
  source 1..1488: mol_type = other DNA
atggccgagagcgcccccgccagacacagaagaaagagaagaagcacccccctgaccagcagcaccctgcccagccaggccaccgagaagagcagctacttccagaccaccgagatcagcctgtggaccgtggtggccgccatccaggccgtggagaagaagatggagagccaggccgccagactgcagagcctggagggcagaaccggcaccgccgagaagaagctggccgactgcgagaagatggccgtggagttcggcaaccagctggagggcaagtgggccgtgctgggcaccctgctgcaggagtacggcctgctgcagagaagactggagaacgtggagaacctgctgagaaacagaaacttctggatcctgagactgccccccggcagcaagggcgaggcccccaaggtgagcagaagcctggagaacgacggcgtgtgcttcaccgagcaggagtgggagaacctggaggactggcagaaggagctgtacagaaacgtgatggagagcaactacgagaccctggtgagcctgaaggtgctgggccagaccgagggcgaggccgagctgggcaccgagatgctgggcgacctggaggaggagggccccggcggcgcccaccccgccggcggcgtgatgatcaagcaggagctgcagtacacccaggagggccccgccgacctgcccggcgagttcagctgcatcgccgaggagcaggccttcctgagccccgagcagaccgagctgtggggcggccagggcagcagcgtgctgctggagaccggccccggcgacagcaccctggaggagcccgtgggcagcagagtgcccagcagcagcagaaccgtgggctgccccaagcagaagagccacagacaggtgcagctggaccaggagtgcggccagggcctgaagctgaagaaggacaccagcagaccctacgagtgcagcgagtgcgagatcaccttcagatacaagcagcagctggccacccacctgagaagccacagcggctggggcagctgcacccccgaggagcccgaggagagcctgagacccagacccagactgaagccccagaccaagaaggccaagctgcaccagtgcgacgtgtgcctgagaagcttcagctgcaaggtgagcctggtgacccaccagagatgccacctgcaggagggccccagcgccggccagcacgtgcaggagagattcagccccaacagcctggtggccctgcccggccacatcccctggagaaagagcagaagcagcctgatctgcggctactgcggcaagagcttcagccaccccagcgacctggtgagacaccagagaatccacaccggcgagagaccctacagctgcaccgagtgcgagaagagcttcgtgcagaagcagcacctgctgcagcaccagaagatccaccagagagagagaggcggcctggccctggagcccggcagacccaacggcctgctgtag

SEQ ID NO: 105830 - DNA, 1380 bp, synthetic construct
  misc_feature 1..1380: note = Description of Artificial Sequence: Synthetic coding sequence
  source 1..1380: mol_type = other DNA
atggccgcccccctggaggcccaggaccaggcccccggcgagggcgagggcctgctgatcgtgaaggtggaggacagcagctgggagcaggagagcgcccagcacgaggacggcagagacagcgaggcctgcagacagagattcagacagttctgctacggcgacgtgcacggcccccacgaggccttcagccagctgtgggagctgtgctgcagatggctgagacccgagctgagaaccaaggagcagatcctggagctgctggtgctggagcagttcctgaccgtgctgcccggcgagatccagggctgggtgagagagcagcaccccggcagcggcgaggaggccgtggccctggtggaggacctgcagaagcagcccgtgaaggcctggagacaggacgtgcccagcgaggaggccgagcccgaggccgccggcagaggcagccaggccaccggccccccccccaccgtgggcgccagaagaagacccagcgtgccccaggagcagcacagccacagcgcccagccccccgccctgctgaaggagggcagacccggcgagaccaccgacacctgcttcgtgagcggcgtgcacggccccgtggccctgggcgacatccccttctacttcagcagagaggagtggggcaccctggaccccgcccagagagacctgttctgggacatcaagagagagaacagcagaaacaccaccctgggcttcggcctgaagggccagagcgagaagagcctgctgcaggagatggtgcccgtggtgcccggccagaccggcagcgacgtgaccgtgagctggagccccgaggaggccgaggcctgggagagcgagaacagacccagagccgccctgggccccgtggtgggcgccagaagaggcagaccccccaccagaagaagacagttcagagacctggccgccgagaagccccacagctgcggccagtgcggcaagagattcagatggggcagcgacctggccagacaccagagaacccacaccggcgagaagccccacaagtgccccgagtgcgacaagagcttcagaagcagcagcgacctggtgagacaccagggcgtgcacaccggcgagaagcccttcagctgcagcgagtgcggcaagagcttcagcagaagcgcctacctggccgaccaccagagaatccacaccggcgagaagcccttcggctgcagcgactgcggcaagagcttcagcctgagaagctacctgctggaccacagaagagtgcacaccggcgagagacccttcggctgcggcgagtgcgacaagagcttcaagcagagagcccacctgatcgcccaccagagcctgcacgccaagatggcccagcccgtgggctag

SEQ ID NO: 105831 - DNA, 906 bp, synthetic construct
  misc_feature 1..906: note = Description of Artificial Sequence: Synthetic coding sequence
  source 1..906: mol_type = other DNA
atgtgccccagaagaagaagaaaccccagactgcaggccggcgaccccagacccagaggcctgcccagaagatggggccacggcggcggcagactgttccccagaagcagcaccgccatcgccggccccgtggccctgggcgacatccccttctacttcagcagagaggagtggggcaccctggaccccgcccagagagacctgttctgggacatcaagagagagaacagcagaaacaccaccctgggcttcggcctgaagggccagagcgagaagagcctgctgcaggagatggtgcccgtggtgcccggccagaccggcagcgacgtgaccgtgagctggagccccgaggaggccgaggcctgggagagcgagaacagacccagagccgccctgggccccgtggtgggcgccagaagaggcagaccccccaccagaagaagacagttcagagacctggccgccgagaagccccacagctgcggccagtgcggcaagagattcagatggggcagcgacctggccagacaccagagaacccacaccggcgagaagccccacaagtgccccgagtgcgacaagagcttcagaagcagcagcgacctggtgagacaccagggcgtgcacaccggcgagaagcccttcagctgcagcgagtgcggcaagagcttcagcagaagcgcctacctggccgaccaccagagaatccacaccggcgagaagcccttcggctgcagcgactgcggcaagagcttcagcctgagaagctacctgctggaccacagaagagtgcacaccggcgagagacccttcggctgcggcgagtgcgacaagagcttcaagcagagagcccacctgatcgcccaccagagcctgcacgccaagatggcccagcccgtgggctag

SEQ ID NO: 105832 - DNA, 1821 bp, synthetic construct
  misc_feature 1..1821: note = Description of Artificial Sequence: Synthetic coding sequence
  source 1..1821: mol_type = other DNA
atggccgtgaccttcgaggacgtgaccatcatcttcacctgggaggagtggaagttcctggacagcagccagaagagactgtacagagaggtgatgtgggagaactacaccaacgtgatgagcgtggagaactggaacgagagctacaagagccaggaggagaagttcagatacctggagtacgagaacttcagctactggcagggctggtggaacgccggcgcccagatgtacgagaaccagaactacggcgagaccgtgcagggcaccgacagcaaggacctgacccagcaggacagaagccagtgccaggagtggctgatcctgagcacccaggtgcccggctacggcaactacgagctgaccttcgagagcaagagcctgagaaacctgaagtacaagaacttcatgccctggcagagcctggagaccaagaccacccaggactacggcagagagatctacatgagcggcagccacggcttccagggcggcagatacagactgggcatcagcagaaagaacctgagcatggagaaggagcagaagctgatcgtgcagcacagctacatccccgtggaggaggccctgccccagtacgtgggcgtgatctgccaggaggacctgctgagagacagcatggaggagaagtactgcggctgcaacaagtgcaagggcatctactactggaacagcagatgcgtgttccacaagagaaaccagcccggcgagaacctgtgccagtgcagcatctgcaaggcctgcttcagccagagaagcgacctgtacagacaccccagaaaccacatcggcaagaagctgtacggctgcgacgaggtggacggcaacttccaccagagcagcggcgtgcacttccaccagagagtgcacatcggcgaggtgccctacagctgcaacgcctgcggcaagagcttcagccagatcagcagcctgcacaaccaccagagagtgcacaccgaggagaagttctacaagatcgagtgcgacaaggacctgagcagaaacagcctgctgcacatccaccagagactgcacatcggcgagaagcccttcaagtgcaaccagtgcggcaagagcttcaacagaagcagcgtgctgcacgtgcaccagagagtgcacaccggcgagaagccctacaagtgcgacgagtgcggcaagggcttcagccagagcagcaacctgagaatccaccagctggtgcacaccggcgagaagagctacaagtgcgaggactgcggcaagggcttcacccagagaagcaacctgcagatccaccagagagtgcacaccggcgagaagccctacaagtgcgacgactgcggcaaggacttcagccacagcagcgacctgagaatccaccagagagtgcacaccggcgagaagccctacacctgccccgagtgcggcaagggcttcagcaagagcagcaagctgcacacccaccagagagtgcacaccggcgagaagccctacaagtgcgaggagtgcggcaagggcttcagccagagaagccacctgctgatccaccagagagtgcacaccggcgagaagccctacaagtgccacgactgcggcaagggcttcagccacagcagcaacctgcacatccaccagagagtgcacaccggcgagaagccctaccagtgcgccaagtgcggcaagggcttcagccacagcagcgccctgagaatccaccagagagtgcacgccggcgagaagccctacaagtgcagagagtactacaagggcttcgaccacaacagccacctgcacaacaaccacagaagaggcaacctgtag

SEQ ID NO: 105833 - DNA, 1821 bp, synthetic construct; identical to SEQ ID NO: 105832
  misc_feature 1..1821: note = Description of Artificial Sequence: Synthetic coding sequence
  source 1..1821: mol_type = other DNA

SEQ ID NO: 105834 - DNA, 1554 bp, synthetic construct
  misc_feature 1..1554: note = Description of Artificial Sequence: Synthetic coding sequence
  source 1..1554: mol_type = other DNA
atgcagcccctgagcaagctgatggccatcagcaagcccagaaacctgagcctgagagagcagagagaggtgctgagagccgacatgagctggcagcaggagaccaaccccgtggtggagacccacgacagcgaggccagcagacagaagttcagacacttccagtacctgaaggtgagcggcccccacgaggccctgagccagctgtgggagctgtgcctgcagtggctgagacccgagatccacaccaagaagcagatcatcgagctgctggtgctggagcagttcctggccatcctgcccgaggaggtgagaacctgggtgaacctgcagcaccccaacaacagcaaggacatggtgaccctgatcgaggacgtgatcgagatgctggaggacgaggacatgccctgcaaggacagcgccctgcagatgggcagcatcaaggagaagatgaaggccggcagcagaaccggcaagccccaggagcccgtgaccttcaaggacgtggtggtggagttcagcaaggaggagtggggccagctggacagcgccgtgaagaacctgtacagaaacgtgatgctggagaacttcagaaacctgaacagcctgagaaaggcccacctgctgagcaagcccttcgagagcctgaagctggagagcaagaagaagagatggatcatggagaaggagatccccagaaagaccatcttcgacatgaagagcatcagcggcgaggagagcagccacggcgtgatcatgaccagactgaccgagagcggccaccccagcagcgacgcctggaagggcgagaactggctgtacagaaaccagaagaagtgggacatcaacctgccccaggaggccttcatccccgagaccatctacaccgaggaggaggacttcgagtgcagcgagaacaagaagagcttcgacatcaacagcgtgagcagcatctgcgccatccaggtgggcatccccagcagaaagggcagccccaagtgcgacaagttcaagacctacttcaagttcaacctggacagcgtgggcaagcagcacagcgagtacgagtacggcaacgacctgagcctgagcaccgacatcagacaccagaagagccacaccaccatgaacagctacgagtgctaccagtgcggcaaggccttctgcagaagcagcagcctgatcagacaccagatcatccacaccggcgagaagccctacaagtgcagcgagtgcggcagattcttcaacagaagaaccaacctgaccaagcaccagaagctgcacgccgaggccaaggcctgcaccagcaacaagtgcggcaaggccttcagcaagagcgaggacagcaacaaccccaccctgcacttcggcaacaacttctaccagtgcgtgaactgcggcaagagcttcaacagaagcagcagcctgatcagacaccagatgatccacaccggcgagaagcccttcaagtgcaaggagtgcagcaaggccttcaacagaagcagcaacctggtgaagcaccagaagctgcacaccagagacaagagctag

SEQ ID NO: 105835 - DNA, 1554 bp, synthetic construct; identical to SEQ ID NO: 105834
  misc_feature 1..1554: note = Description of Artificial Sequence: Synthetic coding sequence
  source 1..1554: mol_type = other DNA

SEQ ID NO: 105836 - DNA, 915 bp, synthetic construct
  misc_feature 1..915: note = Description of Artificial Sequence: Synthetic coding sequence
  source 1..915: mol_type = other DNA
atgcagcccctgagcaagctgatggccatcagcaagcccagaaacctgagcctgagagagcagagagaggtgctgagagccgacatgagctggcagcaggagaccaaccccgtggtggagacccacgacagcgaggccagcagacagaagttcagacacttccagtacctgaaggtgagcggcccccacgaggccctgagccagctgtgggagctgtgcctgcagtggctgagacccgagatccacaccaagaagcagatcatcgagctgctggtgctggagcagttcctggccatcctgcccgaggaggtgagaacctgggtgaacctgcagcaccccaacaacagcaaggacatggtgaccctgatcgaggacgtgatcgagatgctggaggacgaggacatgccctgcaaggacagcgccctgcagatgggcagcatcaaggagaagatgaaggccggcagcagaaccggcaagccccaggagcccgtgaccttcaaggacgtggtggtggagttcagcaaggaggagtggggccagctggacagcgccgtgaagaacctgtacagaaacgtgatgctggagaacttcagaaacctgaacagcctgagaaaggcccacctgctgagcaagcccttcgagagcctgaagctggagagcaagaagaagagatggatcatggagaaggagatccccagaaagaccatcttcgacatgaagagcatcagcggcgaggagagcagccacggcgtgatcatgaccagactgaccgagagcggccaccccagcagcgacgcctggaaggacggcgtgagcctgctgctgcccagactggagtacaacgacgccgtgagcgcccactgcaacctgcacctgtgggtgcaggtgatcctgctgccccagccccccgagtag

SEQ ID NO: 105837 - DNA, 3147 bp, synthetic construct
  misc_feature 1..3147: note = Description of Artificial Sequence: Synthetic coding sequence
  source 1..3147: mol_type = other DNA
atgcagagcaaggtgaccggcaacatgcccacccagagcctgctgatgtacatggacggccccgaggtgatcggcagcagcctgggcagccccatggagatggaggacgccctgagcatgaagggcaccgccgtggtgcccttcagagccacccaggagaagaacgtgatccagatcgagggctacatgcccctggactgcatgttctgcagccagaccttcacccacagcgaggacctgaacaagcacgtgctgatgcagcacagacccaccctgtgcgagcccgccgtgctgagagtggaggccgagtacctgagccccctggacaagagccaggtgagaaccgagccccccaaggagaagaactgcaaggagaacgagttcagctgcgaggtgtgcggccagaccttcagagtggccttcgacgtggagatccacatgagaacccacaaggacagcttcacctacggctgcaacatgtgcggcagaagattcaaggagccctggttcctgaagaaccacatgagaacccacaacggcaagagcggcgccagaagcaagctgcagcagggcctggagagcagccccgccaccatcaacgaggtggtgcaggtgcacgccgccgagagcatcagcagcccctacaagatctgcatggtgtgcggcttcctgttccccaacaaggagagcctgatcgagcacagaaaggtgcacaccaagaagaccgccttcggcaccagcagcgcccagaccgacagcccccagggcggcatgcccagcagcagagaggacttcctgcagctgttcaacctgagacccaagagccaccccgagaccggcaagaagcccgtgagatgcatcccccagctggaccccttcaccaccttccaggcctggcagctggccaccaagggcaaggtggccatctgccaggaggtgaaggagagcggccaggagggcagcaccgacaacgacgacagcagcagcgagaaggagctgggcgagaccaacaagggcagctgcgccggcctgagccaggagaaggagaagtgcaagcacagccacggcgaggcccccagcgtggacgccgaccccaagctgcccagcagcaaggagaagcccacccactgcagcgagtgcggcaaggccttcagaacctaccaccagctggtgctgcacagcagagtgcacaagaaggacagaagagccggcgccgagagccccaccatgagcgtggacggcagacagcccggcacctgcagccccgacctggccgcccccctggacgagaacggcgccgtggacagaggcgagggcggcagcgaggacggcagcgaggacggcctgcccgagggcatccacctggacaagaacgacgacggcggcaagatcaagcacctgaccagcagcagagagtgcagctactgcggcaagttcttcagaagcaactactacctgaacatccacctgagaacccacaccggcgagaagccctacaagtgcgagttctgcgagtacgccgccgcccagaagaccagcctgagataccacctggagagacaccacaaggagaagcagaccgacgtggccgccgaggtgaagaacgacggcaagaaccaggacaccgaggacgccctgctgaccgccgacagcgcccagaccaagaacctgaagagattcttcgacggcgccaaggacgtgaccggcagcccccccgccaagcagctgaaggagatgcccagcgtgttccagaacgtgctgggcagcgccgtgctgagccccgcccacaaggacacccaggacttccacaagaacgccgccgacgacagcgccgacaaggtgaacaagaaccccacccccgcctacctggacctgctgaagaagagaagcgccgtggagacccaggccaacaacctgatctgcagaaccaaggccgacgtgacccccccccccgacggcagcaccacccacaacctggaggtgagccccaaggagaagcagaccgagaccgccgccgactgcagatacagacccagcgtggactgccacgagaagcccctgaacctgagcgtgggcgccctgcacaactgccccgccatcagcctgagcaagagcctgatccccagcatcacctgccccttctgcaccttcaagaccttctaccccgaggtgctgatgatgcaccagagactggagcacaagtacaaccccgacgtgcacaagaactgcagaaacaagagcctgctgagaagcagaagaaccggctgcccccccgccctgctgggcaaggacgtgccccccctgagcagcttctgcaagcccaagcccaagagcgccttccccgcccagagcaagagcctgcccagcgccaagggcaagcagagcccccccggccccggcaaggcccccctgaccagcggcatcgacagcagcaccctggcccccagcaacctgaagagccacagaccccagcagaacgtgggcgtgcagggcgccgccaccagacagcagcagagcgagatgttccccaagaccagcgtgagccccgcccccgacaagaccaagagacccgagaccaagctgaagcccctgcccgtggcccccagccagcccaccctgggcagcagcaacatcaacggcagcatcgactaccccgccaagaacgacagcccctgggccccccccggcagagactacttctgcaacagaagcgccagcaacaccgccgccgagttcggcgagcccctgcccaagagactgaagagcagcgtggtggccctggacgtggaccagcccggcgccaactacagaagaggctacgacctgcccaagtaccacatggtgagaggcatcaccagcctgctgccccaggactgcgtgtaccccagccaggccctgccccccaagcccagattcctgagcagcagcgaggtggacagccccaacgtgctgaccgtgcagaagccctacggcggcagcggccccctgtacacctgcgtgcccgccggcagccccgccagcagcagcaccctggagggcaagagacccgtgagctaccagcacctgagcaacagcatggcccagaagagaaactacgagaacttcatcggcaacgcccactacagacccaacgacaagaagacctag

SEQ ID NO: 105838 - DNA, 3147 bp, synthetic construct; identical to SEQ ID NO: 105837
  misc_feature 1..3147: note = Description of Artificial Sequence: Synthetic coding sequence
  source 1..3147: mol_type = other DNA

SEQ ID NO: 105839 - DNA, 666 bp, synthetic construct
  misc_feature 1..666: note = Description of Artificial Sequence: Synthetic coding sequence
  source 1..666: mol_type = other DNA
atgttccccaagaccagcgtgagccccgcccccgacaagaccaagagacccgagaccaagctgaagcccctgcccgtggcccccagccagcccaccctgggcagcagcaacatcaacggcagcatcgactaccccgccaagaacgacagcccctgggccccccccggcagagactacttctgcaacagaagcgccagcaacaccgccgccgagttcggcgagcccctgcccaagagactgaagagcagcgtggtggccctggacgtggaccagcccggcgccaactacagaagaggctacgacctgcccaagtaccacatggtgagaggcatcaccagcctgctgccccaggactgcgtgtaccccagccaggccctgccccccaagcccagattcctgagcagcagcgaggtggacagccccaacgtgctgaccgtgcagaagccctacggcggcagcggccccctgtacacctgcgtgcccgccggcagccccgccagcagcagcaccctggagggcctgggcggctgccagtgcctgctgcccatgaagctgaacttcaccagcagcttcgagaagagaatggtgaaggccaccgagatcagctgcgactgcaccgtgcacaagacctacgaggagagcgccagaaacaccaccgtggtgtag

SEQ ID NO: 105840 - DNA, 288 bp, synthetic construct
  misc_feature 1..288: note = Description of Artificial Sequence: Synthetic coding sequence
  source 1..288: mol_type = other DNA
atgcagagcaaggtgaccggcaacatgcccacccagagcctgctgatgtacatggacggccccgaggtgatcggcagcagcctgggcagccccatggagatggaggacgccctgagcatgaagggcaccgccgtggtgcccttcagagccacccaggagaagaacgtgatccagatcgagggctacatgcccctggactgcatgttctgcagccagaccttcacccacagcgaggacctgaacaagcacgtgctgatgcagcacagacccaccctgtgcgagccctag

SEQ ID NO: 105841 - DNA, 2169 bp, synthetic construct
  misc_feature 1..2169: note = Description of Artificial Sequence: Synthetic coding sequence
  source 1..2169: mol_type = other DNA
atggagggcagcagacccagagcccccagcggccacctggcccccagcccccccgccttcgacggcgagctggacctgcagagatacagcaacggccccgccgtgagcgccggcagcctgggcatgggcgccgtgagctggagcgagagcagagccggcgagagaagattcccctgccccgtgtgcggcaagagattcagattcaacagcatcctggccctgcacctgagagcccaccccggcgcccaggccttccagtgcccccactgcggccacagagccgcccagagagccctgctgagaagccacctgagaacccaccagcccgagagacccagaagccccgccgccagactgctgctggagctggaggagagagccctgctgagagaggccagactgggcagagccagaagcagcggcggcatgcaggccacccccgccaccgagggcctggccagaccccaggcccccagcagcagcgccttcagatgcccctactgcaagggcaagttcagaaccagcgccgagagagagagacacctgcacatcctgcacagaccctggaagtgcggcctgtgcagcttcggcagcagccaggaggaggagctgctgcaccacagcctgaccgcccacggcgcccccgagagacccctggccgccaccagcgccgccccccccccccagccccagccccagccccccccccagcccgagcccagaagcgtgccccagcccgagcccgagcccgagcccgagagagaggccacccccacccccgcccccgccgcccccgaggagccccccgccccccccgagttcagatgccaggtgtgcggccagagcttcacccagagctggttcctgaagggccacatgagaaagcacaaggccagcttcgaccacgcctgccccgtgtgcggcagatgcttcaaggagccctggttcctgaagaaccacatgaaggtgcacgccagcaagctgggccccctgagagcccccggccccgccagcggccccgccagagccccccagccccccgacctgggcctgctggcctacgagcccctgggccccgccctgctgctggcccccgcccccacccccgccgagagaagagagccccccagcctgctgggctacctgagcctgagagccggcgagggcagacccaacggcgagggcgccgagcccggccccggcagaagcttcggcggcttcagacccctgagcagcgccctgcccgccagagccagaagacacagagccgaggagcccgaggaggaggaggaggtggtggaggccgaggaggagacctgggccagaggcagaagcctgggcagcctggccagcctgcaccccagacccggcgagggccccggccacagcgccagcgccgccggcgcccaggccagaagcaccgccacccaggaggagaacggcctgctggtgggcggcaccagacccgagggcggcagaggcgccaccggcaaggactgccccttctgcggcaagagcttcagaagcgcccaccacctgaaggtgcacctgagagtgcacaccggcgagagaccctacaagtgcccccactgcgactacgccggcacccagagcggcagcctgaagtaccacctgcagagacaccacagagagcagagaagcggcgccggccccggccccccccccgagccccccccccccagccagagaggcagcgccccccagagcggcgccaagcccagcccccagcccgccacctgggtggagggcgccagcagccccagaccccccagcagcggcgccggccccggcagcagaagaaagcccgccagccccggcagaaccctgagaaacggcagaggcggcgaggccgagcccctggacctgagcctgagagccggccccggcggcgaggccggccccggcggcgccctgcacagatgcctgttctgccccttcgccaccggcgcccccgagctgatggccctgcacctgcaggtgcaccacagcagaagagccagaggcagaagacccccccaggccgacgccagccccccctacgccagagtgcccagcggcgagaccccccccagccccagccaggagggcgaggagggcagcggcctgagcagacccggcgaggccggcctgggcggccaggagagatag

SEQ ID NO: 105842 - DNA, 2169 bp, synthetic construct; identical to SEQ ID NO: 105841
  misc_feature 1..2169: note = Description of Artificial Sequence: Synthetic coding sequence
  source 1..2169: mol_type = other DNA

SEQ ID NO: 105843 - DNA, 2169 bp, synthetic construct; identical to SEQ ID NO: 105841
  misc_feature 1..2169: note = Description of Artificial Sequence: Synthetic coding sequence
  source 1..2169: mol_type = other DNA

SEQ ID NO: 105844 - DNA, 324 bp, synthetic construct
  misc_feature 1..324: note = Description of Artificial Sequence: Synthetic coding sequence
  source 1..324: mol_type = other DNA
atggagggcagcagacccagagcccccagcggccacctggcccccagcccccccgccttcgacggcgagctggacctgcagagatacagcaacggccccgccgtgagcgccggcagcctgggcatgggcgccgtgagctggagcgagagcagagccggcgagagaagattcccctgccccgtgtgcggcaagagattcagattcaacagcatcctggccctgcacctgagagcccaccccggcgcccaggccttccagtgcccccactgcggccacagagccgcccagagagccctgctgagaagccacctgagaacccactag

SEQ ID NO: 105845 - DNA, 636 bp, synthetic construct
  misc_feature 1..636: note = Description of Artificial Sequence: Synthetic coding sequence
  source 1..636: mol_type = other DNA
atggagggcagcagacccagagcccccagcggccacctggcccccagcccccccgccttcgacggcgagctggacctgcagagatacagcaacggccccgccgtgagcgccggcagcctgggcatgggcgccgtgagctggagcgagagcagagccggcgagagaagattcccctgccccgtgtgcggcaagagattcagattcaacagcatcctggccctgcacctgagagcccaccccggcgcccaggccttccagtgcccccactgcggccacagagccgcccagagagccctgctgagaagccacctgagaacccaccagcccgagagacccagaagccccgccgccagactgctgctggagctggaggagagagccctgctgagagaggccagactgggcagagccagaagcagcggcggcatgcaggccacccccgccaccgagggcctggccagaccccaggcccccagcagcagcgccttcagatgcccctactgcaagggcaagttcagaaccagcgccgagagagagagacacctgcacatcctgcacagaccctggaagtgcggcctgtgcagcttcggcagcagccaggaggaggagctgctgcaccacagcctgaccgcctag

SEQ ID NO: 105846 - DNA, 96 bp, synthetic construct
  misc_feature 1..96: note = Description of Artificial Sequence: Synthetic coding sequence
  source 1..96: mol_type = other DNA
atggagggcagcagacccagagcccccagcggccacctggcccccagcccccccgccttcgacggcgagctggacctgcagagatacagcaactag

SEQ ID NO: 105847 - DNA, 336 bp, synthetic construct
  misc_feature 1..336: note = Description of Artificial Sequence: Synthetic coding sequence
  source 1..336: mol_type = other DNA
atggagggcagcagacccagagcccccagcggccacctggcccccagcccccccgccttcgacggcgagctggacctgcagagatacagcaacggccccgccgtgagcgccggcagcctgggcatgggcgccgtgagctggagcgagagcagagccggcgagagaagattcccctgccccgtgtgcggcaagagattcagattcaacagcatcctggccctgcacctgagagcccaccccggcgcccaggccttccagtgcccccactgcggccacagagccgcccagagagccctgctgagaagccacctgagaacccaccagcccgagagatag

SEQ ID NO: 105848 - DNA, 675 bp, synthetic construct
  misc_feature 1..675: note = Description of Artificial Sequence: Synthetic coding sequence
  source 1..675: mol_type = other DNA
atgagactggccaagcccaaggccggcatcagcagaagcagcagccagggcaaggcctacgagaacaagagaaagaccggcagacagagacagaagtggggcatgaccatcagattcgacagcagcttcagcagactgagaagaagcctggacgacaagccctacaagtgcaccgagtgcgagaagagcttcagccagagcagcaccctgttccagcaccagaagatccacaccggcaagaagagccacaagtgcgccgactgcggcaagagcttcttccagagcagcaacctgatccagcacagaagaatccacaccggcgagaagccctacaagtgcgacgagtgcggcgagagcttcaagcagagcagcaacctgatccagcaccagagaatccacaccggcgagaagccctaccagtgcgacgagtgcggcagatgcttcagccagagcagccacctgatccagcaccagagaacccacaccggcgagaagccctaccagtgcagcgagtgcggcaagtgcttcagccagagcagccacctgagacagcacatgaaggtgcacaaggaggagaagcccagaaagaccagaggcaagaacatcagagtgaagacccacctgcccagctggaaggccggcaccggcagaaagagcgtggccggcctgagatag

SEQ ID NO: 105849 - DNA, 237 bp, synthetic construct
  misc_feature 1..237: note = Description of Artificial Sequence: Synthetic coding sequence
  source 1..237: mol_type = other DNA
atgaccaccttcaaggaggccatgaccttcaaggacgtggccgtggtgttcaccgaggaggagctgggcctgctggacctggcccagagaaagctgtacagagacgtgatgctggagaacttcagaaacctgctgagcgtgggccaccaggccttccacagagacaccttccacttcctgagagaggagaagatctggatgatgaagaccgccatccagagagagggcaacagctag

SEQ ID NO: 105850 - DNA, 2124 bp, synthetic construct
  misc_feature 1..2124: note = Description of Artificial Sequence: Synthetic coding sequence
  source 1..2124: mol_type = other DNA
atgaccaccttcaaggaggccatgaccttcaaggacgtggccgtggtgttcaccgaggaggagctgggcctgctggacctggcccagagaaagctgtacagagacgtgatgctggagaacttcagaaacctgctgagcgtgggccaccaggccttccacagagacaccttccacttcctgagagaggagaagatctggatgatgaagaccgccatccagagagagggcaacagcggcgacaagatccagaccgagatggagaccgtgagcgaggccggcacccaccaggagtggagcttccagcagatctgggagaagatcgccagcgacctgaccagaagccaggacctgatgatcaacagcagccagttcagcaaggagggcgacttcccctgccagaccgaggccggcctgagcgtgatccacaccagacagaagagcagccagggcaacggctacaagcccagcttcagcgacgtgagccacttcgacttccaccagcagctgcacagcggcgagaagagccacacctgcgacgagtgcggcaagaacttctgctacatcagcgccctgagaatccaccagagagtgcacatgggcgagaagtgctacaagtgcgacgtgtgcggcaaggagttcagccagagcagccacctgcagacccaccagagagtgcacaccggcgagaagcccttcaagtgcgtggagtgcggcaagggcttcagcagaagaagcgccctgaacgtgcaccacaagctgcacaccggcgagaagccctacaactgcgaggagtgcggcaaggccttcatccacgacagccagctgcaggagcaccagagaatccacaccggcgagaagcccttcaagtgcgacatctgcggcaagagcttctgcggcagaagcagactgaacagacacagcatggtgcacaccgccgagaagcccttcagatgcgacacctgcgacaagagcttcagacagagaagcgccctgaacagccacagaatgatccacaccggcgagaagccctacaagtgcgaggagtgcggcaagggcttcatctgcagaagagacctgtacacccaccacatggtgcacaccggcgagaagccctacaactgcaaggagtgcggcaagagcttcagatgggccagctgcctgctgaagcaccagagagtgcacagcggcgagaagcccttcaagtgcgaggagtgcggcaagggcttctacaccaacagccagtgctacagccaccagagaagccacagcggcgagaagccctacaagtgcgtggagtgcggcaagggctacaagagaagactggacctggacttccaccagagagtgcacaccggcgagaagctgtacaactgcaaggagtgcggcaagagcttcagcagagccccctgcctgctgaagcacgagagactgcacagcggcgagaagcccttccagtgcgaggagtgcggcaagagattcacccagaacagccacctgcacagccaccagagagtgcacaccggcgagaagccctacaagtgcgagaagtgcggcaagggctacaacagcaagttcaacctggacatgcaccagaaggtgcacaccggcgagagaccctacaactgcaaggagtgcggcaagagcttcggctgggccagctgcctgctgaagcaccagagactgcacagcggcgagaagcccttcaagtgcgaggagtgcggcaagagattcacccagaacagccagctgcacagccaccagagagtgcacaccggcgagaagccctacaagtgcgacgagtgcggcaagggcttcagctggagcagcaccagactgacccaccagagaagacacagcagagagacccccctgaagtgcgagcagcacggcaagaacatcgtgcagaacagcttcagcaaggtgcaggagaaggtgcacagcgtggagaagccctacaagtgcgaggactgcggcaagggctacaacagaagactgaacctggacatgcaccagagagtgcacatgggcgagaagacctggaagtgcagagagtgcgacatgtgcttcagccaggccagcagcctgagactgcaccagaacgtgcacgtgggcgagaagccctag

SEQ ID NO: 105851 - DNA, 1932 bp, synthetic construct
  misc_feature 1..1932: note = Description of Artificial Sequence: Synthetic coding sequence
  source 1..1932: mol_type = other DNA
atgctggagaactacggcaacgtggccagcctgggcttccccctgctgaagcccgccgtgatcagccagctggagggcggcagcgagctgggcggcagcagccccctggccgccggcaccggcctgcagggcctgcagaccgacatccagaccgacaacgacctgaccaaggagatgtacgagggcaaggagaacgtgagcttcgagctgcagagagacttcagccaggagaccgacttcagcgaggccagcctgctggagaagcagcaggaggtgcacagcgccggcaacatcaagaaggagaagagcaacaccatcgacggcaccgtgaaggacgagaccagccccgtggaggagtgcttcttcagccagagcagcaacagctaccagtgccacaccatcaccggcgagcagcccagcggctgcaccggcctgggcaagagcatcagcttcgacaccaagctggtgaagcacgagatcatcaacagcgaggagagacccttcaagtgcgaggagctggtggagcccttcagatgcgacagccagctgatccagcaccaggagaacaacaccgaggagaagccctaccagtgcagcgagtgcggcaaggccttcagcatcaacgagaagctgatctggcaccagagactgcacagcggcgagaagcccttcaagtgcgtggagtgcggcaagagcttcagctacagcagccactacatcacccaccagaccatccacagcggcgagaagccctaccagtgcaagatgtgcggcaaggccttcagcgtgaacggcagcctgagcagacaccagagaatccacaccggcgagaagccctaccagtgcaaggagtgcggcaacggcttcagctgcagcagcgcctacatcacccaccagagagtgcacaccggcgagaagccctacgagtgcaacgactgcggcaaggccttcaacgtgaacgccaagctgatccagcaccagagaatccacaccggcgagaagccctacgagtgcaacgagtgcggcaagggcttcagatgcagcagccagctgagacagcaccagagcatccacaccggcgagaagccctaccagtgcaaggagtgcggcaagggcttcaacaacaacaccaagctgatccagcaccagagaatccacaccggcgagaagccctacgagtgcaccgagtgcggcaaggccttcagcgtgaagggcaagctgatccagcaccagagaatccacaccggcgagaagccctacgagtgcaacgagtgcggcaaggccttcagatgcaacagccagttcagacagcacctgagaatccacaccggcgagaagccctacgagtgcaacgagtgcggcaaggccttcagcgtgaacggcaagctgatgagacaccagagaatccacaccggcgagaagcccttcgagtgcaacgagtgcggcagatgcttcaccagcaagagaaacctgctggaccaccacagaatccacaccggcgagaagccctaccagtgcaaggagtgcggcaaggccttcagcatcaacgccaagctgaccagacaccagagaatccacaccggcgagaagcccttcaagtgcatggagtgcgagaaggccttcagctgcagcagcaactacatcgtgcaccagagaatccacaccggcgagaagcccttccagtgcaaggagtgcggcaaggccttccacgtgaacgcccacctgatcagacaccagagaagccacaccggcgagaagcccttcagatgcgtggagtgcggcaagggcttcagcttcagcagcgactacatcatccaccagaccgtgcacacctggaagaagccctacatgtgcagcgtgtgcggcaaggccttcagattcagcttccagctgagccagcaccagagcgtgcacagcgagggcaagagctag

SEQ ID NO: 105852 - DNA, 1248 bp, synthetic construct
  misc_feature 1..1248: note = Description of Artificial Sequence: Synthetic coding sequence
  source 1..1248: mol_type = other DNA
tgcggcaaggccttcagcatcaacgagaagctgatctggcaccagagactgcacagcggcgagaagcccttcaagtgcgtggagtgcggcaagagcttcagctacagcagccactacatcacccaccagaccatccacagcggcgagaagccctaccagtgcaagatgtgcggcaaggccttcagcgtgaacggcagcctgagcagacaccagagaatccacaccggcgagaagccctaccagtgcaaggagtgcggcaacggcttcagctgcagcagcgcctacatcacccaccagagagtgcacaccggcgagaagccctacgagtgcaacgactgcggcaaggccttcaacgtgaacgccaagctgatccagcaccagagaatccacaccggcgagaagccctacgagtgcaacgagtgcggcaagggcttcagatgcagcagccagctgagacagcaccagagcatccacaccggcgagaagccctaccagtgcaaggagtgcggcaagggcttcaacaacaacaccaagctgatccagcaccagagaatccacaccggcgagaagccctacgagtgcaacgagtgcggcaaggccttcagatgcaacagccagttcagacagcacctgagaatccacaccggcgagaagccctacgagtgcaacgagtgcggcaaggccttcagcgtgaacggcaagctgatgagacaccagagaatccacaccggcgagaagcccttcgagtgcaacgagtgcggcagatgcttcaccagcaagagaaacctgctggaccaccacagaatccacaccggcgagaagccctaccagtgcaaggagtgcggcaaggccttcagcatcaacgccaagctgaccagacaccagagaatccacaccggcgagaagcccttcaagtgcatggagtgcgagaaggccttcagctgcagcagcaactacatcgtgcaccagagaatccacaccggcgagaagcccttccagtgcaaggagtgcggcaaggccttccacgtgaacgcccacctgatcagacaccagagaagccacaccggcgagaagcccttcagatgcgtggagtgcggcaagggcttcagcttcagcagcgactacatcatccaccagaccgtgcacacctggaagaagccctacatgtgcagcgtgtgcggcaaggccttcagattcagcttccagctgagccagcaccagagcgtgcacagcgagggcaagagctag

SEQ ID NO: 105853 - DNA, 1932 bp, synthetic construct; identical to SEQ ID NO: 105851
  misc_feature 1..1932: note = Description of Artificial Sequence: Synthetic coding sequence
  source 1..1932: mol_type = other DNA

SEQ ID NO: 105854 - DNA, 1932 bp, synthetic construct; identical to SEQ ID NO: 105851
  misc_feature 1..1932: note = Description of Artificial Sequence: Synthetic coding sequence
  source 1..1932: mol_type = other DNA

SEQ ID NO: 105855 - DNA, 1758 bp, synthetic construct
  misc_feature 1..1758: note = Description of Artificial Sequence: Synthetic coding sequence
  source 1..1758: mol_type = other DNA
atgtacgagggcaaggagaacgtgagcttcgagctgcagagagacttcagccaggagaccgacttcagcgaggccagcctgctggagaagcagcaggaggtgcacagcgccggcaacatcaagaaggagaagagcaacaccatcgacggcaccgtgaaggacgagaccagccccgtggaggagtgcttcttcagccagagcagcaacagctaccagtgccacaccatcaccggcgagcagcccagcggctgcaccggcctgggcaagagcatcagcttcgacaccaagctggtgaagcacgagatcatcaacagcgaggagagacccttcaagtgcgaggagctggtggagcccttcagatgcgacagccagctgatccagcaccaggagaacaacaccgaggagaagccctaccagtgcagcgagtgcggcaaggccttcagcatcaacgagaagctgatctggcaccagagactgcacagcggcgagaagcccttcaagtgcgtggagtgcggcaagagcttcagctacagcagccactacatcacccaccagaccatccacagcggcgagaagccctaccagtgcaagatgtgcggcaaggccttcagcgtgaacggcagcctgagcagacaccagagaatccacaccggcgagaagccctaccagtgcaaggagtgcggcaacggcttcagctgcagcagcgcctacatcacccaccagagagtgcacaccggcgagaagccctacgagtgcaacgactgcggcaaggccttcaacgtgaacgccaagctgatccagcaccagagaatccacaccggcgagaagccctacgagtgcaacgagtgcggcaagggcttcagatgcagcagccagctgagacagcaccagagcatccacaccggcgagaagccctaccagtgcaaggagtgcggcaagggcttcaacaacaacaccaagctgatccagcaccagagaatccacaccggcgagaagccctacgagtgcaccgagtgcggcaaggccttcagcgtgaagggcaagctgatccagcaccagagaatccacaccggcgagaagccctacgagtgcaacgagtgcggcaaggccttcagatgcaacagccagttcagacagcacctgagaatccacaccggcgagaagccctacgagtgcaacgagtgcggcaaggccttcagcgtgaacggcaagctgatgagacaccagagaatccacaccggcgagaagcccttcgagtgcaacgagtgcggcagatgcttcaccagcaagagaaacctgctggaccaccacagaatccacaccggcgagaagccctaccagtgcaaggagtgcggcaaggccttcagcatcaacgccaagctgaccagacaccagagaatccacaccggcgagaagcccttcaagtgcatggagtgcgagaaggccttcagctgcagcagcaactacatcgtgcaccagagaatccacaccggcgagaagcccttccagtgcaaggagtgcggcaaggccttccacgtgaacgcccacctgatcagacaccagagaagccacaccggcgagaagcccttcagatgcgtggagtgcggcaagggcttcagcttcagcagcgactacatcatccaccagaccgtgcacacctggaagaagccctacatgtgcagcgtgtgcggcaaggccttcagattcagcttccagctgagccagcaccagagcgtgcacagcgagggcaagagctag

SEQ ID NO: 105856 - DNA, 1758 bp, synthetic construct; identical to SEQ ID NO: 105855
  misc_feature 1..1758: note = Description of Artificial Sequence: Synthetic coding sequence
  source 1..1758: mol_type = other DNA

SEQ ID NO: 105857 - DNA, 5538 bp, synthetic construct
  misc_feature 1..5538: note = Description of Artificial Sequence: Synthetic coding sequence
  source 1..5538: mol_type = other DNA
atgggcctgtgcggcctgctggagagatgctggctgcaccacgaccccgacggcgtgctgaccctgaacgccgagaacaccaactacgcctaccaggtgcccaacttccacaagtgcgagatctgcctgctgagcttccccaaggagagccagttccagagacacatgagagaccacgagagaaacgacaagccccacagatgcgaccagtgcccccagaccttcaacgtggagttcaacctgaccctgcacaagtgcacccacagcggcgaggaccccacctgccccgtgtgcaacaagaagttcagcagagtggccagcctgaaggcccacatcatgctgcacgagaaggaggagaacctgatctgcagcgagtgcggcgacgagttcaccctgcagagccagctggccgtgcacatggaggagcacagacaggagctggccggcaccagacagcacgcctgcaaggcctgcaagaaggagttcgagaccagcagcgagctgaaggagcacatgaagacccactacaagatcagagtgagcagcaccagaagctacaacagaaacatcgacagaagcggcttcacctacagctgcccccactgcggcaagaccttccagaagcccagccagctgaccagacacatcagaatccacaccggcgagagacccttcaagtgcagcgagtgcggcaaggccttcaaccagaagggcgccctgcagacccacatgatcaagcacaccggcgagaagccccacgcctgcgccttctgccccgccgccttcagccagaagggcaacctgcagagccacgtgcagagagtgcacagcgaggtgaagaacggccccacctacaactgcaccgagtgcagctgcgtgttcaagagcctgggcagcctgaacacccacatcagcaagatgcacatgggcggcccccagaacagcaccagcagcaccgagaccgcccacgtgctgaccgccaccctgttccagaccctgcccctgcagcagaccgaggcccaggccaccagcgccagcagccagcccagcagccaggccgtgagcgacgtgatccagcagctgctggagctgagcgagcccgcccccgtggagagcggccagagcccccagcccggccagcagctgagcatcaccgtgggcatcaaccaggacatcctgcagcaggccctggagaacagcggcctgagcagcatccccgccgccgcccaccccaacgacagctgccacgccaagaccagcgccccccacgcccagaaccccgacgtgagcagcgtgagcaacgagcagaccgaccccaccgacgccgagcaggagaaggagcaggagagccccgagaagctggacaagaaggagaagaagatgatcaagaagaagagccccttcctgcccggcagcatcagagaggagaacggcgtgagatggcacgtgtgcccctactgcgccaaggagttcagaaagcccagcgacctggtgagacacatcagaatccacacccacgagaagcccttcaagtgcccccagtgcttcagagccttcgccgtgaagagcaccctgaccgcccacatcaagacccacaccggcatcaaggccttcaagtgccagtactgcatgaagagcttcagcaccagcggcagcctgaaggtgcacatcagactgcacaccggcgtgagacccttcgcctgcccccactgcgacaagaagttcagaaccagcggccacagaaagacccacatcgccagccacttcaagcacaccgagctgagaaagatgagacaccagagaaagcccgccaaggtgagagtgggcaagaccaacatccccgtgcccgacatccccctgcaggagcccatcctgatcaccgacctgggcctgatccagcccatccccaagaaccagttcttccagagctacttcaacaacaacttcgtgaacgaggccgacagaccctacaagtgcttctactgccacagagcctacaagaagagctgccacctgaagcagcacatcagaagccacaccggcgagaagcccttcaagtgcagccagtgcggcagaggcttcgtgagcgccggcgtgctgaaggcccacatcagaacccacaccggcctgaagagcttcaagtgcctgatctgcaacggcgccttcaccaccggcggcagcctgagaagacacatgggcatccacaacgacctgagaccctacatgtgcccctactgccagaagaccttcaagaccagcctgaactgcaagaagcacatgaagacccacagatacgagctggcccagcagctgcagcagcaccagcaggccgccagcatcgacgacagcaccgtggaccagcagagcatgcaggccagcacccagatgcaggtggagatcgagagcgacgagctgccccagaccgccgaggtggtggccgccaaccccgaggccatgctggacctggagccccagcacgtggtgggcaccgaggaggccggcctgggccagcagctggccgaccagcccctggaggccgacgaggacggcttcgtggccccccaggaccccctgagaggccacgtggaccagttcgaggagcagagccccgcccagcagagcttcgagcccgccggcctgccccagggcttcaccgtgaccgacacctaccaccagcagccccagttcccccccgtgcagcagctgcaggacagcagcaccctggagagccaggccctgagcaccagcttccaccagcagagcctgctgcaggcccccagcagcgacggcatgaacgtgaccaccagactgatccaggagagcagccaggaggagctggacctgcaggcccagggcagccagttcctggaggacaacgaggaccagagcagaagaagctacagatgcgactactgcaacaagggcttcaagaagagcagccacctgaagcagcacgtgagaagccacaccggcgagaagccctacaagtgcaagctgtgcggcagaggcttcgtgagcagcggcgtgctgaagagccacgagaagacccacaccggcgtgaaggccttcagctgcagcgtgtgcaacgccagcttcaccaccaacggcagcctgaccagacacatggccacccacatgagcatgaagccctacaagtgccccttctgcgaggagggcttcagaaccaccgtgcactgcaagaagcacatgaagagacaccagaccgtgcccagcgccgtgagcgccaccggcgagaccgagggcggcgacatctgcatggaggaggaggaggagcacagcgacagaaacgccagcagaaagagcagacccgaggtgatcaccttcaccgaggaggagaccgcccagctggccaagatcagaccccaggagagcgccaccgtgagcgagaaggtgctggtgcagagcgccgccgagaaggacagaatcagcgagctgagagacaagcaggccgagctgcaggacgagcccaagcacgccaactgctgcacctactgccccaagagcttcaagaagcccagcgacctggtgagacacgtgagaatccacaccggcgagaagccctacaagtgcgacgagtgcggcaagagcttcaccgtgaagagcaccctggactgccacgtgaagacccacaccggccagaagctgttcagctgccacgtgtgcagcaacgccttcagcaccaagggcagcctgaaggtgcacatgagactgcacaccggcgccaagcccttcaagtgcccccactgcgagctgagattcagaaccagcggcagaagaaagacccacatgcagttccactacaagcccgaccccaagaaggccagaaagcccatgaccagaagcagcagcgagggcctgcagcccgtgaacctgctgaacagcagcagcaccgaccccaacgtgttcatcatgaacaacagcgtgctgaccggccagttcgaccagaacctgctgcagcccggcctggtgggccaggccatcctgcccgccagcgtgagcgccggcggcgacctgaccgtgagcctgaccgacggcagcctggccaccctggagggcatccagctgcagctggccgccaacctggtgggccccaacgtgcagatcagcggcatcgacgccgccagcatcaacaacatcaccctgcagatcgaccccagcatcctgcagcagaccctgcagcagggcaacctgctggcccagcagctgaccggcgagcccggcctggccccccagaacagcagcctgcagaccagcgacagcaccgtgcccgccagcgtggtgatccagcccatcagcggcctgagcctgcagcccaccgtgaccagcgccaacctgaccatcggccccctgagcgagcaggacagcgtgctgaccaccaacagcagcggcacccaggacctgacccaggtgatgaccagccagggcctggtgagccccagcggcggcccccacgagatcaccctgaccatcaacaacagcagcctgagccaggtgctggcccaggccgccggccccaccgccaccagcagcagcggcagcccccaggagatcaccctgaccatcagcgagctgaacaccaccagcggcagcctgcccagcaccacccccatgagccccagcgccatcagcacccagaacctggtgatgagcagcagcggcgtgggcggcgacgccagcgtgaccctgaccctggccgacacccagggcatgctgagcggcggcctggacaccgtgaccctgaacatcaccagccagggccagcagttccccgccctgctgaccgaccccagcctgagcggccagggcggcgccggcagcccccaggtgatcctggtgagccacaccccccagagcgccagcgccgcctgcgaggagatcgcctaccaggtggccggcgtgagcggcaacctggcccccggcaaccagcccgagaaggagggcagagcccaccagtgcctggagtgcgacagagccttcagcagcgccgccgtgctgatgcaccacagcaaggaggtgcacggcagagagagaatccacggctgccccgtgtgcagaaaggccttcaagagagccacccacctgaaggagcacatgcagacccaccaggccggccccagcctgagcagccagaagcccagagtgttcaagtgcgacacctgcgagaaggccttcgccaagcccagccagctggagagacacagcagaatccacaccggcgagagacccttccactgcaccctgtgcgagaaggccttcaaccagaagagcgccctgcaggtgcacatgaagaagcacaccggcgagagaccctacaagtgcgcctactgcgtgatgggcttcacccagaagagcaacatgaagctgcacatgaagagagcccacagctacgccggcgccctgcaggagagcgccggccaccccgagcaggacggcgaggagctgagcagaaccctgcacctggaggaggtggtgcaggaggccgccggcgagtggcaggccctgacccacgtgttctag

SEQ ID NO: 105858 - DNA, 4677 bp, synthetic construct
  misc_feature 1..4677: note = Description of Artificial Sequence: Synthetic coding sequence
  source 1..4677: mol_type = other DNA
atgggcctgtgcggcctgctggagagatgctggctgcaccacgaccccgacggcgtgctgaccctgaacgccgagaacaccaactacgcctaccaggtgcccaacttccacaagtgcgagatctgcctgctgagcttccccaaggagagccagttccagagacacatgagagaccacgagagaaacgacaagccccacagatgcgaccagtgcccccagaccttcaacgtggagttcaacctgaccctgcacaagtgcacccacagcggcgaggaccccacctgccccgtgtgcaacaagaagttcagcagagtggccagcctgaaggcccacatcatgctgcacgagaaggaggagaacctgatctgcagcgagtgcggcgacgagttcaccctgcagagccagctggccgtgcacatggaggagcacagacaggagctggccggcaccagacagcacgcctgcaaggcctgcaagaaggagttcgagaccagcagcgagctgaaggagcacatgaagacccactacaagatcagagtgagcagcaccagaagctacaacagaaacatcgacagaagcggcttcacctacagctgcccccactgcggcaagaccttccagaagcccagccagctgaccagacacatcagaatccacaccggcgagagacccttcaagtgcagcgagtgcggcaaggccttcaaccagaagggcgccctgcagacccacatgatcaagcacaccggcgagaagccccacgcctgcgccttctgccccgccgccttcagccagaagggcaacctgcagagccacgtgcagagagtgcacagcgaggtgaagaacggccccacctacaactgcaccgagtgcagctgcgtgttcaagagcctgggcagcctgaacacccacatcagcaagatgcacatgggcggcccccagaacagcaccagcagcaccgagaccgcccacgtgctgaccgccaccctgttccagaccctgcccctgcagcagaccgaggcccaggccaccagcgccagcagccagcccagcagccaggccgtgagcgacgtgatccagcagctgctggagctgagcgagcccgcccccgtggagagcggccagagcccccagcccggccagcagctgagcatcaccgtgggcatcaaccaggacatcctgcagcaggccctggagaacagcggcctgagcagcatccccgccgccgcccaccccaacgacagctgccacgccaagaccagcgccccccacgcccagaaccccgacgtgagcagcgtgagcaacgagcagaccgaccccaccgacgccgagcaggagaaggagcaggagagccccgagaagctggacaagaaggagaagaagatgatcaagaagaagagccccttcctgcccggcagcatcagagaggagaacggcgtgagatggcacgtgtgcccctactgcgccaaggagttcagaaagcccagcgacctggtgagacacatcagaatccacacccacgagaagcccttcaagtgcccccagtgcttcagagccttcgccgtgaagagcaccctgaccgcccacatcaagacccacaccggcatcaaggccttcaagtgccagtactgcatgaagagcttcagcaccagcggcagcctgaaggtgcacatcagactgcacaccggcgtgagacccttcgcctgcccccactgcgacaagaagttcagaaccagcggccacagaaagacccacatcgccagccacttcaagcacaccgagctgagaaagatgagacaccagagaaagcccgccaaggtgagagtgggcaagaccaacatccccgtgcccgacatccccctgcaggagcccatcctgatcaccgacctgggcctgatccagcccatccccaagaaccagttcttccagagctacttcaacaacaacttcgtgaacgaggccgacagaccctacaagtgcttctactgccacagagcctacaagaagagctgccacctgaagcagcacatcagaagccacaccggcgagaagcccttcaagtgcagccagtgcggcagaggcttcgtgagcgccggcgtgctgaaggcccacatcagaacccacaccggcctgaagagcttcaagtgcctgatctgcaacggcgccttcaccaccggcggcagcctgagaagacacatgggcatccacaacgacctgagaccctacatgtgcccctactgccagaagaccttcaagaccagcctgaactgcaagaagcacatgaagacccacagatacgagctggcccagcagctgcagcagcaccagcaggccgccagcatcgacgacagcaccgtggaccagcagagcatgcaggccagcacccagatgcaggtggagatcgagagcgacgagctgccccagaccgccgaggtggtggccgccaaccccgaggccatgctggacctggagccccagcacgtggtgggcaccgaggaggccggcctgggccagcagctggccgaccagcccctggaggccgacgaggacggcttcgtggccccccaggaccccctgagaggccacgtggaccagttcgaggagcagagccccgcccagcagagcttcgagcccgccggcctgccccagggcttcaccgtgaccgacacctaccaccagcagccccagttcccccccgtgcagcagctgcaggacagcagcaccctggagagccaggccctgagcaccagcttccaccagcagagcctgctgcaggcccccagcagcgacggcatgaacgtgaccaccagactgatccaggagagcagccaggaggagctggacctgcaggcccagggcagccagttcctggaggacaacgaggaccagagcagaagaagctacagatgcgactactgcaacaagggcttcaagaagagcagccacctgaagcagcacgtgagaagccacaccggcgagaagccctacaagtgcaagctgtgcggcagaggcttcgtgagcagcggcgtgctgaagagccacgagaagacccacaccggcgtgaaggccttcagctgcagcgtgtgcaacgccagcttcaccaccaacggcagcctgaccagacacatggccacccacatgagcatgaagccctacaagtgccccttctgcgaggagggcttcagaaccaccgtgcactgcaagaagcacatgaagagacaccagaccgtgcccagcgccgtgagcgccaccggcgagaccgagggcggcgacatctgcatggaggaggaggaggagcacagcgacagaaacgccagcagaaagagcagacccgaggtgatcaccttcaccgaggaggagaccgcccagctggccaagatcagaccccaggagagcgccaccgtgagcgagaaggtgctggtgcagagcgccgccgagaaggacagaatcagcgagctgagagacaagcaggccgagctgcaggacgagcccaagcacgccaactgctgcacctactgccccaagagcttcaagaagcccagcgacctggtgagacacgtgagaatccacaccggcgagaagccctacaagtgcgacgagtgcggcaagagcttcaccgtgaagagcaccctggactgccacgtgaagacccacaccggccagaagctgttcagctgccacgtgtgcagcaacgccttcagcaccaagggcagcctgaaggtgcacatgagactgcacaccggcgccaagcccttcaagtgcccccactgcgagctgagattcagaaccagcggcagaagaaagacccacatgcagttccactacaagcccgaccccaagaaggccagaaagcccatgaccagaagcagcagcgagggcctgcagcccgtgaacctgctgaacagcagcagcaccgaccccaacgtgttcatcatgaacaacagcgtgctgaccggccagttcgaccagaacctgctgcagcccggcctggtgggccaggccatcctgcccgccagcgtgagcgccggcggcgacctgaccgtgagcctgaccgacggcagcctggccaccctggagggcatccagctgcagctggccgccaacctggtgggccccaacgtgcagatcagcggcatcgacgccgccagcatcaacaacatcaccctgcagatcgaccccagcatcctgcagcagaccctgcagcagggcaacctgctggcccagcagctgaccggcgagcccggcctggccccccagaacagcagcctgcagaccagcgacagcaccgtgcccgccagcgtggtgatccagcccatcagcggcctgagcctgcagcccaccgtgaccagcgccaacctgaccatcggccccctgagcgagcaggacagcgtgctgaccaccaacagcagcggcacccaggacctgacccaggtgatgaccagccagggcctggtgagccccagcggcggcccccacgagatcaccctgaccatcaacaacagcagcctgagccaggtgctggcccaggccgccggccccaccgccaccagcagcagcggcagcccccaggagatcaccctgaccatcagcggcagcagaagcgtgcagcacagcgtgggcccccaggagtgcggcagcgtggaggccctgtacctggagaacagcagcgacaagacctag

SEQ ID NO: 105859 - DNA, 4677 bp, synthetic construct; identical to SEQ ID NO: 105858
  misc_feature 1..4677: note = Description of Artificial Sequence: Synthetic coding sequence
  source 1..4677: mol_type = other DNA

SEQ ID NO: 105860 - DNA, 1596 bp, synthetic construct
  misc_feature 1..1596: note = Description of Artificial Sequence: Synthetic coding sequence
  source 1..1596: mol_type = other DNA
atgtgccccaagggctacgaggacagcatggagttccccgaccacagcagacacctgctgcagtgcctgagcgagcagagacaccagggcttcctgtgcgactgcaccgtgctggtgggcgacgcccagttcagagcccacagagccgtgctggccagctgcagcatgtacttccacctgttctacaaggaccagctggacaagagagacatcgtgcacctgaacagcgacatcgtgaccgcccccgccttcgccctgctgctggagttcatgtacgagggcaagctgcagttcaaggacctgcccatcgaggacgtgctggccgccgccagctacctgcacatgtacgacatcgtgaaggtgtgcaagaagaagctgaaggagaaggccaccaccgaggccgacagcaccaagaaggaggaggacgccagcagctgcagcgacaaggtggagagcctgagcgacggcagcagccacatcgccggcgacctgcccagcgacgaggacgagggcgaggacgagaagctgaacatcctgcccagcaagagagacctggccgccgagcccggcaacatgtggatgagactgcccagcgacagcgccggcatcccccaggccggcggcgaggccgagccccacgccaccgccgccggcaagaccgtggccagcccctgcagcagcaccgagagcctgagccagagaagcgtgaccagcgtgagagacagcgccgacgtggactgcgtgctggacctgagcgtgaagagcagcctgagcggcgtggagaacctgaacagcagctacttcagcagccaggacgtgctgagaagcaacctggtgcaggtgaaggtggagaaggaggccagctgcgacgagagcgacgtgggcaccaacgactacgacatggagcacagcaccgtgaaggagagcgtgagcaccaacaacagagtgcagtacgagcccgcccacctggcccccctgagagaggacagcgtgctgagagagctggacagagaggacaaggccagcgacgacgagatgatgacccccgagagcgagagagtgcaggtggagggcggcatggagagcagcctgctgccctacgtgagcaacatcctgagccccgccggccagatcttcatgtgccccctgtgcaacaaggtgttccccagcccccacatcctgcagatccacctgagcacccacttcagagagcaggacggcatcagaagcaagcccgccgccgacgtgaacgtgcccacctgcagcctgtgcggcaagaccttcagctgcatgtacaccctgaagagacacgagagaacccacagcggcgagaagccctacacctgcacccagtgcggcaagagcttccagtacagccacaacctgagcagacacgccgtggtgcacaccagagagaagccccacgcctgcaagtggtgcgagagaagattcacccagagcggcgacctgtacagacacatcagaaagttccactgcgagctggtgaacagcctgagcgtgaagagcgaggccctgagcctgcccaccgtgagagactggaccctggaggacagcagccaggagctgtggaagtag

SEQ ID NO: 105861 - DNA, 1464 bp, synthetic construct
  misc_feature 1..1464: note = Description of Artificial Sequence: Synthetic coding sequence
  source 1..1464: mol_type = other DNA
atgtgccccaagggctacgaggacagcatggagttccccgaccacagcagacacctgctgcagtgcctgagcgagcagagacaccagggcttcctgtgcgactgcaccgtgctggtgggcgacgcccagttcagagcccacagagccgtgctggccagctgcagcatgtacttccacctgttctacaaggaccagctggacaagagagacatcgtgcacctgaacagcgacatcgtgaccgcccccgccttcgccctgctgctggagttcatgtacgagggcaagctgcagttcaaggacctgcccatcgaggacgtgctggccgccgccagctacctgcacatgtacgacatcgtgaaggtgtgcaagaagaagctgaaggagaaggccaccaccgaggccgacagcaccaagaaggaggaggacgccagcagctgcagcgacaaggtggagagcctgagcgacggcagcagccacatcgccggcgacctgcccagcgacgaggacgagggcgaggacgagaagctgaacatcctgcccagcaagagagacctggccgccgagcccggcaacatgtggatgagactgcccagcgacagcgccggcatcccccaggccggcggcgaggccgagccccacgccaccgccgccggcaagaccgtggccagcccctgcagcagcaccgagagcctgagccagagaagcgtgaccagcgtgagagacagcgccgacgtggactgcgtgctggacctgagcgtgaagagcagcctgagcggcgtggagaacctgaacagcagctacttcagcagccaggacgtgctgagaagcaacctggtgcaggtgaaggtggagaaggaggccagctgcgacgagagcgacgtgggcaccaacgactacgacatggagcacagcaccgtgaaggagagcgtgagcaccaacaacagagtgcagtacgagcccgcccacctggcccccctgagagaggacagcgtgctgagagagctggacagagaggacaaggccagcgacgacgagatgatgacccccgagagcgagagagtgcaggtggagggcggcatggagagcagcctgctgccctacgtgagcaacatcctgagccccgccggccagatcttcatgtgccccctgtgcaacaaggtgttccccagcccccacatcctgcagatccacctgagcacccacttcagagagcaggacggcatcagaagcaagcccgccgccgacgtgaacgtgcccacctgcagcctgtgcggcaagaccttcagctgcatgtacaccctgaagagacacgagagaacccacagcggcgagaagccctacacctgcacccagtgcggcaagagcttccagtacagccacaacctgagcagactgcaggtggtgagagcccaggtgcacgccgtgagaggccccgtgcagacccacagccaggtgcccctgtag

SEQ ID NO: 105862 - DNA, 1377 bp, synthetic construct
  misc_feature 1..1377: note = Description of Artificial Sequence: Synthetic coding sequence
  source 1..1377: mol_type = other DNA
atggccagcaccatcaccggcagccaggactgcatcgtgaaccacagaggcgaggtggacggcgagcccgagctggacatcagcccctgccagcagtggggcgaggccagcagccccatcagcagaaacagagacagcgtgatgaccctgcagagcggctgcttcgagaacatcgagagcgagacctacctgcccctgaaggtgagcagccagatcgacacccaggacagcagcgtgaagttctgcaagaacgagccccaggaccaccaggagagcagaagactgttcgtgatggaggagagcaccgagagaaaggtgatcaagggcgagagctgcagcgagaacctgcaggtgaagctggtgagcgacggccaggagctggccagccccctgctgaacggcgaggccacctgccagaacggccagctgaaggagagcctggaccccatcgactgcaactgcaaggacatccacggctggaagagccaggtggtgagctgcagccagcagagagcccacaccgaggagaagccctgcgaccacaacaactgcggcaagatcctgaacaccagccccgacggccacccctacgagaagatccacaccgccgagaagcagtacgagtgcagccagtgcggcaagaacttcagccagagcagcgagctgctgctgcaccagagagaccacaccgaggagaagccctacaagtgcgagcagtgcggcaagggcttcaccagaagcagcagcctgctgatccaccaggccgtgcacaccgacgagaagccctacaagtgcgacaagtgcggcaagggcttcaccagaagcagcagcctgctgatccaccacgccgtgcacaccggcgagaagccctacaagtgcgacaagtgcggcaagggcttcagccagagcagcaagctgcacatccaccagagagtgcacaccggcgagaagccctacgagtgcgaggagtgcggcatgagcttcagccagagaagcaacctgcacatccaccagagagtgcacaccggcgagagaccctacaagtgcggcgagtgcggcaagggcttcagccagagcagcaacctgcacatccacagatgcatccacaccggcgagaagccctaccagtgctacgagtgcggcaagggcttcagccagagcagcgacctgagaatccacctgagagtgcacaccggcgagaagccctaccactgcggcaagtgcggcaagggcttcagccagagcagcaagctgctgatccaccagagagtgcacaccggcgagaagccctacgagtgcagcaagtgcggcaagggcttcagccagagcagcaacctgcacatccaccagagagtgcacaagaaggaccccagatag

SEQ ID NO: 105863 - DNA, 1377 bp, synthetic construct; identical to SEQ ID NO: 105862
  misc_feature 1..1377: note = Description of Artificial Sequence: Synthetic coding sequence
  source 1..1377: mol_type = other DNA

SEQ ID NO: 105864 - DNA, 1377 bp, synthetic construct; identical to SEQ ID NO: 105862
  misc_feature 1..1377: note = Description of Artificial Sequence: Synthetic coding sequence
  source 1..1377: mol_type = other DNA

SEQ ID NO: 105865 - DNA, 1377 bp, synthetic construct; identical to SEQ ID NO: 105862
  misc_feature 1..1377: note = Description of Artificial Sequence: Synthetic coding sequence
  source 1..1377: mol_type = other DNA

SEQ ID NO: 105866 - DNA, 1377 bp, synthetic construct; identical to SEQ ID NO: 105862
  misc_feature 1..1377: note = Description of Artificial Sequence: Synthetic coding sequence
  source 1..1377: mol_type = other DNA

SEQ ID NO: 105867 - DNA, 1107 bp, synthetic construct
  misc_feature 1..1107: note = Description of Artificial Sequence: Synthetic coding sequence
  source 1..1107: mol_type = other DNA
atgagcgcccagagcgtggaggaggacagcatcctgatcatccccacccccgacgaggaggagaagatcctgagagtgaagctggaggaggaccccgacggcgaggagggcagcagcatcccctggaaccacctgcccgaccccgagatcttcagacagagattcagacagttcggctaccaggacagccccggccccagagaggccgtgagccagctgagagagctgtgcagactgtggctgagacccgagacccacaccaaggagcagatcctggagctggtggtgctggagcagttcgtggccatcctgcccaaggagctgcagacctgggtgagagaccaccaccccgagaacggcgaggaggccgtgaccgtgctggaggacctggagagcgagctggacgaccccggccagcccgtgagcctgagaagaagaaagagagaggtgctggtggaggacatggtgagccaggaggaggcccagggcctgcccagcagcgagctggacgccgtggagaaccagctgaagtgggccagctgggagctgcacagcctgagacactgcgacgacgacggcagaaccgagaacggcgccctggcccccaagcaggagctgcccagcgccctggagagccacgaggtgcccggcaccctgaacatgggcgtgccccagatcttcaagtacggcgagacctgcttccccaagggcagattcgagagaaagagaaaccccagcagaaagaagcagcacatctgcgacgagtgcggcaagcacttcagccagggcagcgccctgatcctgcaccagagaatccacagcggcgagaagccctacggctgcgtggagtgcggcaaggccttcagcagaagcagcatcctggtgcagcaccagagagtgcacaccggcgagaagccctacaagtgcctggagtgcggcaaggccttcagccagaacagcggcctgatcaaccaccagagaatccacaccggcgagaagccctacgagtgcgtgcagtgcggcaagagctacagccagagcagcaacctgttcagacaccagagaagacacaacgccgagaagctgctgaacgtggtgaaggtgtag

SEQ ID NO: 105868 - DNA, 1107 bp, synthetic construct; identical to SEQ ID NO: 105867
  misc_feature 1..1107: note = Description of Artificial Sequence: Synthetic coding sequence
  source 1..1107: mol_type = other DNA

SEQ ID NO: 105869 - DNA, 1371 bp, synthetic construct
  misc_feature 1..1371: note = Description of Artificial Sequence: Synthetic coding sequence
  source 1..1371: mol_type = other DNA
atgaacaagttccagggccccgtgaccctgaaggacgtgatcgtggagttcaccaaggaggagtggaagctgctgacccccgcccagagaaccctgtacaaggacgtgatgctggagaactacagccacctggtgagcgtgggctaccacgtgaacaagcccaacgccgtgttcaagctgaagcagggcaaggagccctggatcctggaggtggagttcccccacagaggcttccccgaggacctgtggagcatccacgacctggaggccagataccaggagagccaggccggcaacagcagaaacggcgagctgaccaagcaccagaagacccacaccaccgagaaggcctgcgagtgcaaggagtgcggcaagttcttctgccagaagagcgccctgatcgtgcaccagcacacccacagcaagggcaagagctacgactgcgacaagtgcggcaagagcttcagcaagaacgaggacctgatcagacaccagaagatccacaccagagacaagacctacgagtgcaaggagtgcaagaagatcttctaccacctgagcagcctgagcagacacctgagaacccacgccggcgagaagccctacgagtgcaaccagtgcgagaagagcttctaccagaagccccacctgaccgagcaccagaagacccacaccggcgagaagcccttcgagtgcaccgagtgcggcaagttcttctacgtgaaggcctacctgatggtgcaccagaagacccacaccggcgagaagccctacgagtgcaaggagtgcggcaaggccttcagccagaagagccacctgaccgtgcaccagagaatgcacaccggcgagaagccctacaagtgcaaggagtgcggcaagttcttcagcagaaacagccacctgaagacccaccagagaagccacaccggcgagaagccctacgagtgcaaggagtgcagaaagtgcttctaccagaagagcgccctgaccgtgcaccagagaacccacaccggcgagaagcccttcgagtgcaacaagtgcggcaagaccttctactacaagagcgacctgaccaagcaccagagaaagcacaccggcgagaagccctacgagtgcaccgagtgcggcaagagcttcgccgtgaacagcgtgctgagactgcaccagagaacccacaccggcgagaagccctacgcctgcaaggagtgcggcaagagcttcagccagaagagccacttcatcatccaccagagaaagcacaccggcgagaagccctacgagtgccaggagtgcggcgagaccttcatccagaagagccagctgaccgcccaccagaagacccacaccaagaagagaaacgccgagaagtag

SEQ ID NO: 105870 - DNA, 1263 bp, synthetic construct
  misc_feature 1..1263: note = Description of Artificial Sequence: Synthetic coding sequence
  source 1..1263: mol_type = other DNA
atgctggagaactacagccacctggtgagcgtgggctaccacgtgaacaagcccaacgccgtgttcaagctgaagcagggcaaggagccctggatcctggaggtggagttcccccacagaggcttccccgaggacctgtggagcatccacgacctggaggccagataccaggagagccaggccggcaacagcagaaacggcgagctgaccaagcaccagaagacccacaccaccgagaaggcctgcgagtgcaaggagtgcggcaagttcttctgccagaagagcgccctgatcgtgcaccagcacacccacagcaagggcaagagctacgactgcgacaagtgcggcaagagcttcagcaagaacgaggacctgatcagacaccagaagatccacaccagagacaagacctacgagtgcaaggagtgcaagaagatcttctaccacctgagcagcctgagcagacacctgagaacccacgccggcgagaagccctacgagtgcaaccagtgcgagaagagcttctaccagaagccccacctgaccgagcaccagaagacccacaccggcgagaagcccttcgagtgcaccgagtgcggcaagttcttctacgtgaaggcctacctgatggtgcaccagaagacccacaccggcgagaagccctacgagtgcaaggagtgcggcaaggccttcagccagaagagccacctgaccgtgcaccagagaatgcacaccggcgagaagccctacaagtgcaaggagtgcggcaagttcttcagcagaaacagccacctgaagacccaccagagaagccacaccggcgagaagccctacgagtgcaaggagtgcagaaagtgcttctaccagaagagcgccctgaccgtgcaccagagaacccacaccggcgagaagcccttcgagtgcaacaagtgcggcaagaccttctactacaagagcgacctgaccaagcaccagagaaagcacaccggcgagaagccctacgagtgcaccgagtgcggcaagagcttcgccgtgaacagcgtgctgagactgcaccagagaacccacaccggcgagaagccctacgcctgcaaggagtgcggcaagagcttcagccagaagagccacttcatcatccaccagagaaagcacaccggcgagaagccctacgagtgccaggagtgcggcgagaccttcatccagaagagccagctgaccgcccaccagaagacccacaccaagaagagaaacgccgagaagtag

SEQ ID NO: 105871 - DNA, 1500 bp, synthetic construct
  misc_feature 1..1500: note = Description of Artificial Sequence: Synthetic coding sequence
  source 1..1500: mol_type = other DNA
atgggccccctgcagttcagagacgtggccatcgagttcagcctggaggagtggcactgcctggacaccgcccagagaaacctgtacagagacgtgatgctggagaactacagaaacctggtgttcctgggcatcgtggtgagcaagcccgacctggtgacctgcctggagcagggcaagaagcccctgaccatggagagacacgagatgatcgccaagccccccgtgatgagcagccacttcgcccaggacctgtggcccgagaacatccagaacagcttccagatcggcatgctgagaagatacgaggagtgcagacacgacaacctgcagctgaagaagggctgcaagagcgtgggcgagcacaaggtgcacaagggcggctacaacggcctgaaccagtgcctgaccaccacccagaaggagatcttccagtgcgacaagtacggcaaggtgttccacaagttcagcaacagcaacacctacaagaccagacacaccggcatcaacctgttcaagtgcatcatctgcggcaaggccttcaagagaagcagcaccctgaccacccacaagaagatccacaccggcgagaagccctacagatgcgaggagtgcggcaaggccttcaaccagagcgccaacctgaccacccacaagagaatccacaccggcgagaagccctacagatgcgaggagtgcggcaaggccttcaagcagagcagcaacctgaccacccacaagaagatccacaccggcgagaagccctacaagtgcgaggagtgcggcaaggccttcaacagaagcaccgacctgaccacccacaagatcgtgcacaccggcgagaagccctacaagtgcgaggagtgcggcaaggccttcaagcaccccagccacgtgaccacccacaagaagatccacaccagaggcaagccctacaactgcgaggagtgcggcaagagcttcaagcactgcagcaacctgaccatccacaagagaatccacaccggcgagaagccctacaagtgcgaggagtgcggcaaggccttccacctgagcagccacctgaccacccacaagatcctgcacaccggcgagaagccctacagatgcagagagtgcggcaaggccttcaaccacagcaccaccctgttcagccacgagaagatccacaccggcgagaagccctacaagtgcgacgagtgcggcaagaccttcacctggcccagcatcctgagcaagcacaagagaacccacaccggcgagaagccctacaagtgcgaggagtgcggcaagagcttcaccgccagcagcaccctgaccacccacaagagaatccacaccggcgagaagccctacaagtgcgaggagtgcggcaaggccttcaactggagcagcgacctgaacaagcacaagaagatccacatcgagagaaagccctacatcgtgaagaacgtgaccgacctgctgaacgtgccccccctgctgatcagcatcagatag

SEQ ID NO: 105872 - DNA, 1500 bp, synthetic construct; identical to SEQ ID NO: 105871
  misc_feature 1..1500: note = Description of Artificial Sequence: Synthetic coding sequence
  source 1..1500: mol_type = other DNA

SEQ ID NO: 105873 - DNA, 276 bp, synthetic construct
  misc_feature 1..276: note = Description of Artificial Sequence: Synthetic coding sequence
  source 1..276: mol_type = other DNA
atgcccggcccccccagaagcctggagatgggcctgctgaccttcagagacgtggccatcgagttcagcctggaggagtggcagcacctggacatcgcccagcagaacctgtacagaaacgtgatgctggagaactacagaaacctggccttcctgggcatcgccgtgagcaagcccgacctgatcacctgcctggagcagggcaaggagccctggaacatgaagagacacgagatggtggacgagccccccggcctggacttcagcctgctgtag

SEQ ID NO: 105874 - DNA, 1725 bp, synthetic construct
  misc_feature 1..1725: note = Description of Artificial Sequence: Synthetic coding sequence
  source 1..1725: mol_type = other DNA
atgtgcccccacttcgcccaggacctgtggcccgagcagggcatggaggacagcttccagaaggccatcctgagaagatacggcaagtacggccacgagaacctgcagctgagaaagggctgcaagagcgtggacgagtacaaggtgaacaaggagggctacaacggcctgaaccagtgcttcaccaccgcccagagcaaggtgttccagtgcgacaagtacctgaaggtgttctacaagttcctgaacagcaacagacccaagatcagacacaccgagaagaagagcttcaagtgcaagaagagagtgaagctgttctgcatgctgagccacaagacccagcacaagagcatctaccacagagagaagagctacaagtgcaaggagtgcggcaagaccttcaactggagcagcaccctgaccaaccacagaaagatctacaccgaggagaagccctacaagtgcgaggagtacaacaagagccccaagcagctgagcaccctgaccacccacgagatcatccacgccggcgagaagctgtacaagtgcgaggagtgcggcgaggccttcaacagaagcagcaacctgaccacccacaagatcatccacaccggcgagaagccctacaagtgcgaggagtgcggcaaggccttcatctggagcagcaccctgaccgagcacaagaagatccacaccagaaagaagccctacaagtgcgaggagtgcggcaaggccttcatctggagcagcaccctgaccagacacaagagaatgcacaccggcgagaagccctacaagtgcgaggagtgcggcaaggccttcagccagagcagcaccctgaccacccacaagatcatccacaccggcgagaagagatacaagtgcctggagtgcggcaaggccttcaagcagctgagcaccctgaccacccacaagatcatccacgtgggcgagaagctgtacaagtgcgaggagtgcggcaagggcttcaacagaagcagcaacctgaccacccacaagatcatccacaccggcgagaagccctacaagtgcgaggagtgcggcaaggccttcatctggagcagcaccctgaccaagcacaagagaatccacaccagagagaagccctacaagtgcgaggagtgcggcaaggccttcatctggagcagcaccctgaccagacacaagagaatgcacaccggcgagaagccctacaagtgcgaggagtgcggcaagagcttcagccagagcagcaccctgaccacccacaagatcatccacaccggcgagaagccctacaagtgcgaggagtgcggcaaggccttcaactggagcagcaccctgaccaagcacaagatcatccacaccgaggagaagccctacaagtgcgagaagtgcggcaaggccttcaagcagagcagcatcctgaccaaccacaagagaatccacaccggcgagaagccctacaagtgcgaggagtgcggcaagagcttcaacagaagcagcaccttcaccaagcacaaggtgatccacaccggcgtgaagccctacaagtgcgaggagtgcggcaaggccttcttctggagcagcaccctgaccaagcacaagagaatccacaccggcgagcagccctacaagtgggagaagttcggcaaggccttcaacagaagcagccacctgaccaccgacaagatcacccactggagagagatcctgcaggtgtag

SEQ ID NO: 105875 - DNA, 1980 bp, synthetic construct
  misc_feature 1..1980: note = Description of Artificial Sequence: Synthetic coding sequence
  source 1..1980: mol_type = other DNA
atgcccggcccccccagaagcctggagatgggcctgctgaccttcagagacgtggccatcgagttcagcctggaggagtggcagcacctggacatcgcccagcagaacctgtacagaaacgtgatgctggagaactacagaaacctggccttcctgggcatcgccgtgagcaagcccgacctgatcacctgcctggagcagggcaaggagccctggaacatgaagagacacgagatggtggacgagccccccggcatgtgcccccacttcgcccaggacctgtggcccgagcagggcatggaggacagcttccagaaggccatcctgagaagatacggcaagtacggccacgagaacctgcagctgagaaagggctgcaagagcgtggacgagtacaaggtgaacaaggagggctacaacggcctgaaccagtgcttcaccaccgcccagagcaaggtgttccagtgcgacaagtacctgaaggtgttctacaagttcctgaacagcaacagacccaagatcagacacaccgagaagaagagcttcaagtgcaagaagagagtgaagctgttctgcatgctgagccacaagacccagcacaagagcatctaccacagagagaagagctacaagtgcaaggagtgcggcaagaccttcaactggagcagcaccctgaccaaccacagaaagatctacaccgaggagaagccctacaagtgcgaggagtacaacaagagccccaagcagctgagcaccctgaccacccacgagatcatccacgccggcgagaagctgtacaagtgcgaggagtgcggcgaggccttcaacagaagcagcaacctgaccacccacaagatcatccacaccggcgagaagccctacaagtgcgaggagtgcggcaaggccttcatctggagcagcaccctgaccgagcacaagaagatccacaccagaaagaagccctacaagtgcgaggagtgcggcaaggccttcatctggagcagcaccctgaccagacacaagagaatgcacaccggcgagaagccctacaagtgcgaggagtgcggcaaggccttcagccagagcagcaccctgaccacccacaagatcatccacaccggcgagaagagatacaagtgcctggagtgcggcaaggccttcaagcagctgagcaccctgaccacccacaagatcatccacgtgggcgagaagctgtacaagtgcgaggagtgcggcaagggcttcaacagaagcagcaacctgaccacccacaagatcatccacaccggcgagaagccctacaagtgcgaggagtgcggcaaggccttcatctggagcagcaccctgaccaagcacaagagaatccacaccagagagaagccctacaagtgcgaggagtgcggcaaggccttcatctggagcagcaccctgaccagacacaagagaatgcacaccggcgagaagccctacaagtgcgaggagtgcggcaagagcttcagccagagcagcaccctgaccacccacaagatcatccacaccggcgagaagccctacaagtgcgaggagtgcggcaaggccttcaactggagcagcaccctgaccaagcacaagatcatccacaccgaggagaagccctacaagtgcgagaagtgcggcaaggccttcaagcagagcagcatcctgaccaaccacaagagaatccacaccggcgagaagccctacaagtgcgaggagtgcggcaagagcttcaacagaagcagcaccttcaccaagcacaaggtgatccacaccggcgtgaagccctacaagtgcgaggagtgcggcaaggccttcttctggagcagcaccctgaccaagcacaagagaatccacaccggcgagcagccctacaagtgggagaagttcggcaaggccttcaacagaagcagccacctgaccaccgacaagatcacccactggagagagatcctgcaggtgtag

SEQ ID NO: 105876 - DNA, 1056 bp, synthetic construct
  misc_feature 1..1056: note = Description of Artificial Sequence: Synthetic coding sequence
  source 1..1056: mol_type = other DNA
atgcccggcccccccagaagcctggagatgggcctgctgaccttcagagacgtggccatcgagttcagcctggaggagtggcagcacctggacatcgcccagcagaacctgtacagaaacgtgatgctggagaactacagaaacctggccttcctgggcatcgccgtgagcaagcccgacctgatcacctgcctggagcagggcaaggagccctggaacatgaagagacacgagatggtggacgagccccccggcatgtgcccccacttcgcccaggacctgtggcccgagcagggcatggaggacagcttccagaaggccatcctgagaagatacggcaagtacggccacgagaacctgcagctgagaaagggctgcaagagcgtggacgagtacaaggtgaacaaggagggctacaacggcctgaaccagtgcttcaccaccgcccagagcaaggtgttccagtgcgacaagtacctgaaggtgttctacaagttcctgaacagcaacagacccaagatcagacacaccgagaagaagagcttcaagtgcaagaagagagtgaagctgttctgcatgctgagccacaagacccagcacaagagcatctaccacagagagaagagctacaagtgcaaggagtgcggcaagaccttcaactggagcagcaccctgaccaaccacagaaagatctacaccgaggagaagccctacaagtgcgaggagtacaacaagagccccaagcagctgagcaccctgaccacccacgagatcatccacgccggcgagaagctgtacaagtgcgaggagtgcggcgaggccttcaacagaagcagcaccttcaccaagcacaaggtgatccacaccggcgtgaagccctacaagtgcgaggagtgcggcaaggccttcttctggagcagcaccctgaccaagcacaagagaatccacaccggcgagcagccctacaagtgggagaagttcggcaaggccttcaacagaagcagccacctgaccaccgacaagatcacccactggagagagatcctgcaggtgtag

SEQ ID NO: 105877 - DNA, 1884 bp, synthetic construct
  misc_feature 1..1884: note = Description of Artificial Sequence: Synthetic coding sequence
  source 1..1884: mol_type = other DNA
atggccgccgccgagctgaccgcccccgcccagggcatcgtgaccttcgaggacgtggccgtgtacttcagctggaaggagtggggcctgctggacgaggcccagaagtgcctgtaccacgacgtgatgctggagaacctgaccctgaccaccagcctgggcggcagcggcgccggcgacgaggaggccccctaccagcagagcaccagcccccagagagtgagccaggtgagaatccccaaggccctgcccagcccccagaagaccaacccctgcgagatctgcggccccgtgctgagacagatcctgcacctggtggagcaccagggcacccaccacggccagaagctgtacaccgacggcgcctgcagaaagcagctgcagttcaccgcctacctgcaccagcaccagaagcagcacgtgggccagaagcacttcagaagcaacggcggcagagacatgttcctgagcagctgcaccttcgaggtgagcggcaagcccttcacctgcaaggaggtgggcaaggacttcctggtgagaagcagattcctgcagcagcaggccgcccacaccagaaagaagagcaacagaaccaagagcgccgtggccttccacagcgtgaagaaccactacaactggggcgagtgcgtgaaggccttcagctacaagcacgtgagagtgcagcaccagggcgacctgatcagagagagaagctacatgtgcagcgagtgcggcaagagcttcagcaccagctgcagcctgagcgaccacctgagagtgcacaccagcgagaagccctacacctgcggcgagtgcggcaagagctacagacagagcagcagcctgatcacccacagaagaatccacaccggcgtgagaccccaccagtgcgacgagtgcggcaagctgttcaacagaaagtacgacctgctgatccaccagagagtgcacaccggcgagagaccctacaagtgcagcgagtgcggcaagagcttcagccacagcagcagcctgatcacccaccagagaatccacaccggcatgagaccctacgagtgcagcgagtgcggcaagagcttcatccacagcagcagcctgatcacccaccagagagtgcacaccggcaccagaccctacatgtgcagcgagtgcggcaagagcttcagccagagctgccacctgatcaagcacagaagactgcacatcggcgagggcccctacgagtgcagcgagtgcggcaagctgttcacctacagaagcagattcttccagcaccagagagtgcacaccggcgtgagaagccacgagtgccacgagtgcggcaagctgttcagcagaaagttcgacctgatcgtgcacgagagagtgcacaccggcgagagaccctacgagtgcagcgagtgcggcaagagcttcacctgcaagagctacctgatcagccactggaaggtgcacaccggcgccagaccctacgagtgcggcgagtgcggcaagagcttcacccacagcagcaccctgctgcagcaccagagagtgcacaccggcgagagaccctacgagtgcaacgagtgcggcaagttcttcagccagagcagcagcctgatcagacacagaagaagccacaccggcgagagaccctacgagtgcagcgagtgctggaagagcttcagcaaccacagcagcctggtgaagcacagaagagtgcacaccggcgagagaccctacgagtgcagcgagtgcggcaagagcttcagccagagcagcaacctgaccaaccaccagagaatccacagcggcgagagaccctacgagtgcagcgactgcggcaagttcttcaccttcaacagcaacctgctgaagcaccagaacgtgcacaagggctag

SEQ ID NO: 105878 - DNA, 1608 bp, synthetic construct
  misc_feature 1..1608: note = Description of Artificial Sequence: Synthetic coding sequence
  source 1..1608: mol_type = other DNA
atgggccccctgaccatcagagacgtgaccgtggagttcagcctggaggagtggcactgcctggacaccgcccagcagaacctgtacagagacgtgatgctggagaactacagaaacctggtgttcctgggcatcgccgtgagcaagcccgacctgatcacctgcctggagcagggcaaggagccctgcaacatgaagagacacgagatggtggccaagccccccgtgatgtgcagccacatcgccgaggacctgtgccccgagagagacatcaagtacttcttccagaaggtgatcctgagaagatacgacaagtgcgagcacgagaacctgcagctgagaaagggctgcaagagcgtggacgagtgcaaggtgtgcaagggcggctacaacggcctgaaccagtgcctgatcaccacccagagcaagatgtaccagtgcgacaagtacgtgaaggtgttctacaagttcagcaacagcgacagacacaagatcagacacaccgagaagaagacctgcaagtgcaaggagtgcggcaaggccttcaaccagagcagcgccctgaccagacacaagatgacccacaccggcgagaagccctacaagtgcgaggagtgcggcaaggccttcaacagaagcagccacctgacccagcacaaggtgatccacaccagagagaagccctacaagtgcgaggagtgcggcaaggccttcaacagaagcagccacatcacccagcacaagagaatccacaacagagagaagcccttcaagtacgacgagtgctgcaaggccttcaagtggagcagcgccctgaccaccctgacccagcacaagagaatccacaccggcgagaagccctacaagtgcgaggagtgcggcaaggccttcaaccagagcagcgccctgaccagacacaagatgatccacaccggcgagaagcccttccagtgcgaggagtgcggcaaggccttcaacagaagcagccacctgacccagcacaagatcatccacaccaaggagaagccctacaagtgcgaggagtgcggcaaggccttcaacagaagcagccacctgaccaagcacaagagaatccacaccagagagaaggcctacaagtgcgacgagtactgcaaggccttcaactggagcagcgccctgaccaccctgacccagcacaagatcatccacaccggcgagaagccctacaagtgcgaggagtgcggcaaggccttcaacagaagcagctacctgatcagacacaagatcatccacaccggcgagaagccctacaagtgcgaggagtgcggcaaggccttcaaccagagcagccacctgacccagcacaagatcatccacaccggcgagaagccctacaagtgcgaggagtgcggcaaggccttcaacagaagcagccacctgagccagcacaagatcatccacaccggcgagaagccctacaagtgcgaggagtgcggcaagcccttcaacagattcagctacctgaccgtgcacaagagaatccacgccggcgagaaccccaacaagtacgaggagtgcggcaaggcctgcaaccacagcagcaacctgaccaagcacaacagctag

SEQ ID NO: 105879 - DNA, 1692 bp, synthetic construct
  misc_feature 1..1692: note = Description of Artificial Sequence: Synthetic coding sequence
  source 1..1692: mol_type = other DNA
atgggccccctgaccatcagagacgtgaccgtggagttcagcctggaggagtggcactgcctggacaccgcccagcagaacctgtacagagacgtgatgctggagaactacagaaacctggtgttcctgggcatcgccgtgagcaagcccgacctgatcacctgcctggagcagggcaaggagccctgcaacatgaagagacacgagatggtggccaagccccccgtgatgtgcagccacatcgccgaggacctgtgccccgagagagacatcaagtacttcttccagaaggtgatcctgagaagatacgacaagtgcgagcacgagaacctgcagctgagaaagggctgcaagagcgtggacgagtgcaaggtgtgcaagggcggctacaacggcctgaaccagtgcctgatcaccacccagagcaagatgtaccagtgcgacaagtacgtgaaggtgttctacaagttcagcaacagcgacagacacaagatcagacacaccgagaagaagacctgcaagtgcaaggagtgcggcaagagcttctgcatgctgagccagctgaccagacacaagagaatccacatcagagagaacagccacaagtgcgaggagtgcggcaaggccttcaaccagagcagcgccctgaccagacacaagatgacccacaccggcgagaagccctacaagtgcgaggagtgcggcaaggccttcaacagaagcagccacctgacccagcacaaggtgatccacaccagagagaagccctacaagtgcgaggagtgcggcaaggccttcaacagaagcagccacatcacccagcacaagagaatccacaacagagagaagcccttcaagtacgacgagtgctgcaaggccttcaagtggagcagcgccctgaccaccctgacccagcacaagagaatccacaccggcgagaagccctacaagtgcgaggagtgcggcaaggccttcaaccagagcagcgccctgaccagacacaagatgatccacaccggcgagaagcccttccagtgcgaggagtgcggcaaggccttcaacagaagcagccacctgacccagcacaagatcatccacaccaaggagaagccctacaagtgcgaggagtgcggcaaggccttcaacagaagcagccacctgaccaagcacaagagaatccacaccagagagaaggcctacaagtgcgacgagtactgcaaggccttcaactggagcagcgccctgaccaccctgacccagcacaagatcatccacaccggcgagaagccctacaagtgcgaggagtgcggcaaggccttcaacagaagcagctacctgatcagacacaagatcatccacaccggcgagaagccctacaagtgcgaggagtgcggcaaggccttcaaccagagcagccacctgacccagcacaagatcatccacaccggcgagaagccctacaagtgcgaggagtgcggcaaggccttcaacagaagcagccacctgagccagcacaagatcatccacaccggcgagaagccctacaagtgcgaggagtgcggcaagcccttcaacagattcagctacctgaccgtgcacaagagaatccacgccggcgagaaccccaacaagtacgaggagtgcggcaaggcctgcaaccacagcagcaacctgaccaagcacaacagctag

SEQ ID NO: 105880 - DNA, 1692 bp, synthetic construct; identical to SEQ ID NO: 105879
  misc_feature 1..1692: note = Description of Artificial Sequence: Synthetic coding sequence
  source 1..1692: mol_type = other DNA

SEQ ID NO: 105881 - DNA, 1602 bp, synthetic construct
  misc_feature 1..1602: note = Description of Artificial Sequence: Synthetic coding sequence
  source 1..1602: mol_type = other DNA
atggccaccagcttcagaaccgccagctgctggggcctgctgagcttcaaggacatcagcatggagttcacctgggacgagtggcagctgctggacagcacccagaagtacctgtacagagacgtgatcctggagaactaccacaacctgatcagcgtgggctaccacggcaccaagcccgacctgatcttcaagctggagcagggcgaggacccctggatcatcaacgccaagatcagcagacagagctgccccgacggctgggaggagtggtaccagaacaaccaggacgagctggagagcatcgagagaagctacgcctgcagcgtgctgggcagactgaacctgagcaagacccacgacagcagcagacagagactgtacaacaccagaggcaagagcctgacccagaacagcgcccccagcagaagctacctgagaaagaaccccgacaagttccacggctacgaggagccctacttcctgaagcaccagagagcccacagcatcgagaagaactgcgtgtgcagcgagtgcggcaaggccttcagatgcaagagccagctgatcgtgcacctgagaatccacaccggcgagagaccctacgagtgcagcaagtgcgagagagccttcagcgccaagagcaacctgaacgcccaccagagagtgcacaccggcgagaagccctacagctgcagcgagtgcgagaaggtgttcagcttcagaagccagctgatcgtgcaccaggagatccacaccggcggcaagccctacggctgcagcgagtgcggcaaggcctacagctggaagagccagctgctgctgcaccagagaagccacaccggcgtgaagccctacgagtgcagcgagtgcggcaaggccttcagcctgaagagccccttcgtggtgcaccagagaacccacaccggcgtgaagccccacaagtgcagcgagtgcggcaaggccttcagaagcaagagctacctgctggtgcacatcagaatgcacaccggcgagaagccctaccagtgcagcgactgcggcaaggccttcaacatgaagacccagctgatcgtgcaccagggcgtgcacaccggcaacaacccctaccagtgcggcgagtgcggcaaggccttcggcagaaaggagcagctgaccgcccacctgagagcccacgccggcgagaagccctacggctgcagcgagtgcggcaaggccttcagcagcaagagctacctggtgatccacagaagaacccacaccggcgagagaccctacgagtgcagcctgtgcgagagagccttctgcggcaagagccagctgatcatccaccagagaacccacagcaccgagaagccctacgagtgcaacgagtgcgagaaggcctaccccagaaaggccagcctgcagatccaccagaagacccacagcggcgagaagcccttcaagtgcagcgagtgcggcaaggccttcacccagaagagcagcctgagcgagcaccagagagtgcacaccggcgagaagccctggaagtgcagcgagtgcggcaagagcttctgctggaacagcggcctgagaatccacagaaagacccacaagtag

SEQ ID NO: 105882 - DNA, 1542 bp, synthetic construct
  misc_feature 1..1542: note = Description of Artificial Sequence: Synthetic coding sequence
  source 1..1542: mol_type = other DNA
atggagttcacctgggacgagtggcagctgctggacagcacccagaagtacctgtacagagacgtgatcctggagaactaccacaacctgatcagcgtgggctaccacggcaccaagcccgacctgatcttcaagctggagcagggcgaggacccctggatcatcaacgccaagatcagcagacagagctgccccgacggctgggaggagtggtaccagaacaaccaggacgagctggagagcatcgagagaagctacgcctgcagcgtgctgggcagactgaacctgagcaagacccacgacagcagcagacagagactgtacaacaccagaggcaagagcctgacccagaacagcgcccccagcagaagctacctgagaaagaaccccgacaagttccacggctacgaggagccctacttcctgaagcaccagagagcccacagcatcgagaagaactgcgtgtgcagcgagtgcggcaaggccttcagatgcaagagccagctgatcgtgcacctgagaatccacaccggcgagagaccctacgagtgcagcaagtgcgagagagccttcagcgccaagagcaacctgaacgcccaccagagagtgcacaccggcgagaagccctacagctgcagcgagtgcgagaaggtgttcagcttcagaagccagctgatcgtgcaccaggagatccacaccggcggcaagccctacggctgcagcgagtgcggcaaggcctacagctggaagagccagctgctgctgcaccagagaagccacaccggcgtgaagccctacgagtgcagcgagtgcggcaaggccttcagcctgaagagccccttcgtggtgcaccagagaacccacaccggcgtgaagccccacaagtgcagcgagtgcggcaaggccttcagaagcaagagctacctgctggtgcacatcagaatgcacaccggcgagaagccctaccagtgcagcgactgcggcaaggccttcaacatgaagacccagctgatcgtgcaccagggcgtgcacaccggcaacaacccctaccagtgcggcgagtgcggcaaggccttcggcagaaaggagcagctgaccgcccacctgagagcccacgccggcgagaagccctacggctgcagcgagtgcggcaaggccttcagcagcaagagctacctggtgatccacagaagaacccacaccggcgagagaccctacgagtgcagcctgtgcgagagagccttctgcggcaagagccagctgatcatccaccagagaacccacagcaccgagaagccctacgagtgcaacgagtgcgagaaggcctaccccagaaaggccagcctgcagatccaccagaagacccacagcggcgagaagcccttcaagtgcagcgagtgcggcaaggccttcacccagaagagcagcctgagcgagcaccagagagtgcacaccggcgagaagccctggaagtgcagcgagtgcggcaagagcttctgctggaacagcggcctgagaatccacagaaagacccacaagtag

SEQ ID NO: 105883 - DNA, 1239 bp, synthetic construct
  misc_feature 1..1239: note = Description of Artificial Sequence: Synthetic coding sequence
  source 1..1239: mol_type = other DNA
atgatcggcatgctggagagcctgcagcacgagagcgacctgctgcagcacgaccagatccacaccggcgagaagccctacgagtgcaacgagtgcagaaagaccttcagcctgaagcagaacctggtggagcacaagaagatgcacaccggcgagaagagccacgagtgcaccgagtgcggcaaggtgtgcagcagagtgagcagcctgaccctgcacctgagaagccacaccggcaagaaggcctacaagtgcaacaagtgcggcaaggccttcagccagaaggagaacttcctgagccaccagaagcaccacaccggcgagaagccctacgagtgcgagaaggtgagcatccagatgcccaccatcatcagacaccagaagaaccacaccggcaccaagccctacgcctgcaaggagtgcggcaaggccttcaacggcaaggcctacctgaccgagcacgagaagatccacaccggcgagaagcccttcgagtgcaaccagtgcggcagagccttcagccagaagcagtacctgatcaagcaccagaacatccacaccggcaagaagcccttcaagtgcagcgagtgcggcaaggccttcagccagaaggagaacctgatcatccaccagagaatccacaccggcgagaagccctacgagtgcaagggctgcggcaaggccttcatccagaagagcagcctgatcagacaccagagaagccacaccggcgagaagccctacacctgcaaggagtgcggcaaggccttcagcggcaagagcaacctgaccgagcacgagaagatccacatcggcgagaagccctacaagtgcaacgagtgcggcaccatcttcagacagaagcagtacctgatcaagcaccacaacatccacaccggcgagaagccctacgagtgcaacaagtgcggcaaggccttcagcagaatcaccagcctgatcgtgcacgtgagaatccacaccggcgacaagccctacgagtgcaaggtgtgcggcaaggccttctgccagagcagcagcctgaccgtgcacatgagaagccacaccggcgagaagccctacggctgcaacgagtgcggcaaggccttcagccagttcagcaccctggccctgcacatgagaatccacaccggcgagaagccctaccagtgcagcgagtgcggcaaggccttcagccagaagagccaccacatcagacaccagagaatccacacccactag

SEQ ID NO: 105884 - DNA, 1239 bp, synthetic construct; identical to SEQ ID NO: 105883
  misc_feature 1..1239: note = Description of Artificial Sequence: Synthetic coding sequence
  source 1..1239: mol_type = other DNA

SEQ ID NO: 105885 - DNA, 1884 bp, synthetic construct
  misc_feature 1..1884: note = Description of Artificial Sequence: Synthetic coding sequence
  source 1..1884: mol_type = other DNA
atggccgccgccgtgctgaccgacagagcccaggtgagcgtgaccttcgacgacgtggccgtgaccttcaccaaggaggagtggggccagctggacctggcccagagaaccctgtaccaggaggtgatgctggagaactgcggcctgctggtgagcctgggctgccccgtgcccaaggccgagctgatctgccacctggagcacggccaggagccctggaccagaaaggaggacctgagccaggacacctgccccggcgacaagggcaagcccaagaccaccgagcccaccacctgcgagcccgccctgagcgagggcatcagcctgcagggccaggtgacccagggcaacagcgtggacagccagctgggccaggccgaggaccaggacggcctgagcgagatgcaggagggccacttcagacccggcatcgacccccaggagaagagccccggcaagatgagccccgagtgcgacggcctgggcaccgccgacggcgtgtgcagcagaatcggccaggagcaggtgagccccggcgacagagtgagaagccacaacagctgcgagagcggcaaggaccccatgatccaggaggaggagaacaacttcaagtgcagcgagtgcggcaaggtgttcaacaagaagcacctgctggccggccacgagaagatccacagcggcgtgaagccctacgagtgcaccgagtgcggcaagaccttcatcaagagcacccacctgctgcagcaccacatgatccacaccggcgagagaccctacgagtgcatggagtgcggcaaggccttcaacagaaagagctacctgacccagcaccagagaatccacagcggcgagaagccctacaagtgcaacgagtgcggcaaggccttcacccacagaagcaacttcgtgctgcacaacagaagacacaccggcgagaagagcttcgtgtgcaccgagtgcggccaggtgttcagacacagacccggcttcctgagacactacgtggtgcacagcggcgagaacccctacgagtgcctggagtgcggcaaggtgttcaagcacagaagctacctgatgtggcaccagcagacccacaccggcgagaagccctacgagtgcagcgagtgcggcaaggtgttcctggagagcgccgccctgatccaccactacgtgatccacaccggcgagaagcccttcgagtgcctggagtgcggcaaggccttcaaccacagaagctacctgaagagacaccagagaatccacaccggcgagaagcccttcgtgtgcagcgagtgcggcaaggccttcacccactgcagcaccttcatcctgcacaagagagcccacaccggcgagaagcccttcgagtgcaaggagtgcggcaaggccttcagcaacagaaaggacctgatcagacacttcagcatccacaccggcgagaagccctacgagtgcgtggagtgcggcaaggccttcaccagaatgagcggcctgaccagacacaagagaatccacagcggcgagaagccctacgagtgcgtggagtgcggcaagagcttctgctggagcaccaacctgatcagacacgccatcatccacaccggcgagaagccctacaagtgcagcgagtgcggcaaggccttcagcagaagcagcagcctgacccagcaccagagaatgcacaccggcaagaaccccatcagcgtgaccgacgtgggcagacccttcaccagcggccagaccagcgtgaccctgagagagctgctgctgggcaaggacttcctgaacgtgaccaccgaggccaacatcctgcccgaggagaccagcagcagcgccagcgaccagccctaccagagagagaccccccaggtgagcagcctgtag

SEQ ID NO: 105886 - DNA, 1884 bp, synthetic construct; identical to SEQ ID NO: 105885
  misc_feature 1..1884: note = Description of Artificial Sequence: Synthetic coding sequence
  source 1..1884: mol_type = other DNA

SEQ ID NO: 105887 - DNA, 1650 bp, synthetic construct
  misc_feature 1..1650: note = Description of Artificial Sequence: Synthetic coding sequence
  source 1..1650: mol_type = other DNA
atgctggagaactacaagaacctggccaccgtgggctaccagctgttcaagcccagcctgatcagctggctggagcaggaggagagcagaaccgtgcagagaggcgacttccaggccagcgagtggaaggtgcagctgaagaccaaggagctggccctgcagcaggacgtgctgggcgagcccaccagcagcggcatccagatgatcggcagccacaacggcggcgaggtgagcgacgtgaagcagtgcggcgacgtgagcagcgagcacagctgcctgaagacccacgtgagaacccagaacagcgagaacaccttcgagtgctacctgtacggcgtggacttcctgaccctgcacaagaagaccagcaccggcgagcagagaagcgtgttcagccagtgcggcaaggccttcagcctgaaccccgacgtggtgtgccagagaacctgcaccggcgagaaggccttcgactgcagcgacagcggcaagagcttcatcaaccacagccacctgcagggccacctgagaacccacaacggcgagagcctgcacgagtggaaggagtgcggcagaggcttcatccacagcaccgacctggccgtgagaatccagacccacagaagcgagaagccctacaagtgcaaggagtgcggcaagggcttcagatacagcgcctacctgaacatccacatgggcacccacaccggcgacaacccctacgagtgcaaggagtgcggcaaggccttcaccagaagctgccagctgacccagcacagaaagacccacaccggcgagaagccctacaagtgcaaggactgcggcagagccttcaccgtgagcagctgcctgagccagcacatgaagatccacgtgggcgagaagccctacgagtgcaaggagtgcggcatcgccttcaccagaagcagccagctgaccgagcacctgaagacccacaccgccaaggaccccttcgagtgcaagatctgcggcaagagcttcagaaacagcagctgcctgagcgaccacttcagaatccacaccggcatcaagccctacaagtgcaaggactgcggcaaggccttcacccagaacagcgacctgaccaagcacgccagaacccacagcggcgagagaccctacgagtgcaaggagtgcggcaaggccttcgccagaagcagcagactgagcgagcacaccagaacccacaccggcgagaagcccttcgagtgcgtgaagtgcggcaaggccttcgccatcagcagcaacctgagcggccacctgagaatccacaccggcgagaagcccttcgagtgcctggagtgcggcaaggccttcacccacagcagcagcctgaacaaccacatgagaacccacagcgccaagaagcccttcacctgcatggagtgcggcaaggccttcaagttccccacctgcgtgaacctgcacatgagaatccacaccggcgagaagccctacaagtgcaagcagtgcggcaagagcttcagctacagcaacagcttccagctgcacgagagaacccacaccggcgagaagccctacgagtgcaaggagtgcggcaaggccttcagcagcagcagcagcttcagaaaccacgagagaagacacgccgacgagagactgagcgcctag

SEQ ID NO: 105888 - DNA, 1650 bp, synthetic construct; identical to SEQ ID NO: 105887
  misc_feature 1..1650: note = Description of Artificial Sequence: Synthetic coding sequence
  source 1..1650: mol_type = other DNA

SEQ ID NO: 105889 - DNA, 1650 bp, synthetic construct; identical to SEQ ID NO: 105887
  misc_feature 1..1650: note = Description of Artificial Sequence: Synthetic coding sequence
  source 1..1650: mol_type = other DNA

SEQ ID NO: 105890 - DNA, 2232 bp, synthetic construct
  misc_feature 1..2232: note = Description of Artificial Sequence: Synthetic coding sequence
  source 1..2232: mol_type = other DNA
atgggcctgctgaccttcagagacgtggccgtggagttcagcctggaggagtgggagcacctggagcccgcccagaagaacctgtaccaggacgtgatgctggagaactacagaaacctggtgagcctgggcctggtggtgagcaagcccgacctgatcaccttcctggagcagagaaaggagccctggaacgtgaagagcgaggagaccgtggccatccagcccgacgtgttcagccactacaacaaggacctgctgaccgagcactgcaccgaggccagcttccagaaggtgatcagcagaagacacggcagctgcgacctggagaacctgcacctgagaaagagatggaagagagaggagtgcgagggccacaacggctgctacgacgagaagaccttcaagtacgaccagttcgacgagagcagcgtggagagcctgttccaccagcagatcctgagcagctgcgccaagagctacaacttcgaccagtacagaaaggtgttcacccacagcagcctgctgaaccagcaggaggagatcgacatctggggcaagcaccacatctacgacaagaccagcgtgctgttcagacaggtgagcaccctgaacagctacagaaacgtgttcatcggcgagaagaactaccactgcaacaacagcgagaagaccctgaaccagagcagcagccccaagaaccaccaggagaactacttcctggagaagcagtacaagtgcaaggagttcgaggaggtgttcctgcagagcatgcacggccaggagaagcaggagcagagctacaagtgcaacaagtgcgtggaggtgtgcacccagagcctgaagcacatccagcaccagaccatccacatcagagagaacagctacagctacaacaagtacgacaaggacctgagccagagcagcaacctgagaaagcagatcatccacaacgaggagaagccctacaagtgcgagaagtgcggcgacagcctgaaccacagcctgcacctgacccagcaccagatcatccccaccgaggagaagccctgcaagtggaaggagtgcggcaaggtgttcaacctgaactgcagcctgtacctgaccaagcagcagcagatcgacaccggcgagaacctgtacaagtgcaaggcctgcagcaagagcttcaccagaagcagcaacctgatcgtgcaccagagaatccacaccggcgagaagccctacaagtgcaaggagtgcggcaaggccttcagatgcagcagctacctgaccaagcacaagagaatccacaccggcgagaagccctacaagtgcaaggagtgcggcaaggccttcaacagaagcagctgcctgacccagcaccagaccacccacaccggcgagaagctgtacaagtgcaaggtgtgcagcaagagctacgccagaagcagcaacctgatcatgcaccagagagtgcacaccggcgagaagccctacaagtgcaaggagtgcggcaaggtgttcagcagaagcagctgcctgacccagcacagaaagatccacaccggcgagaacctgtacaagtgcaaggtgtgcgccaagcccttcacctgcttcagcaacctgatcgtgcacgagagaatccacaccggcgagaagccctacaagtgcaaggagtgcggcaaggccttcccctacagcagccacctgatcagacaccacagaatccacaccggcgagaagccctacaagtgcaaggcctgcagcaagagcttcagcgacagcagcggcctgaccgtgcacagaagaacccacaccggcgagaagccctacacctgcaaggagtgcggcaaggccttcagctacagcagcgacgtgatccagcacagaagaatccacaccggccagagaccctacaagtgcgaggagtgcggcaaggccttcaactacagaagctacctgaccacccaccagagaagccacaccggcgagagaccctacaagtgcgaggagtgcggcaaggccttcaacagcagaagctacctgaccacccacagaagaagacacaccggcgagagaccctacaagtgcgacgagtgcggcaaggccttcagctacagaagctacctgaccacccacagaagaagccacagcggcgagagaccctacaagtgcgaggagtgcggcaaggccttcaacagcagaagctacctgatcgcccaccagagaagccacaccagagagaagctgtag

SEQ ID NO: 105891 - DNA, 840 bp, synthetic construct
  misc_feature 1..840: note = Description of Artificial Sequence: Synthetic coding sequence
  source 1..840: mol_type = other DNA
atgggcctgctgaccttcagagacgtggccgtggagttcagcctggaggagtgggagcacctggagcccgcccagaagaacctgtaccaggacgtgatgctggagaactacagaaacctggtgagcctgggcctggtggtgagcaagcccgacctgctgaccgagcactgcaccgaggccagcttccagaaggtgatcagcagaagacacggcagctgcgacctggagaacctgcacctgagaaagagatggaagagagaggagtgcgagggccacaacggctgctacgacgagaagaccttcaagtacgaccagttcgacgagagcagcgtggagagcctgttccaccagcagatcctgagcagctgcgccaagagctacaacttcgaccagtacagaaaggtgttcacccacagcagcctgctgaaccagcaggaggagatcgacatctggggcaagcaccacatctacgacaagaccagcgtgctgttcagacaggtgagcaccctgaacagctacagaaacgtgttcatcggcgagaagaactaccactgcaacaacagcgagaagaccctgaaccagagcagcagccccaagaaccaccaggagaactacttcctggagaagcagtacaagtgcaaggagttcgaggaggtgttcctgcagagcatgcacggccaggagaagcaggagcagagctacaagtgcaacaagtgcgtggaggtgtgcacccagagcctgaagcacatccagcaccagaccatccacatcagagagaacagctacagctacaacaagtacgacaaggacctgagccagagcagcaacctgagaaagtag

SEQ ID NO: 105892 - DNA, 2892 bp, synthetic construct
  misc_feature 1..2892: note = Description of Artificial Sequence: Synthetic coding sequence
  source 1..2892: mol_type = other DNA
atggccaccgccgccgagaccagcgccagcgagcccgaggccgagagcaaggccggccccaaggccgacggcgaggaggacgaggtgaaggccgccagaaccagaagaaaggtgctgagcagagccgtggccgccgccacctacaagaccatgggccccgcctgggaccagcaggaggagggcgtgagcgagagcgacggcgacgagtacgccatggccagcagcgccgagagcagccccggcgagtacgagtgggagtacgacgaggaggaggagaagaaccagctggagatcgagagactggaggagcagctgagcatcaacgtgtacgactacaactgccacgtggacctgatcagactgctgagactggagggcgagctgaccaaggtgagaatggccagacagaagatgagcgagatcttccccctgaccgaggagctgtggctggagtggctgcacgacgagatcagcatggcccaggacggcctggacagagagcacgtgtacgacctgttcgagaaggccgtgaaggactacatctgccccaacatctggctggagtacggccagtacagcgtgggcggcatcggccagaagggcggcctggagaaggtgagaagcgtgttcgagagagccctgagcagcgtgggcctgcacatgaccaagggcctggccctgtgggaggcctacagagagttcgagagcgccatcgtggaggccgccagactggagaaggtgcacagcctgttcagaagacagctggccatccccctgtacgacatggaggccaccttcgccgagtacgaggagtggagcgaggaccccatccccgagagcgtgatccagaactacaacaaggccctgcagcagctggagaagtacaagccctacgaggaggccctgctgcaggccgaggcccccagactggccgagtaccaggcctacatcgacttcgagatgaagatcggcgaccccgccagaatccagctgatcttcgagagagccctggtggagaactgcctggtgcccgacctgtggatcagatacagccagtacctggacagacagctgaaggtgaaggacctggtgctgagcgtgcacaacagagccatcagaaactgcccctggaccgtggccctgtggagcagatacctgctggccatggagagacacggcgtggaccaccaggtgatcagcgtgaccttcgagaaggccctgaacgccggcttcatccaggccaccgactacgtggagatctggcaggcctacctggactacctgagaagaagagtggacttcaagcaggacagcagcaaggagctggaggagctgagagccgccttcaccagagccctggagtacctgaagcaggaggtggaggagagattcaacgagagcggcgaccccagctgcgtgatcatgcagaactgggccagaatcgaggccagactgtgcaacaacatgcagaaggccagagagctgtgggacagcatcatgaccagaggcaacgccaagtacgccaacatgtggctggagtactacaacctggagagagcccacggcgacacccagcactgcagaaaggccctgcacagagccgtgcagtgcaccagcgactaccccgagcacgtgtgcgaggtgctgctgaccatggagagaaccgagggcagcctggaggactgggacatcgccgtgcagaagaccgagaccagactggccagagtgaacgagcagagaatgaaggccgccgagaaggaggccgccctggtgcagcaggaggaggagaaggccgagcagagaaagagagccagagccgagaagaaggccctgaagaagaagaagaagatcagaggccccgagaagagaggcgccgacgaggacgacgagaaggagtggggcgacgacgaggaggagcagcccagcaagagaagaagagtggagaacagcatccccgccgccggcgagacccagaacgtggaggtggccgccggccccgccggcaagtgcgccgccgtggacgtggagccccccagcaagcagaaggagaaggccgccagcctgaagagagacatgcccaaggtgctgcacgacagcagcaaggacagcatcaccgtgttcgtgagcaacctgccctacagcatgcaggagcccgacaccaagctgagacccctgttcgaggcctgcggcgaggtggtgcagatcagacccatcttcagcaacagaggcgacttcagaggctactgctacgtggagttcaaggaggagaagagcgccctgcaggccctggagatggacagaaagagcgtggagggcagacccatgttcgtgagcccctgcgtggacaagagcaagaaccccgacttcaaggtgttcagatacagcaccagcctggagaagcacaagctgttcatcagcggcctgcccttcagctgcaccaaggaggagctggaggagatctgcaaggcccacggcaccgtgaaggacctgagactggtgaccaacagagccggcaagcccaagggcctggcctacgtggagtacgagaacgagagccaggccagccaggccgtgatgaagatggacggcatgaccatcaaggagaacatcatcaaggtggccatcagcaaccccccccagagaaaggtgcccgagaagcccgagaccagaaaggcccccggcggccccatgctgctgccccagacctacggcgccagaggcaagggcagaacccagctgagcctgctgcccagagccctgcagagacccagcgccgccgccccccaggccgagaacggccccgccgccgcccccgccgtggccgcccccgccgccaccgaggcccccaagatgagcaacgccgacttcgccaagctgttcctgagaaagtag

SEQ ID NO: 105893 - DNA, 1077 bp, synthetic construct
  misc_feature 1..1077: note = Description of Artificial Sequence: Synthetic coding sequence
  source 1..1077: mol_type = other DNA
atggacgccaagagcctgaccgcctggagcagaaccctggtgaccttcaaggacgtgttcgtggacttcaccagagaggagtggaagctgctggacaccgcccagcagatcgtgtacagaaacgtgatgctggagaactacaagaacctggtgagcctgggctaccagctgaccaagcccgacgtgatcctgagactggagaagggcgaggagccctggctggtggagagagagatccaccaggagacccaccccgacagcgagaccgccttcgagatcaagagcagcgtgagcagcagaagcatcttcaaggacaagcagagctgcgacatcaagatggagggcatggccagaaacgacctgtggtacctgagcctggaggaggtgtggaagtgcagagaccagctggacaagtaccaggagaaccccgagagacacctgagcatccccagagtgctgagcctgcccgccagacacaccaagctgaccgtgggcatggccaccagagtgagaaccgccagcatctgggtgccccccctgcaggagagaaacagcagctgggacagaatcagaaagctgcagggccaggagagcatcctgggccagggcacccccggcctgcagcccctgcccggcacccccagacagaagcagaagagcagaagaatcgagaaggtgctggagtggctgttcatcagccaggagcagcccaagatcaccaagagctggggccccctgagcttcatggacgtgttcgtggacttcacctgggaggagtggcagctgctggaccccgcccagaagtgcctgtacagaagcgtgatgctggagaactacagcaacctggtgagcctgggctaccagcacaccaagcccgacatcatcttcaagctggagcagggcgaggagctgtgcatggtgcaggcccaggtgcccaaccagacctgccccatcctgaaggccggcaagagcaaggccaaggtgctggccggcctggtgagcggcgagggcctgctgtgcgccagcaagatgaccccctgctgctgcatcctgtggagacacagcctggagaactag

SEQ ID NO: 105894 - DNA, 504 bp, synthetic construct
  misc_feature 1..504: note = Description of Artificial Sequence: Synthetic coding sequence
  source 1..504: mol_type = other DNA
atggccaccagagtgagaaccgccagcatctgggtgccccccctgcaggagagaaacagcagctgggacagaatcagaaagctgcagggccaggagagcatcctgggccagggcacccccggcctgcagcccctgcccggcacccccagacagaagcagaagagcagaagaatcgagaaggtgctggagtggctgttcatcagccaggagcagcccaagatcaccaagagctggggcaccaacacccccaacctgatcagcagcagcagctggaacaaggagaagagctgcgtgtggtgcagacccaagttccagatcagacccgtgcagacccagagcggcaagctgatgatcctgtggatcggcatcagaaagatcaagaccagctgggaggtgagacagaaggccctgaacgccctgcacctggagaactacgtgttcctggtgcagagcatcttccaggacaagaacctgatcaacgtggccagaatggagagagtgtag

SEQ ID NO: 105895 - DNA, 2361 bp, synthetic construct
  misc_feature 1..2361: note = Description of Artificial Sequence: Synthetic coding sequence
  source 1..2361: mol_type = other DNA
atggactggcaccaggagaacaaggacaagctgggcagcaccgccaagagcttcgagtgcaccaccttcggcaagctgtgcctgctgagcaccaagtacctgagcagacagaagccccacaagtgcggcacccacggcaagagcctgaagtacatcgacttcaccagcgactacgccagaaacaaccccaacggcttccaggtgcacggcaagagcttcttccacagcaagcacgagcagaccgtgatcggcatcaagtactgcgagagcatcgagagcggcaagaccgtgaacaagaagagccagctgatgtgccagcagatgtacatgggcgagaagcccttcggctgcagctgctgcgagaaggccttcagcagcaagagctacctgctggtgcaccagcagacccacgccgaggagaagccctacggctgcaacgagtgcggcaaggacttcagcagcaagagctacctgatcgtgcaccagagaatccacaccggcgagaagctgcacgagtgcagcgagtgcagaaagaccttcagcttccacagccagctggtgatccaccagagaatccacaccggcgagaacccctacgagtgctgcgagtgcggcaaggtgttcagcagaaaggaccagctggtgagccaccagaagacccacagcggccagaagccctacgtgtgcaacgagtgcggcaaggccttcggcctgaagagccagctgatcatccacgagagaatccacaccggcgagaagccctacgagtgcaacgagtgccagaaggccttcaacaccaagagcaacctgatggtgcaccagagaacccacaccggcgagaagccctacgtgtgcagcgactgcggcaaggccttcaccttcaagagccagctgatcgtgcaccagggcatccacaccggcgtgaagccctacggctgcatccagtgcggcaagggcttcagcctgaagagccagctgatcgtgcaccagagaagccacaccggcatgaagccctacgtgtgcaacgagtgcggcaaggccttcagaagcaagagctacctgatcatccacaccagaacccacaccggcgagaagctgcacgagtgcaacaactgcggcaaggccttcagcttcaagagccagctgatcatccaccagagaatccacaccggcgagaacccctacgagtgccacgagtgcggcaaggccttcagcagaaagtaccagctgatcagccaccagagaacccacgccggcgagaagccctacgagtgcaccgactgcggcaaggccttcggcctgaagagccagctgatcatccaccagagaacccacaccggcgagaagcccttcgagtgcagcgagtgccagaaggccttcaacaccaagagcaacctgatcgtgcaccagagaacccacaccggcgagaagccctacagctgcaacgagtgcggcaaggccttcaccttcaagagccagctgatcgtgcacaagggcgtgcacaccggcgtgaagccctacggctgcagccagtgcgccaagaccttcagcctgaagagccagctgatcgtgcaccagagaagccacaccggcgtgaagccctacggctgcagcgagtgcggcaaggccttcagaagcaagagctacctgatcatccacatgagaacccacaccggcgagaagccccacgagtgcagagagtgcggcaagagcttcagcttcaacagccagctgatcgtgcaccagagaatccacaccggcgagaacccctacgagtgcagcgagtgcggcaaggccttcaacagaaaggaccagctgatcagccaccagagaacccacgccggcgagaagccctacggctgcagcgagtgcggcaaggccttcagcagcaagagctacctgatcatccacatgagaacccacagcggcgagaagccctacgagtgcaacgagtgcggcaaggccttcatctggaagagcctgctgatcgtgcacgagagaacccacgccggcgtgaacccctacaagtgcagccagtgcgagaagagcttcagcggcaagctgagactgctggtgcaccagagaatgcacaccagagagaagccctacgagtgcagcgagtgcggcaaggccttcatcagaaacagccagctgatcgtgcaccagagaacccacagcggcgagaagccctacggctgcaacgagtgcggcaagaccttcagccagaagagcatcctgagcgcccaccagagaacccacaccggcgagaagccctgcaagtgcaccgagtgcggcaaggccttctgctggaagagccagctgatcatgcaccagagaacccacgtggacgacaagcactag

SEQ ID NO: 105896 - DNA, 2844 bp, synthetic construct; identical to SEQ ID NO: 97572
  misc_feature 1..2844: note = Description of Artificial Sequence: Synthetic coding sequence
  source 1..2844: mol_type = other DNA

SEQ ID NO: 105897 - DNA, 2193 bp, synthetic construct
  misc_feature 1..2193: note = Description of Artificial Sequence: Synthetic coding sequence
  source 1..2193: mol_type = other DNA
atggactggcaccaggagaacaaggacaagctgggcagcaccgccaagagcttcgagtgcaccaccttcggcaagctgtgcctgctgagcaccaagtacctgagcagacagaagccccacaagtgcggcacccacggcaagagcctgaagtacatcgacttcaccagcgactacgccagaaacaaccccaacggcttccaggtgcacggcaagagcttcttccacagcaagcacgagcagaccgtgatcggcatcaagtactgcgagagcatcgagagcggcaagaccgtgaacaagaagagccagctgatgtgccagcagatgtacatgggcgagaagcccttcggctgcagctgctgcgagaaggccttcagcagcaagagctacctgctggtgcaccagcagacccacgccgaggagaagccctacggctgcaacgagtgcggcaaggacttcagcagcaagagctacctgatcgtgcaccagagaatccacaccggcgagaagctgcacgagtgcagcgagtgcagaaagaccttcagcttccacagccagctggtgatccaccagagaatccacaccggcgagaacccctacgagtgctgcgagtgcggcaaggtgttcagcagaaaggaccagctggtgagccaccagaagacccacagcggccagaagccctacgtgtgcaacgagtgcggcaaggccttcggcctgaagagccagctgatcatccacgagagaatccacaccggcgagaagccctacgagtgcaacgagtgccagaaggccttcaacaccaagagcaacctgatggtgcaccagagaacccacaccggcgagaagccctacgtgtgcagcgactgcggcaaggccttcaccttcaagagccagctgatcgtgcaccagggcatccacaccggcgtgaagccctacggctgcatccagtgcggcaagggcttcagcctgaagagccagctgatcgtgcaccagagaagccacaccggcatgaagccctacgtgtgcaacgagtgcggcaaggccttcagaagcaagagctacctgatcatccacaccagaacccacaccggcgagaagctgcacgagtgcaacaactgcggcaaggccttcagcttcaagagccagctgatcatccaccagagaatccacaccggcgagaacccctacgagtgccacgagtgcggcaaggccttcagcagaaagtaccagctgatcagccaccagagaacccacgccggcgagaagccctacgagtgcaccgactgcggcaaggccttcggcctgaagagccagctgatcatccaccagagaacccacaccggcgagaagcccttcgagtgcagcgagtgccagaaggccttcaacaccaagagcaacctgatcgtgcaccagagaacccacaccggcgagaagccctacagctgcaacgagtgcggcaaggccttcaccttcaagagccagctgatcgtgcacaagggcgtgcacaccggcgtgaagccctacggctgcagccagtgcgccaagaccttcagcctgaagagccagctgatcgtgcaccagagaagccacaccggcgtgaagccctacggctgcagcgagtgcggcaaggccttcagaagcaagagctacctgatcatccacatgagaacccacaccggcgagaagccccacgagtgcagagagtgcggcaagagcttcagcttcaacagccagctgatcgtgcaccagagaatccacaccggcgagaacccctacgagtgcagcgagtgcggcaaggccttcaacagaaaggaccagctgatcagccaccagagaacccacgccggcgagaagccctacggctgcagcgagtgcggcaaggccttcagcagcaagagctacctgatcatccacatgagaacccacagcggcgagaagccctacgagtgcaacgagtgcggcaaggccttcatctggaagagcctgctgatcgtgcacgagagaacccacgccggcgtgaacccctacaagtgcagccagtgcgagaagagcttcagcggcaagctgagactgctggtgcaccagagaatgcacaccagagagaagccctacgagtgcaccgagtgcggcaaggccttctgctggaagagccagctgatcatgcaccagagaacccacgtggacgacaagcactag

SEQ ID NO: 105898 - DNA, 303 bp, synthetic construct
  misc_feature 1..303: note = Description of Artificial Sequence: Synthetic coding sequence
  source 1..303: mol_type = other DNA
atggccaccagagtgagaaccgccagcatctggggcaccaacacccccaacctgatcagcagcagcagctggaacaaggagaagagctgcgtgtggtgcagacccaagttccagatcagacccgtgcagacccagagcggcaagctgatgatcctgtggatcggcatcagaaagatcaagaccagctgggaggtgagacagaaggccctgaacgccctgcacctggagaactacgtgttcctggtgcagagcatcttccaggacaagaacctgatcaacgtggccagaatggagagagtgtag

SEQ ID NO: 105899 - DNA, 381 bp, synthetic construct
  misc_feature 1..381: note = Description of Artificial Sequence: Synthetic coding sequence
  source 1..381: mol_type = other DNA
atggccaccagagtgagaaccgccagcatctggggccccctgagcttcatggacgtgttcgtggacttcacctgggaggagtggcagctgctggaccccgcccagaagtgcctgtacagaagcgtgatgctggagaactacagcaacctggtgagcctgggctaccagcacaccaagcccgacatcatcttcaagctggagcagggcgaggagctgtgcatggtgcaggcccaggtgcccaaccagacctgccccatcctgaaggccggcaagagcaaggccaaggtgctggccggcctggtgagcggcgagggcctgctgtgcgccagcaagatgaccccctgctgctgcatcctgtggagacacagcctggagaactag

SEQ ID NO: 105900 - DNA, 207 bp, synthetic construct
  misc_feature 1..207: note = Description of Artificial Sequence: Synthetic coding sequence
  source 1..207: mol_type = other DNA
atggccaccagagtgagaaccgccagcatctggacccagagcggcaagctgatgatcctgtggatcggcatcagaaagatcaagaccagctgggaggtgagacagaaggccctgaacgccctgcacctggagaactacgtgttcctggtgcagagcatcttccaggacaagaacctgatcaacgtggccagaatggagagagtgtag

SEQ ID NO: 105901 - DNA, 504 bp, synthetic construct; identical to SEQ ID NO: 105894
  misc_feature 1..504: note = Description of Artificial Sequence: Synthetic coding sequence
  source 1..504: mol_type = other DNA

SEQ ID NO: 105902 - DNA, 381 bp, synthetic construct; identical to SEQ ID NO: 105899
  misc_feature 1..381: note = Description of Artificial Sequence: Synthetic coding sequence
  source 1..381: mol_type = other DNA

SEQ ID NO: 105903 - DNA, 1959 bp, synthetic construct
  misc_feature 1..1959: note = Description of Artificial Sequence: Synthetic coding sequence
  source 1..1959: mol_type = other DNA
atggccagcagactgcccaccgcctggagctgcgagcccgtgaccttcgaggacgtgaccctgggcttcacccccgaggagtggggcctgctggacctgaagcagaagagcctgtacagagaggtgatgctggagaactacagaaacctggtgagcgtggagcaccagctgagcaagcccgacgtggtgagccagctggaggaggccgaggacttctggcccgtggagagaggcatcccccaggacaccatccccgagtaccccgagctgcagctggaccccaagctggaccccctgcccgccgagagccccctgatgaacatcgaggtggtggaggtgctgaccctgaaccaggaggtggccggccccagaaacgcccagatccaggccctgtacgccgaggacggcagcctgagcgccgacgcccccagcgagcaggtgcagcagcagggcaagcaccccggcgaccccgaggccgccagacagagattcagacagttcagatacaaggacatgaccggccccagagagctggaccagctgagagagctgtgccaccagtggctgcagcccaaggccagaagcaaggagcagatcctggagctgctggtgctggagcagttcctgggcgccctgcccgtgaagctgagaacctgggtggagagccagcaccccgagaactgccaggaggtggtggccctggtggagggcgtgacctggatgagcgaggaggaggtgctgcccgccggccagcccgccgagggcaccacctgctgcctggaggtgaccgcccagcaggaggagaagcaggaggacgccgccatctgccccgtgaccgtgctgcccgaggagcccgtgaccttccaggacgtggccgtggacttcagcagagaggagtggggcctgctgggccccacccagagaaccgagtacagagacgtgatgctggagaccttcggccacctggtgagcgtgggctgggagaccaccctggagaacaaggagctggcccccaacagcgacatccccgaggaggagcccgcccccagcctgaaggtgcaggagagcagcagagactgcgccctgagcagcaccctggaggacaccctgcagggcggcgtgcaggaggtgcaggacaccgtgctgaagcagatggagagcgcccaggagaaggacctgccccagaagaagcacttcgacaacagagagagccaggccaacagcggcgccctggacaccaaccaggtgagcctgcagaagatcgacaaccccgagagccaggccaacagcggcgccctggacaccaaccaggtgctgctgcacaagatcccccccagaaagagactgagaaagagagacagccaggtgaagagcatgaagcacaacagcagagtgaagatccaccagaagagctgcgagagacagaaggccaaggagggcaacggctgcagaaagaccttcagcagaagcaccaagcagatcaccttcatcagaatccacaagggcagccaggtgtgcagatgcagcgagtgcggcaagatcttcagaaaccccagatacttcagcgtgcacaagaagatccacaccggcgagagaccctacgtgtgccaggactgcggcaagggcttcgtgcagagcagcagcctgacccagcaccagagagtgcacagcggcgagagacccttcgagtgccaggagtgcggcagaaccttcaacgacagaagcgccatcagccagcacctgagaacccacaccggcgccaagccctacaagtgccaggactgcggcaaggccttcagacagagcagccacctgatcagacaccagagaacccacaccggcgagagaccctacgcctgcaacaagtgcggcaaggccttcacccagagcagccacctgatcggccaccagagaacccacaacagaaccaagagaaagaagaagcagcccaccagctag

SEQ ID NO: 105904 - DNA, 1863 bp, synthetic construct
  misc_feature 1..1863: note = Description of Artificial Sequence: Synthetic coding sequence
  source 1..1863: mol_type = other DNA
atggccagcagactgcccaccgcctggagctgcgagcccgtgaccttcgaggacgtgaccctgggcttcacccccgaggagtggggcctgctggacctgaagcagaagagcctgtacagagaggtgatgctggagaactacagaaacctggtgagcgtggagtaccccgagctgcagctggaccccaagctggaccccctgcccgccgagagccccctgatgaacatcgaggtggtggaggtgctgaccctgaaccaggaggtggccggccccagaaacgcccagatccaggccctgtacgccgaggacggcagcctgagcgccgacgcccccagcgagcaggtgcagcagcagggcaagcaccccggcgaccccgaggccgccagacagagattcagacagttcagatacaaggacatgaccggccccagagagctggaccagctgagagagctgtgccaccagtggctgcagcccaaggccagaagcaaggagcagatcctggagctgctggtgctggagcagttcctgggcgccctgcccgtgaagctgagaacctgggtggagagccagcaccccgagaactgccaggaggtggtggccctggtggagggcgtgacctggatgagcgaggaggaggtgctgcccgccggccagcccgccgagggcaccacctgctgcctggaggtgaccgcccagcaggaggagaagcaggaggacgccgccatctgccccgtgaccgtgctgcccgaggagcccgtgaccttccaggacgtggccgtggacttcagcagagaggagtggggcctgctgggccccacccagagaaccgagtacagagacgtgatgctggagaccttcggccacctggtgagcgtgggctgggagaccaccctggagaacaaggagctggcccccaacagcgacatccccgaggaggagcccgcccccagcctgaaggtgcaggagagcagcagagactgcgccctgagcagcaccctggaggacaccctgcagggcggcgtgcaggaggtgcaggacaccgtgctgaagcagatggagagcgcccaggagaaggacctgccccagaagaagcacttcgacaacagagagagccaggccaacagcggcgccctggacaccaaccaggtgagcctgcagaagatcgacaaccccgagagccaggccaacagcggcgccctggacaccaaccaggtgctgctgcacaagatcccccccagaaagagactgagaaagagagacagccaggtgaagagcatgaagcacaacagcagagtgaagatccaccagaagagctgcgagagacagaaggccaaggagggcaacggctgcagaaagaccttcagcagaagcaccaagcagatcaccttcatcagaatccacaagggcagccaggtgtgcagatgcagcgagtgcggcaagatcttcagaaaccccagatacttcagcgtgcacaagaagatccacaccggcgagagaccctacgtgtgccaggactgcggcaagggcttcgtgcagagcagcagcctgacccagcaccagagagtgcacagcggcgagagacccttcgagtgccaggagtgcggcagaaccttcaacgacagaagcgccatcagccagcacctgagaacccacaccggcgccaagccctacaagtgccaggactgcggcaaggccttcagacagagcagccacctgatcagacaccagagaacccacaccggcgagagaccctacgcctgcaacaagtgcggcaaggccttcacccagagcagccacctgatcggccaccagagaacccacaacagaaccaagagaaagaagaagcagcccaccagctag

SEQ ID NO: 105905 - DNA, 1644 bp, synthetic construct
  misc_feature 1..1644: note = Description of Artificial Sequence: Synthetic coding sequence
  source 1..1644: mol_type = other DNA
atgaacatcgaggtggtggaggtgctgaccctgaaccaggaggtggccggccccagaaacgcccagatccaggccctgtacgccgaggacggcagcctgagcgccgacgcccccagcgagcaggtgcagcagcagggcaagcaccccggcgaccccgaggccgccagacagagattcagacagttcagatacaaggacatgaccggccccagagagctggaccagctgagagagctgtgccaccagtggctgcagcccaaggccagaagcaaggagcagatcctggagctgctggtgctggagcagttcctgggcgccctgcccgtgaagctgagaacctgggtggagagccagcaccccgagaactgccaggaggtggtggccctggtggagggcgtgacctggatgagcgaggaggaggtgctgcccgccggccagcccgccgagggcaccacctgctgcctggaggtgaccgcccagcaggaggagaagcaggaggacgccgccatctgccccgtgaccgtgctgcccgaggagcccgtgaccttccaggacgtggccgtggacttcagcagagaggagtggggcctgctgggccccacccagagaaccgagtacagagacgtgatgctggagaccttcggccacctggtgagcgtgggctgggagaccaccctggagaacaaggagctggcccccaacagcgacatccccgaggaggagcccgcccccagcctgaaggtgcaggagagcagcagagactgcgccctgagcagcaccctggaggacaccctgcagggcggcgtgcaggaggtgcaggacaccgtgctgaagcagatggagagcgcccaggagaaggacctgccccagaagaagcacttcgacaacagagagagccaggccaacagcggcgccctggacaccaaccaggtgagcctgcagaagatcgacaaccccgagagccaggccaacagcggcgccctggacaccaaccaggtgctgctgcacaagatcccccccagaaagagactgagaaagagagacagccaggtgaagagcatgaagcacaacagcagagtgaagatccaccagaagagctgcgagagacagaaggccaaggagggcaacggctgcagaaagaccttcagcagaagcaccaagcagatcaccttcatcagaatccacaagggcagccaggtgtgcagatgcagcgagtgcggcaagatcttcagaaaccccagatacttcagcgtgcacaagaagatccacaccggcgagagaccctacgtgtgccaggactgcggcaagggcttcgtgcagagcagcagcctgacccagcaccagagagtgcacagcggcgagagacccttcgagtgccaggagtgcggcagaaccttcaacgacagaagcgccatcagccagcacctgagaacccacaccggcgccaagccctacaagtgccaggactgcggcaaggccttcagacagagcagccacctgatcagacaccagagaacccacaccggcgagagaccctacgcctgcaacaagtgcggcaaggccttcacccagagcagccacctgatcggccaccagagaacccacaacagaaccaagagaaagaagaagcagcccaccagctag

SEQ ID NO: 105906 - DNA, 1353 bp, synthetic construct
  misc_feature 1..1353: note = Description of Artificial Sequence: Synthetic coding sequence
  source 1..1353: mol_type = other DNA
atggccgccagcaagacccagggcgccgtggccagaatgcaggaggacagagacggcagctgcagcaccgtgggcggcgtgggctacggcgacagcaaggactgcatcctggagcccctgagcctgcccgagagccccggcggcaccaccaccctggagggcagccccagcgtgccctgcatcttctgcgaggagcacttccccgtggccgagcaggacaagctgctgaagcacatgatcatcgagcacaagatcgtgatcgccgacgtgaagctggtggccgacttccagagatacatcctgtactggagaaagagattcaccgagcagcccatcaccgacttctgcagcgtgatcagaatcaacagcaccgcccccttcgaggagcaggagaactacttcctgctgtgcgacgtgctgcccgaggacagaatcctgagagaggagctgcagaagcagagactgagagagatcctggagcagcagcagcaggagagaaacgacaccaacttccacggcgtgtgcatgttctgcaacgaggagttcctgggcaacagaagcgtgatcctgaaccacatggccagagagcacgccttcaacatcggcctgcccgacaacatcgtgaactgcaacgagttcctgtgcaccctgcagaagaagctggacaacctgcagtgcctgtactgcgagaagaccttcagagacaagaacaccctgaaggaccacatgagaaagaagcagcacagaaagatcaaccccaagaacagagagtacgacagattctacgtgatcaactacctggagctgggcaagagctgggaggaggtgcagctggaggacgacagagagctgctggaccaccaggaggacgactggagcgactgggaggagcaccccgccagcgccgtgtgcctgttctgcgagaagcaggccgagaccatcgagaagctgtacgtgcacatggaggacgcccacgagttcgacctgctgaagatcaagagcgagctgggcctgaacttctaccagcaggtgaagctggtgaacttcatcagaagacaggtgcaccagtgcagatgctacggctgccacgtgaagttcaagagcaaggccgacctgagaacccacatggaggagaccaagcacaccagcctgctgcccgacagaaagacctgggaccagctggagtactacttccccacctacgagaacgacaccctgctgtgcaccctgagcgacagcgagagcgacctgaccgcccaggagcagaacgagaacgtgcccatcatcagcgaggacaccagcaagctgtacgccctgaagcagagcagcatcctgaaccagctgctgctgtag

SEQ ID NO: 105907 - DNA, 873 bp, synthetic construct
  misc_feature 1..873: note = Description of Artificial Sequence: Synthetic coding sequence
  source 1..873: mol_type = other DNA
atggccgccagcaagacccagggcgccgtggccagaatgcaggaggacagagacggcagctgcagcaccgtgggcggcgtgggctacggcgacagcaaggactgcatcctggagcccctgagcctgcccgagagccccggcggcaccaccaccctggagggcagccccagcgtgccctgcatcttctgcgaggagcacttccccgtggccgagcaggacaagctgctgaagcacatgatcatcgagcacaagatcgtgatcgccgacgtgaagctggtggccgacttccagagatacatcctgtactggagaaagagattcaccgagcagcccatcaccgacttctgcagcgtgatcagaatcaacagcaccgcccccttcgaggagcaggagaactacttcctgctgtgcgacgtgctgcccgaggacagaatcctgagagaggagctgcagaagcagagactgagagagatcctggagcagcagcagcaggagagaaacgacaccaacttccacggcgtgtgcatgttctgcaacgaggagttcctgggcaacagaagcgtgatcctgaaccacatggccagagagcacgccttcaacatcggcctgcccgacaacatcgtgaactgcaacgagttcctgtgcaccctgcagaagaagctggacaacctgcagtgcctgtactgcgagaagaccttcagagacaagaacaccctgaaggaccacatgagaaagaagcagcacagaaagatcaaccccaagaacagagagtacgacagattctacgtgatcaactacctggtgagactgagcttccacaacctgaagttcgactgcagcaccgccaacaagatcttcctgagaaccaactag

SEQ ID NO: 105908 - DNA, 1428 bp, synthetic construct
  misc_feature 1..1428: note = Description of Artificial Sequence: Synthetic coding sequence
  source 1..1428: mol_type = other DNA
atgagcagaagaaaggccggcagcgcccccagaagagtggagcccgcccccgccgccaaccccgacgacgagatggagatgcaggacctggtgatcgagctgaagcccgagcccgacgcccagccccagcaggcccccagactgggccccttcagccccaaggaggtgagcagcgccggcagattcggcggcgagccccaccacagccccggccccatgcccgccggcgccgccctgctggccctgggccccagaaacccctggaccctgtggacccccctgacccccaactaccccgacagacagccctggaccgacaagcaccccgacctgctgacctgcggcagatgcctgcagaccttccccctggaggccatcaccgccttcatggaccacaagaagctgggctgccagctgttcagaggccccagcagaggccagggcagcgagagagaggagctgaaggccctgagctgcctgagatgcggcaagcagttcaccgtggcctggaagctgctgagacacgcccagtgggaccacggcctgagcatctaccagaccgagagcgaggcccccgaggcccccctgctgggcctggccgaggtggccgccgccgtgagcgccgtggtgggccccgccgccgaggccaagagccccagagccagcggcagcggcctgaccagaagaagccccacctgccccgtgtgcaagaagaccctgagcagcttcagcaacctgaaggtgcacatgagaagccacaccggcgagagaccctacgcctgcgaccagtgcccctacgcctgcgcccagagcagcaagctgaacagacacaagaagacccacagacaggtgcccccccagagccccctgatggccgacaccagccaggagcaggccagcgccgccccccccgagcccgccgtgcacgccgccgcccccaccagcaccctgccctgcagcggcggcgagggcgccggcgccgccgccaccgccggcgtgcaggagcccggcgcccccggcagcggcgcccaggccggccccggcggcgacacctggggcgccatcaccaccgagcagagaaccgaccccgccaacagccagaaggccagccccaagaagatgcccaagagcggcggcaagagcagaggccccggcggcagctgcgagttctgcggcaagcacttcaccaacagcagcaacctgaccgtgcacagaagaagccacaccggcgagagaccctacacctgcgagttctgcaactacgcctgcgcccagagcagcaagctgaacagacacagaagaatgcacggcatgacccccggcagcaccagattcgagtgcccccactgccacgtgcccttcggcctgagagccaccctggacaagcacctgagacagaagcaccccgaggccgccggcgaggcctag

SEQ ID NO: 105909 - DNA, 1356 bp, synthetic construct
  misc_feature 1..1356: note = Description of Artificial Sequence: Synthetic coding sequence
  source 1..1356: mol_type = other DNA
atggagatgcaggacctggtgatcgagctgaagcccgagcccgacgcccagccccagcaggcccccagactgggccccttcagccccaaggaggtgagcagcgccggcagattcggcggcgagccccaccacagccccggccccatgcccgccggcgccgccctgctggccctgggccccagaaacccctggaccctgtggacccccctgacccccaactaccccgacagacagccctggaccgacaagcaccccgacctgctgacctgcggcagatgcctgcagaccttccccctggaggccatcaccgccttcatggaccacaagaagctgggctgccagctgttcagaggccccagcagaggccagggcagcgagagagaggagctgaaggccctgagctgcctgagatgcggcaagcagttcaccgtggcctggaagctgctgagacacgcccagtgggaccacggcctgagcatctaccagaccgagagcgaggcccccgaggcccccctgctgggcctggccgaggtggccgccgccgtgagcgccgtggtgggccccgccgccgaggccaagagccccagagccagcggcagcggcctgaccagaagaagccccacctgccccgtgtgcaagaagaccctgagcagcttcagcaacctgaaggtgcacatgagaagccacaccggcgagagaccctacgcctgcgaccagtgcccctacgcctgcgcccagagcagcaagctgaacagacacaagaagacccacagacaggtgcccccccagagccccctgatggccgacaccagccaggagcaggccagcgccgccccccccgagcccgccgtgcacgccgccgcccccaccagcaccctgccctgcagcggcggcgagggcgccggcgccgccgccaccgccggcgtgcaggagcccggcgcccccggcagcggcgcccaggccggccccggcggcgacacctggggcgccatcaccaccgagcagagaaccgaccccgccaacagccagaaggccagccccaagaagatgcccaagagcggcggcaagagcagaggccccggcggcagctgcgagttctgcggcaagcacttcaccaacagcagcaacctgaccgtgcacagaagaagccacaccggcgagagaccctacacctgcgagttctgcaactacgcctgcgcccagagcagcaagctgaacagacacagaagaatgcacggcatgacccccggcagcaccagattcgagtgcccccactgccacgtgcccttcggcctgagagccaccctggacaagcacctgagacagaagcaccccgaggccgccggcgaggcctag

SEQ ID NO: 105910 - DNA, 1341 bp, synthetic construct
  misc_feature 1..1341: note = Description of Artificial Sequence: Synthetic coding sequence
  source 1..1341: mol_type = other DNA
atggagacccaggccgacctggtgagccaggagccccaggccctgctggacagcgccctgcccagcaaggtgcccgccttcagcgacaaggacagcctgggcgacgagatgctggccgccgccctgctgaaggccaagagccaggagctggtgaccttcgaggacgtggccgtgtacttcatcagaaaggagtggaagagactggagcccgcccagagagacctgtacagagacgtgatgctggagaactacggcaacgtgttcagcctggacagagagaccagaaccgagaacgaccaggagatcagcgaggacaccagaagccacggcgtgctgctgggcagattccagaaggacatcagccagggcctgaagttcaaggaggcctacgagagagaggtgagcctgaagagacccctgggcaacagccccggcgagagactgaacagaaagatgcccgacttcggccaggtgaccgtggaggagaagctgacccccagaggcgagagaagcgagaagtacaacgacttcggcaacagcttcaccgtgaacagcaacctgatcagccaccagagactgcccgtgggcgacagaccccacaagtgcgacgagtgcagcaagagcttcaacagaaccagcgacctgatccagcaccagagaatccacaccggcgagaagccctacgagtgcaacgagtgcggcaaggccttcagccagagcagccacctgatccagcaccagagaatccacaccggcgagaagccctacgagtgcagcgactgcggcaagaccttcagctgcagcagcgccctgatcctgcacagaagaatccacaccggcgagaagccctacgagtgcaacgagtgcggcaagaccttcagctggagcagcaccctgacccaccaccagagaatccacaccggcgagaagccctacgcctgcaacgagtgcggcaaggccttcagcagaagcagcaccctgatccaccaccagagaatccacaccggcgagaagccctacgagtgcaacgagtgcggcaaggccttcagccagagcagccacctgtaccagcaccagagaatccacaccggcgagaagccctacgagtgcatggagtgcggcggcaagttcacctacagcagcggcctgatccagcaccagagaatccacaccggcgagaacccctacgagtgcagcgagtgcggcaaggccttcagatacagcagcgccctggtgagacaccagagaatccacaccggcgagaagcccctgaacggcatcggcatgagcaagagcagcctgagagtgaccaccgagctgaacatcagagagagcacctag

SEQ ID NO: 105911 - DNA, 1341 bp, synthetic construct; identical to SEQ ID NO: 105910
  misc_feature 1..1341: note = Description of Artificial Sequence: Synthetic coding sequence
  source 1..1341: mol_type = other DNA

SEQ ID NO: 105912 - DNA, 396 bp, synthetic construct
  misc_feature 1..396: note = Description of Artificial Sequence: Synthetic coding sequence
  source 1..396: mol_type = other DNA
atggagacccaggccgacctggtgagccaggagccccaggccctgctggacagcgccctgcccagcaaggtgcccgccttcagcgacaaggacagcctgggcgacgagatgctggccgccgccctgctgaaggccaagagccaggagctggtgaccttcgaggacgtggccgtgtacttcatcagaaaggagtggaagagactggagcccgcccagagagacctgtacagagacgtgatgctggagaactacggcaacgtgttcagcctggactggatccacgtgtgcctgaccacccagaaggtgatgctggcctggctgaccggcaccctgagcgtggccaagggcctgtgcagcagcgagctggccagcgtggagccccccgacaccttctag

SEQ ID NO: 105913 - DNA, 315 bp, synthetic construct
  misc_feature 1..315: note = Description of Artificial Sequence: Synthetic coding sequence
  source 1..315: mol_type = other DNA
atggagacccaggccgacctggtgagccaggagccccaggccctgctggacagcgccctgcccagcaaggtgcccgccttcagcgacaaggacagcctgggcgacgagatgctggccgccgccctgctgaaggccaagagccaggagctggtgaccttcgaggacgtggccgtgtacttcatcagaaaggagtggaagagactggagcccgcccagagagacctgtacagagacgtgatgctggagaactacggcaacgtgttcagcctggacagagagaccagaaccgagaacgaccaggagatcagcgagtag

SEQ ID NO: 105914 - DNA, 1341 bp, synthetic construct; identical to SEQ ID NO: 105910
  misc_feature 1..1341: note = Description of Artificial Sequence: Synthetic coding sequence
  source 1..1341: mol_type = other DNA

SEQ ID NO: 105915 - DNA, 558 bp, synthetic construct
  misc_feature 1..558: note = Description of Artificial Sequence: Synthetic coding sequence
  source 1..558: mol_type = other DNA
atggagacccaggccgacctggtgagccaggagccccaggccctgctggacagcgccctgcccagcaaggtgcccgccttcagcgacaaggacagcctgggcgacgagatgctggccgccgccctgctgaaggccaagagccaggagctggtgaccttcgaggacgtggccgtgtacttcatcagaaaggagtggaagagactggagcccgcccagagagacctgtacagagacgtgatgctggagaactacggcaacgtgttcagcctggacagagagaccagaaccgagaacgaccaggagatcagcgaggacaccagaagccacggcgtgctgctgggcagattccagaaggacatcagccagggcctgaagttcaaggaggcctacgagagagaggtgagcctgaagagacccctgggcaacagccccggcgagagactgaacagaaagatgcccgacttcggccaggtgaccgtggaggagaagctgacccccagaggcgagagaagcgagaagtacaacgacttcggcaacagcttcaccgtgaacagctag

SEQ ID NO: 105916 - DNA, 558 bp, synthetic construct; identical to SEQ ID NO: 105915
  misc_feature 1..558: note = Description of Artificial Sequence: Synthetic coding sequence
  source 1..558: mol_type = other DNA

SEQ ID NO: 105917 - DNA, 1509 bp, synthetic construct
  misc_feature 1..1509: note = Description of Artificial Sequence: Synthetic coding sequence
  source 1..1509: mol_type = other DNA
atgggcaccgagaacaaggaggtgatccccaaggaggagatcagcgaggagagcgagccccacggcagcctgctggagaagttccccaaggtggtgtaccagggccacgagttcggcgccggctgcgaggaggacatgctggagggccacagcagagagagcatggaggaggtgatcgagcagatgagcccccaggagagagacttccccagcggcctgatgatcttcaagaagagccccagcagcgagaaggacagagagaacaacgagagcgagagaggctgcagccccagccccaacctggtgacccaccagggcgacaccaccgagggcgtgagcgccttcgccaccagcggccagaacttcctggagatcctggagagcaacaagacccagagaagcagcgtgggcgagaagccccacacctgcaaggagtgcggcaaggccttcaaccagaacagccacctgatccagcacatgagagtgcacagcggcgagaagcccttcgagtgcaaggagtgcggcaagaccttcggcaccaacagcagcctgagaagacacctgagaatccacgccggcgagaagcccttcgcctgcaacgagtgcggcaaggccttcatccagagcagccacctgatccaccaccacagaatccacaccggcgagagaccctacaagtgcgaggagtgcggcaaggccttcagccagaacagcgccctgatcctgcaccagagaatccacaccggcgagaagccctacgagtgcaacgagtgcggcaagaccttcagagtgagcagccagctgatccagcaccagagaatccacaccgaggagagataccacgagtgcaacgagtgcggcaaggccttcaagcacagcagcggcctgatcagacaccagaagatccacaccggcgagaagccctacctgtgcaacgagtgcggcaagggcttcggccagagcagcgagctgatcagacaccagagaatccacaccggcgacaagccctacgagtgcaacgagtgcggcaagaccttcggccagaacagcgagatcatcagacacatcagaatccacaccggcgagaagccctacgtgtgcaaggagtgcggcaaggccttcagaggcaacagcgagctgctgagacacgagagaatccacaccggcgagaagccctacgagtgcttcgagtgcggcaaggccttcagaagaaccagccacctgatcgtgcaccagagaatccacaccggcgagaagccccaccagtgcaacgagtgcgccagaaccttctgggacaacagcgagctgctgctgcaccagaagatccacatcggcgagaagccctacgagtgcagcgagtgcgagaagaccttcagccagcacagccagctgatcatccaccagagaatccacaccggcgagaagccctacgagtgccaggagtgccagaagaccttcagcagaagcagccacctgctgagacaccagagcgtgcactgcatggagtag

SEQ ID NO: 105918 - DNA, 1815 bp, synthetic construct
  misc_feature 1..1815: note = Description of Artificial Sequence: Synthetic coding sequence
  source 1..1815: mol_type = other DNA
atgatgaagagccagggcctggtgagcttcaaggacgtggccgtggacttcacccaggaggagtggcagcagctggaccccagccagagaaccctgtacagagacgtgatgctggagaactacagccacctggtgagcatgggctaccccgtgagcaagcccgacgtgatcagcaagctggagcagggcgaggagccctggatcatcaagggcgacatcagcaactggatctaccccgacgagtaccaggccgacggcagacaggacagaaagagcaacctgcacaacagccagagctgcatcctgggcaccgtgagcttccaccacaagatcctgaagggcgtgaccagagacggcagcctgtgcagcatcctgaaggtgtgccagggcgacggccagctgcagagattcctggagaaccaggacaagctgttcagacaggtgaccttcgtgaacagcaagaccgtgaccgaggccagcggccacaagtacaaccccctgggcaagatcttccaggagtgcatcgagaccgacatcagcatccagagattccacaagtacgacgccttcaagaagaacctgaagcccaacatcgacctgcccagctgctacaagagcaacagcagaaagaagcccgaccagagcttcggcggcggcaagagcagcagccagagcgagcccaacagcaacctggagaagatccacaacggcgtgatccccttcgacgacaaccagtgcggcaacgtgttcagaaacacccagagcctgatccagtaccagaacgtggagaccaaggagaagagctgcgtgtgcgtgacctgcggcaaggccttcgccaagaagagccagctgatcgtgcaccagagaatccacaccggcaagaagccctacgactgcggcgcctgcggcaaggccttcagcgagaagttccacctggtggtgcaccagagaacccacaccggcgagaagccctacgactgcagcgagtgcggcaaggccttcagccagaagagcagcctgatcatccaccagagagtgcacaccggcgagaagccctacgagtgcagcgagtgcggcaaggccttcagccagaagagccccctgatcatccaccagagaatccacaccggcgagaagccctacgagtgcagagagtgcggcaaggccttcagccagaagagccagctgatcatccaccacagagcccacaccggcgagaagccctacgagtgcaccgagtgcggcaaggccttctgcgagaagagccacctgatcatccacaagagaatccacaccggcgagaagccctacaagtgcgcccagtgcgaggaggccttcagcagaaagaccgagctgatcacccaccagctggtgcacaccggcgagaagccctacgagtgcaccgagtgcggcaagaccttcagcagaaagagccagctgatcatccaccagagaacccacaccggcgagaagccctacaagtgcagcgagtgcggcaaggccttctgccagaagagccacctgatcggccaccagagaatccacaccggcgagaagccctacatctgcaccgagtgcggcaaggccttcagccagaagagccacctgcccggccaccagagaatccacaccggcgagaagccctacatctgcgccgagtgcggcaaggccttcagccagaagagcgacctggtgctgcaccagagaatccacaccggcgagagaccctaccagtgcgccatctgcggcaaggccttcatccagaagagccagctgaccgtgcaccagagaatccacaccgtggtgaagagctag

SEQ ID NO: 105919 - DNA, 1815 bp, synthetic construct
  misc_feature 1..1815: note = Description of Artificial Sequence: Synthetic coding sequence
  source 1..1815: mol_type = other DNA
atgatgaagagccagggcctggtgagcttcaaggacgtggccgtggacttcacccaggaggagtggcagcagctggaccccagccagagaaccctgtacagagacgtgatgctggagaactacagccacctggtgagcatgggctaccccgtgagcaagcccgacgtgatcagcaagctggagcagggcgaggagccctggatcatcaagggcgacatcagcaactggatctaccccgacgagtaccaggccgacggcagacagggcaagaagagcaacctgcacaacagccagagctgcatcctgggcaccgtgagcttccaccacaagatcctgaagggcgtgaccagagacggcagcctgtgcagcatcctgaaggtgtgccagggcgacggccagctgcagagattcctggagaaccaggacaagctgttcagacaggtgaccttcgtgaacagcaagaccgtgaccgaggccagcggccacaagtacaaccccctgggcaagatcttccaggagtgcatcgagaccgacatcagcatccagagattccacaagtacgacgccttcaagaagaacctgaagcccaacatcgacctgcccagctgctacaagagcaacagcagaaagaagcccgaccagagcttcggcggcggcaagagcagcagccagagcgagcccaacagcaacctggagaagatccacaacggcgtgatccccttcgacgacaaccagtgcggcaacgtgttcagaaacacccagagcctgatccagtaccagaacgtggagaccaaggagaagagctgcgtgtgcgtgacctgcggcaaggccttcgccaagaagagccagctgatcgtgcaccagagaatccacaccggcaagaagccctacgactgcggcgcctgcggcaaggccttcagcgagaagttccacctggtggtgcaccagagaacccacaccggcgagaagccctacgactgcagcgagtgcggcaaggccttcagccagaagagcagcctgatcatccaccagagagtgcacaccggcgagaagccctacgagtgcagcgagtgcggcaaggccttcagccagaagagccccctgatcatccaccagagaatccacaccggcgagaagccctacgagtgcagagagtgcggcaaggccttcagccagaagagccagctgatcatccaccacagagcccacaccggcgagaagccctacgagtgcaccgagtgcggcaaggccttctgcgagaagagccacctgatcatccacaagagaatccacaccggcgagaagccctacaagtgcgcccagtgcgaggaggccttcagcagaaagaccgagctgatcacccaccagctggtgcacaccggcgagaagccctacgagtgcaccgagtgcggcaagaccttcagcagaaagagccagctgatcatccaccagagaacccacaccggcgagaagccctacaagtgcagcgagtgcggcaaggccttctgccagaagagccacctgatcggccaccagagaatccacaccggcgagaagccctacatctgcaccgagtgcggcaaggccttcagccagaagagccacctgcccggccaccagagaatccacaccggcgagaagccctacatctgcgccgagtgcggcaaggccttcagccagaagagcgacctggtgctgcaccagagaatccacaccggcgagagaccctaccagtgcgccatctgcggcaaggccttcatccagaagagccagctgaccgtgcaccagagaatccacaccgtggtgaagagctag

SEQ ID NO: 105920 - DNA, 1707 bp, synthetic construct
  misc_feature 1..1707: note = Description of Artificial Sequence: Synthetic coding sequence
  source 1..1707: mol_type = other DNA
atgctggagaactacagccacctggtgagcatgggctaccccgtgagcaagcccgacgtgatcagcaagctggagcagggcgaggagccctggatcatcaagggcgacatcagcaactggatctaccccgacgagtaccaggccgacggcagacaggacagaaagagcaacctgcacaacagccagagctgcatcctgggcaccgtgagcttccaccacaagatcctgaagggcgtgaccagagacggcagcctgtgcagcatcctgaaggtgtgccagggcgacggccagctgcagagattcctggagaaccaggacaagctgttcagacaggtgaccttcgtgaacagcaagaccgtgaccgaggccagcggccacaagtacaaccccctgggcaagatcttccaggagtgcatcgagaccgacatcagcatccagagattccacaagtacgacgccttcaagaagaacctgaagcccaacatcgacctgcccagctgctacaagagcaacagcagaaagaagcccgaccagagcttcggcggcggcaagagcagcagccagagcgagcccaacagcaacctggagaagatccacaacggcgtgatccccttcgacgacaaccagtgcggcaacgtgttcagaaacacccagagcctgatccagtaccagaacgtggagaccaaggagaagagctgcgtgtgcgtgacctgcggcaaggccttcgccaagaagagccagctgatcgtgcaccagagaatccacaccggcaagaagccctacgactgcggcgcctgcggcaaggccttcagcgagaagttccacctggtggtgcaccagagaacccacaccggcgagaagccctacgactgcagcgagtgcggcaaggccttcagccagaagagcagcctgatcatccaccagagagtgcacaccggcgagaagccctacgagtgcagcgagtgcggcaaggccttcagccagaagagccccctgatcatccaccagagaatccacaccggcgagaagccctacgagtgcagagagtgcggcaaggccttcagccagaagagccagctgatcatccaccacagagcccacaccggcgagaagccctacgagtgcaccgagtgcggcaaggccttctgcgagaagagccacctgatcatccacaagagaatccacaccggcgagaagccctacaagtgcgcccagtgcgaggaggccttcagcagaaagaccgagctgatcacccaccagctggtgcacaccggcgagaagccctacgagtgcaccgagtgcggcaagaccttcagcagaaagagccagctgatcatccaccagagaacccacaccggcgagaagccctacaagtgcagcgagtgcggcaaggccttctgccagaagagccacctgatcggccaccagagaatccacaccggcgagaagccctacatctgcaccgagtgcggcaaggccttcagccagaagagccacctgcccggccaccagagaatccacaccggcgagaagccctacatctgcgccgagtgcggcaaggccttcagccagaagagcgacctggtgctgcaccagagaatccacaccggcgagagaccctaccagtgcgccatctgcggcaaggccttcatccagaagagccagctgaccgtgcaccagagaatccacaccgtggtgaagagctag

SEQ ID NO: 105921 - DNA, 1863 bp, synthetic construct
  misc_feature 1..1863: note = Description of Artificial Sequence: Synthetic coding sequence
  source 1..1863: mol_type = other DNA
atggtgcccgccgagaccagcagcagcggcctgctggaggagcagaagatgatgaagagccagggcctggtgagcttcaaggacgtggccgtggacttcacccaggaggagtggcagcagctggaccccagccagagaaccctgtacagagacgtgatgctggagaactacagccacctggtgagcatgggctaccccgtgagcaagcccgacgtgatcagcaagctggagcagggcgaggagccctggatcatcaagggcgacatcagcaactggatctaccccgacgagtaccaggccgacggcagacaggacagaaagagcaacctgcacaacagccagagctgcatcctgggcaccgtgagcttccaccacaagatcctgaagggcgtgaccagagacggcagcctgtgcagcatcctgaaggtgtgccagggcgacggccagctgcagagattcctggagaaccaggacaagctgttcagacaggtgaccttcgtgaacagcaagaccgtgaccgaggccagcggccacaagtacaaccccctgggcaagatcttccaggagtgcatcgagaccgacatcagcatccagagattccacaagtacgacgccttcaagaagaacctgaagcccaacatcgacctgcccagctgctacaagagcaacagcagaaagaagcccgaccagagcttcggcggcggcaagagcagcagccagagcgagcccaacagcaacctggagaagatccacaacggcgtgatccccttcgacgacaaccagtgcggcaacgtgttcagaaacacccagagcctgatccagtaccagaacgtggagaccaaggagaagagctgcgtgtgcgtgacctgcggcaaggccttcgccaagaagagccagctgatcgtgcaccagagaatccacaccggcaagaagccctacgactgcggcgcctgcggcaaggccttcagcgagaagttccacctggtggtgcaccagagaacccacaccggcgagaagccctacgactgcagcgagtgcggcaaggccttcagccagaagagcagcctgatcatccaccagagagtgcacaccggcgagaagccctacgagtgcagcgagtgcggcaaggccttcagccagaagagccccctgatcatccaccagagaatccacaccggcgagaagccctacgagtgcagagagtgcggcaaggccttcagccagaagagccagctgatcatccaccacagagcccacaccggcgagaagccctacgagtgcaccgagtgcggcaaggccttctgcgagaagagccacctgatcatccacaagagaatccacaccggcgagaagccctacaagtgcgcccagtgcgaggaggccttcagcagaaagaccgagctgatcacccaccagctggtgcacaccggcgagaagccctacgagtgcaccgagtgcggcaagaccttcagcagaaagagccagctgatcatccaccagagaacccacaccggcgagaagccctacaagtgcagcgagtgcggcaaggccttctgccagaagagccacctgatcggccaccagagaatccacaccggcgagaagccctacatctgcaccgagtgcggcaaggccttcagccagaagagccacctgcccggccaccagagaatccacaccggcgagaagccctacatctgcgccgagtgcggcaaggccttcagccagaagagcgacctggtgctgcaccagagaatccacaccggcgagagaccctaccagtgcgccatctgcggcaaggccttcatccagaagagccagctgaccgtgcaccagagaatccacaccgtggtgaagagctag

SEQ ID NO: 105922 - DNA, 1980 bp, synthetic construct
  misc_feature 1..1980: note = Description of Artificial Sequence: Synthetic coding sequence
  source 1..1980: mol_type = other DNA
atggccgccgccgtgctgatggacagagtgcagagctgcgtgaccttcgaggacgtgttcgtgtacttcagcagagaggagtgggagctgctggaggaggcccagagattcctgtacagagacgtgatgctggagaacttcgccctggtggccaccctgggcttctggtgcgaggccgagcacgaggcccccagcgagcagagcgtgagcgtggagggcgtgagccaggtgagaaccgccgagagcggcctgttccagaaggcccacccctgcgagatgtgcgaccccctgctgaaggacatcctgcacctggccgagcaccagggcagccacctgacccagaagctgtgcaccagaggcctgtgcagaagaagattcagcttcagcgccaacttctaccagcaccagaagcagcacaacggcgagaactgcttcagaggcgacgacggcggcgccagcttcgtgaagagctgcaccgtgcacatgctgggcagaagcttcacctgcagagaggagggcatggacctgcccgacagcagcggcctgttccagcaccagaccacctacaacagagtgagcccctgcagaagaaccgagtgcatggagagcttcccccacagcagcagcctgagacagcaccagggcgactacgacggccagatgctgttcagctgcggcgacgagggcaaggccttcctggacaccttcaccctgctggacagccagatgacccacgccgaggtgagacccttcagatgcctgccctgcggcaacgtgttcaaggagaagagcgccctgatcaaccacagaaagatccacagcggcgagatcagccacgtgtgcaaggagtgcggcaaggccttcatccacctgcaccacctgaagatgcaccagaagttccacaccggcaagagacactacacctgcagcgagtgcggcaaggccttcagcagaaaggacaccctggtgcagcaccagagagtgcacaccggcgagagaagctacgactgcagcgagtgcggcaaggcctacagcagaagcagccacctggtgcagcaccagagaatccacaccggcgagagaccctacaagtgcaacaagtgcggcaaggccttcagcagaaaggacaccctggtgcagcaccagagattccacaccggcgagagaccctacgagtgcagcgagtgcggcaagttcttcagccagagcagccacctgatcgagcactggagaatccacaccggcgccagaccctacgagtgcatcgagtgcggcaagttcttcagccacaacagcagcctgatcaagcacagaagagtgcacaccggcgccagaagctacgtgtgcagcaagtgcggcaaggccttcggctgcaaggacaccctggtgcagcaccagatcatccacaccggcgccagaccctacgagtgcagcgagtgcggcaaggccttcagcagaaaggacaccctggtgcagcaccagaagatccacaccggcgagagaccctacgagtgcggcgagtgcggcaagttcttcagccacagcagcaacctgatcgtgcaccagagaatccacaccggcgccaagccctacgagtgcaacgagtgcggcaagtgcttcagccacaacagcagcctgatcctgcaccagagagtgcacaccggcgccagaccctacgtgtgcagcgagtgcggcaaggcctacatcagcagcagccacctggtgcagcacaagaaggtgcacaccggcgccagaccctacgagtgcagcgagtgcggcaagttcttcagcagaaacagcggcctgatcctgcaccagagagtgcacaccggcgagaagccctacgtgtgcagcgagtgcggcaaggcctacagcagaagcagccacctggtgagacaccagaaggcccacaccggcgagagagcccacgagtgcaacagcttcggcggccccctggccgccagcctgaagctggtgtag

SEQ ID NO: 105923 - DNA, 1980 bp, synthetic construct; identical to SEQ ID NO: 105922
  misc_feature 1..1980: note = Description of Artificial Sequence: Synthetic coding sequence
  source 1..1980: mol_type = other DNA

SEQ ID NO: 105924 - DNA, 2121 bp, synthetic construct
  misc_feature 1..2121: note = Description of Artificial Sequence: Synthetic coding sequence
  source 1..2121: mol_type = other DNA
atggccgccgccgtgctgatggacagagtgcagagctgcgtgaccttcgaggacgtgttcgtgtacttcagcagagaggagtgggagctgctggaggaggcccagagattcctgtacagagacgtgatgctggagaacttcgccctggtggccaccctggccttcatcttccccgtgccctgcagctgcgccgtgggcggcggcagaaagccctgggtgcccgacagagccgacatcaccgccgccaccgtgaaggagacctacagaggccacggccccgccgagtgggagctggaggagggcttctggtgcgaggccgagcacgaggcccccagcgagcagagcgtgagcgtggagggcgtgagccaggtgagaaccgccgagagcggcctgttccagaaggcccacccctgcgagatgtgcgaccccctgctgaaggacatcctgcacctggccgagcaccagggcagccacctgacccagaagctgtgcaccagaggcctgtgcagaagaagattcagcttcagcgccaacttctaccagcaccagaagcagcacaacggcgagaactgcttcagaggcgacgacggcggcgccagcttcgtgaagagctgcaccgtgcacatgctgggcagaagcttcacctgcagagaggagggcatggacctgcccgacagcagcggcctgttccagcaccagaccacctacaacagagtgagcccctgcagaagaaccgagtgcatggagagcttcccccacagcagcagcctgagacagcaccagggcgactacgacggccagatgctgttcagctgcggcgacgagggcaaggccttcctggacaccttcaccctgctggacagccagatgacccacgccgaggtgagacccttcagatgcctgccctgcggcaacgtgttcaaggagaagagcgccctgatcaaccacagaaagatccacagcggcgagatcagccacgtgtgcaaggagtgcggcaaggccttcatccacctgcaccacctgaagatgcaccagaagttccacaccggcaagagacactacacctgcagcgagtgcggcaaggccttcagcagaaaggacaccctggtgcagcaccagagagtgcacaccggcgagagaagctacgactgcagcgagtgcggcaaggcctacagcagaagcagccacctggtgcagcaccagagaatccacaccggcgagagaccctacaagtgcaacaagtgcggcaaggccttcagcagaaaggacaccctggtgcagcaccagagattccacaccggcgagagaccctacgagtgcagcgagtgcggcaagttcttcagccagagcagccacctgatcgagcactggagaatccacaccggcgccagaccctacgagtgcatcgagtgcggcaagttcttcagccacaacagcagcctgatcaagcacagaagagtgcacaccggcgccagaagctacgtgtgcagcaagtgcggcaaggccttcggctgcaaggacaccctggtgcagcaccagatcatccacaccggcgccagaccctacgagtgcagcgagtgcggcaaggccttcagcagaaaggacaccctggtgcagcaccagaagatccacaccggcgagagaccctacgagtgcggcgagtgcggcaagttcttcagccacagcagcaacctgatcgtgcaccagagaatccacaccggcgccaagccctacgagtgcaacgagtgcggcaagtgcttcagccacaacagcagcctgatcctgcaccagagagtgcacaccggcgccagaccctacgtgtgcagcgagtgcggcaaggcctacatcagcagcagccacctggtgcagcacaagaaggtgcacaccggcgccagaccctacgagtgcagcgagtgcggcaagttcttcagcagaaacagcggcctgatcctgcaccagagagtgcacaccggcgagaagccctacgtgtgcagcgagtgcggcaaggcctacagcagaagcagccacctggtgagacaccagaaggcccacaccggcgagagagcccacgagtgcaacagcttcggcggccccctggccgccagcctgaagctggtgtag

SEQ ID NO: 105925 - DNA, 1788 bp, synthetic construct
  misc_feature 1..1788: note = Description of Artificial Sequence: Synthetic coding sequence
  source 1..1788: mol_type = other DNA
atggccgccctgagccccaccttcgccaccagcacccaggacagcacctgcctgcaggacagcgagttccccgtgagcagcaaggaccacagctgcccccagaacctggacctgttcgtgtgcagcggcctggagccccacacccccagcgtgggcagccaggagagcgtgaccttccaggacgtggccgtggacttcaccgagaaggagtggcccctgctggacagcagccagagaaagctgtacaaggacgtgatgctggagaactacagcaacctgaccagcctgggctaccaggtgggcaagcccagcctgatcagccacctggagcaggaggaggagcccagaaccgaggagagaggcgcccaccagggcgcctgcgccgactgggagacccccagcaagaccaagtggagcctgctgatggaggacatcttcggcaaggagacccccagcggcgtgaccatggagagagccggcctgggcgagaagagcaccgagtacgcccacctgttcgaggtgttcggcatggacccccacctgacccagcccatgggcagacacgccggcaagagaccctaccacagaagagactacggcgtggccttcaagggcagaccccacctgacccagcacatgagcatgtacgacggcagaaagatgcacgagtgccaccagtgccagaaggccttcaccaccagcgccagcctgaccagacacagaagaatccacaccggcgagaagccctacgagtgcagcgactgcggcaaggccttcaacgaccccagcgccctgagaagccacgccagaacccacctgaaggagaagcccttcgactgcagccagtgcggcaacgccttcagaaccctgagcgccctgaagatccacatgagagtgcacaccggcgagagaccctacaagtgcgaccagtgcggcaaggcctacggcagaagctgccacctgatcgcccacaagagaacccacaccggcgagagaccctacgagtgccacgactgcggcaaggccttccagcaccccagccacctgaaggagcacgtgagaaaccacaccggcgagaagccctacgcctgcacccagtgcggcaaggccttcagatggaagagcaacttcaacctgcacaagaagaaccacatggtggagaagacctacgagtgcaaggagtgcggcaagagcttcggcgacctggtgagcagaagaaagcacatgagaatccacatcgtgaagaagcccgtggagtgcagacagtgcggcaagaccttcagaaaccagagcatcctgaagacccacatgaacagccacaccggcgagaagccctacggctgcgacctgtgcggcaaggccttcagcgccagcagcaacctgaccgcccacagaaagatccacacccaggagagaagatacgagtgcgccgcctgcggcaaggtgttcggcgactacctgagcagaagaagacacatgagcgtgcacctggtgaagaagagagtggagtgcagacagtgcggcaaggccttcagaaaccagagcaccctgaagacccacatgagaagccacaccggcgagaagccctacgagtgcgaccactgcggcaaggccttcagcatcggcagcaacctgaacgtgcacagaagaatccacaccggcgagaagccctacgagtgcctggtgtgcggcaaggccttcagcgaccacagcagcctgagaagccacgtgaagacccacagaggcgagaagctgttcgtgagcagcgtgtggaagagactgcagtag

SEQ ID NO: 105926 - DNA, 1692 bp, synthetic construct
  misc_feature 1..1692: note = Description of Artificial Sequence: Synthetic coding sequence
  source 1..1692: mol_type = other DNA
atggccgccctgagccccaccttcgccaccagcacccaggacagcacctgcctgcaggacagcgagttccccgtgagcagcaaggaccacagctgcccccagaacctggacctgttcgtgtgcagcggcctggagccccacacccccagcgtgggcagccaggagagcgtgaccttccaggacgtggccgtggacttcaccgagaaggagtggcccctgctggacagcagccagagaaagctgtacaaggacgtgatgctggagaactacagcaacctgaccagcctggactgggagacccccagcaagaccaagtggagcctgctgatggaggacatcttcggcaaggagacccccagcggcgtgaccatggagagagccggcctgggcgagaagagcaccgagtacgcccacctgttcgaggtgttcggcatggacccccacctgacccagcccatgggcagacacgccggcaagagaccctaccacagaagagactacggcgtggccttcaagggcagaccccacctgacccagcacatgagcatgtacgacggcagaaagatgcacgagtgccaccagtgccagaaggccttcaccaccagcgccagcctgaccagacacagaagaatccacaccggcgagaagccctacgagtgcagcgactgcggcaaggccttcaacgaccccagcgccctgagaagccacgccagaacccacctgaaggagaagcccttcgactgcagccagtgcggcaacgccttcagaaccctgagcgccctgaagatccacatgagagtgcacaccggcgagagaccctacaagtgcgaccagtgcggcaaggcctacggcagaagctgccacctgatcgcccacaagagaacccacaccggcgagagaccctacgagtgccacgactgcggcaaggccttccagcaccccagccacctgaaggagcacgtgagaaaccacaccggcgagaagccctacgcctgcacccagtgcggcaaggccttcagatggaagagcaacttcaacctgcacaagaagaaccacatggtggagaagacctacgagtgcaaggagtgcggcaagagcttcggcgacctggtgagcagaagaaagcacatgagaatccacatcgtgaagaagcccgtggagtgcagacagtgcggcaagaccttcagaaaccagagcatcctgaagacccacatgaacagccacaccggcgagaagccctacggctgcgacctgtgcggcaaggccttcagcgccagcagcaacctgaccgcccacagaaagatccacacccaggagagaagatacgagtgcgccgcctgcggcaaggtgttcggcgactacctgagcagaagaagacacatgagcgtgcacctggtgaagaagagagtggagtgcagacagtgcggcaaggccttcagaaaccagagcaccctgaagacccacatgagaagccacaccggcgagaagccctacgagtgcgaccactgcggcaaggccttcagcatcggcagcaacctgaacgtgcacagaagaatccacaccggcgagaagccctacgagtgcctggtgtgcggcaaggccttcagcgaccacagcagcctgagaagccacgtgaagacccacagaggcgagaagctgttcgtgagcagcgtgtggaagagactgcagtag

SEQ ID NO: 105927 - DNA, 369 bp, synthetic construct
  misc_feature 1..369: note = Description of Artificial Sequence: Synthetic coding sequence
  source 1..369: mol_type = other DNA
atgaacttcagcagccacagaagaagactgcccagcccccccctgcccagaagctacagccagagcagcaccagcacccaggacagcacctgcctgcaggacagcgagttccccgtgagcagcaaggaccacagctgcccccagaacctggacctgttcgtgtgcagcggcctggagccccacacccccagcgtgggcagccaggagagcgtgaccttccaggacgtggccgtggacttcaccgagaaggagtggcccctgctggacagcagccagagaaagctgtacaaggacgtgatgctggagaactacagcaacctgaccagcctgggcaaggccagcgccatcagccccctgatccacccctag

SEQ ID NO: 105928 - DNA, 822 bp, synthetic construct
  misc_feature 1..822: note = Description of Artificial Sequence: Synthetic coding sequence
  source 1..822: mol_type = other DNA
atgttcggcttccccaccgccaccctgctggactgccacggcagatacgcccagaacgtggccttcttcaacgtgatgaccgaggcccaccacaagtacgaccacagcgaggccaccggcagcagcagctgggacatccagaacagcttcagaagagagaagctggagcagaagagccccgacagcaagaccctgcaggaggacagccccggcgtgagacagagagtgtacgagtgccaggagtgcggcaagagcttcagacagaagggcagcctgaccctgcacgagagaatccacaccggccagaagcccttcgagtgcacccactgcggcaagagcttcagagccaagggcaacctggtgacccaccagagaatccacaccggcgagaagccctaccagtgcaaggagtgcggcaagagcttcagccagagaggcagcctggccgtgcacgagagactgcacaccggccagaagccctacgagtgcgccatctgccagagaagcttcagaaaccagagcaacctggccgtgcacagaagagtgcacagcggcgagaagccctacagatgcgaccagtgcggcaaggccttcagccagaagggcagcctgatcgtgcacatcagagtgcacaccggcctgaagccctacgcctgcacccagtgcagaaagagcttccacaccagaggcaactgcatcctgcacggcaagatccacaccggcgagaccccctacctgtgcggccagtgcggcaagagcttcacccagagaggcagcctggccgtgcaccagagaagctgcagccagagactgaccctgtag

SEQ ID NO: 105929 - DNA, 822 bp, synthetic construct; identical to SEQ ID NO: 105928
  misc_feature 1..822: note = Description of Artificial Sequence: Synthetic coding sequence
  source 1..822: mol_type = other DNA

SEQ ID NO: 105930 - DNA, 1530 bp, synthetic construct
  misc_feature 1..1530: note = Description of Artificial Sequence: Synthetic coding sequence
  source 1..1530: mol_type = other DNA
atggccctgagccagggcctgctgaccttcagagacgtggccatcgagttcagccaggaggagtggaagtgcctggaccccgcccagagaaccctgtacagagacgtgatgctggagaactacagaaacctggtgagcctggacatcagcagcaagtgcatgatgaacaccctgagcagcaccggccagggcaacaccgaggtgatccacaccggcaccctgcagagacaggccagctaccacatcggcgccttctgcagccaggagatcgagaaggacatccacgacttcgtgttccagtggcaggaggacgagaccaacgaccacgaggcccccatgaccgagatcaagaagctgaccagcagcaccgacagatacgaccagagacacgccggcaacaagcccatcaagggccagctggagagcagattccacctgcacctgagaagacacagaagaatccacaccggcgagaagccctacaagtgcgaggagtgcgagaaggtgttcagctgcaagagccacctggagatccacagaatcatccacaccggcgagaagccctacaagtgcaaggtgtgcgacaaggccttcaagcacgacagccacctggccaagcacaccagaatccacagaggcgacaagcactacacctgcaacgagtgcggcaaggtgttcgaccagaaggccaccctggcctgccaccacagaagccacaccggcgagaagccctacaagtgcaacgagtgcggcaagaccttcagccagaccagccacctggtgtaccaccacagactgcacaccggcgagaagccctacaagtgcaacgagtgcggcaagaccttcgccagaaacagcgtgctggtgatccacaaggccgtgcacaccgccgagaagccctacaagtgcaacgagtgcggcaaggtgttcaagcagagagccaccctggccggccacagaagagtgcacaccggcgagaagccctacagatgcgaggagtgcgacaaggtgttcagcagaaagagccacctggagagacacagaagaatccacaccggcgagaagccctacaagtgcaaggtgtgcgacaaggccttcagaagcgacagcagactggccgagcaccagagagtgcacaccggcgagagaccctacacctgcaacgagtgcggcaaggtgttcagcaccaaggcctacctggcctgccaccagaagctgcacaccggcgagaagctgtacgagtgcgaggagtgcgacaaggtgtacatcagaaagagccacctggagagacacagaagaatccacaccggcgagaagccccacaagtgcggcgactgcggcaaggccttcaacagccccagccacctgatcagacaccagagaatccacaccggccagaagagctacaagtgccaccagtgcggcaaggtgttcagcctgagaagcctgctggccgagcaccagaagatccccttcggcgacaactgcttcaagtgcaacgagtacagcaagcccagcagcatcaactag

SEQ ID NO: 105931 - DNA, 1530 bp, synthetic construct; identical to SEQ ID NO: 105930
  misc_feature 1..1530: note = Description of Artificial Sequence: Synthetic coding sequence
  source 1..1530: mol_type = other DNA

SEQ ID NO: 105932 - DNA, 1209 bp, synthetic construct
  misc_feature 1..1209: note = Description of Artificial Sequence: Synthetic coding sequence
  source 1..1209: mol_type = other DNA
atgtacaccagcgaggagaagtgcaaccagagaacccagaagagaaagatctacaacgtgtgccccagaaagggcaagaagatcttcatccacatgcacgagatcatccagatcgacggccacatctaccagtgcctggagtgcaagcagaacttctgcgagaacctggccctgatcatgtgcgagagaacccacaccggcgagaagccctacaagtgcgacatgtgcgagaagaccttcgtgcagagcagcgacctgaccagccaccagagaatccacaactacgagaagccctacaagtgcagcaagtgcgagaagagcttctggcaccacctggccctgagcggccaccagagaacccacgccggcaagaagttctacacctgcgacatctgcggcaagaacttcggccagagcagcgacctgctggtgcaccagagaagccacaccggcgagaagccctacctgtgcagcgagtgcgacaagtgcttcagcagaagcaccaacctgatcagacacagaagaacccacaccggcgagaagcccttcaagtgcctggagtgcgagaaggccttcagcggcaagagcgacctgatcagccaccagagaacccacaccggcgagagaccctacaagtgcaacaagtgcgagaagagctacagacacagaagcgccttcatcgtgcacaagagagtgcacaccggcgagaagccctacaagtgcggcgcctgcgagaagtgcttcggccagaagagcgacctgatcgtgcaccagagagtgcacaccggcgagaagccctacaagtgcctggagtgcatgagaagcttcaccagaagcgccaacctgatcagacaccaggccacccacacccacaccttcaagtgcctggagtacgagaagagcttcaactgcagcagcgacctgatcgtgcaccagagaatccacatggaggagaagccccaccagtggagcgcctgcgagagcggcttcctgctgggcatggacttcgtggcccagcagaagatgagaacccagaccgaggagctgcactacaagtacaccgtgtgcgacaagagcttccaccagagcagcgccctgctgcagcaccagaccgtgcacatcggcgagaagcccttcgtgtgcaacgtgagcgagaagggcctggagctgagccccccccacgccagcgaggccagccagatgagctag

SEQ ID NO: 105933 - DNA, 1209 bp, synthetic construct; identical to SEQ ID NO: 105932
  misc_feature 1..1209: note = Description of Artificial Sequence: Synthetic coding sequence
  source 1..1209: mol_type = other DNA

SEQ ID NO: 105934 - DNA, 81 bp, synthetic construct
  misc_feature 1..81: note = Description of Artificial Sequence: Synthetic coding sequence
  source 1..81: mol_type = other DNA
atgtacaccagcgaggagaagtgcaaccagagaacccagaagagaaagatctacaacgtgtgccccagaaagggcaagtag

SEQ ID NO: 105935 - DNA, 1221 bp, synthetic construct
  misc_feature 1..1221: note = Description of Artificial Sequence: Synthetic coding sequence
  source 1..1221: mol_type = other DNA
atggccagcaccgaggagcagtacgacctgaagatcgtgaaggtggaggaggaccccatctgggaccaggagacccacctgagaggcaacaacttcagcggccaggaggccagcagacagctgttcagacagttctgctaccaggagacccccggccccagagaggccctgagcagactgagagagctgtgccaccagtggctgagacccgagatccacaccaaggagcagatcctggagctgctggtgctggagcagttcctgaccatcctgcccgaggagctgcaggcctgggtgagagagcaccaccccgagagcggcgaggaggccgtggccgtggtggaggacctggagcaggagctgagcgagcccggcaaccaggcccccgaccacgagcacggccacagcgaggtgctgctggaggacgtggagcacctgaaggtgaagcaggagcccaccgacatccagctgcagcccatggtgacccagctgagatacgagagcttctgcctgcaccagttccaggagcaggacggcgagagcatccccgagaaccaggagctggccagcaagcaggagatcctgaaggagatggagcacctgggcgacagcaagctgcagagagacgtgagcctggacagcaagtacagagagacctgcaagagagacagcaaggccgagaagcagcaggcccacagcaccggcgagagaagacacagatgcaacgagtgcggcaagagcttcaccaagagcagcgtgctgatcgagcaccagagaatccacaccggcgagaagccctacgagtgcgaggagtgcggcaaggccttcagcagaagaagcagcctgaacgagcacagaagaagccacaccggcgagaagccctaccagtgcaaggagtgcggcaaggccttcagcgccagcaacggcctgaccagacacagaagaatccacaccggcgagaagccctacgagtgcaaggtgtgcggcaaggccttcctgctgagcagctgcctggtgcagcaccagagaatccacaccggcgagaagagataccagtgcagagagtgcggcaaggccttcatccagaacgccggcctgttccagcacctgagagtgcacaccggcgagaagccctaccagtgcagccagtgcagcaagctgttcagcaagagaaccctgctgaagaagcaccagaagatccacaccggcgagagaccctag

SEQ ID NO: 105936 - DNA, 1221 bp, synthetic construct; identical to SEQ ID NO: 105935
  misc_feature 1..1221: note = Description of Artificial Sequence: Synthetic coding sequence
  source 1..1221: mol_type = other DNA

SEQ ID NO: 105937 - DNA, 1221 bp, synthetic construct; identical to SEQ ID NO: 105935
  misc_feature 1..1221: note = Description of Artificial Sequence: Synthetic coding sequence
  source 1..1221: mol_type = other DNA

SEQ ID NO: 105938 - DNA, 324 bp, synthetic construct
  misc_feature 1..324: note = Description of Artificial Sequence: Synthetic coding sequence
  source 1..324: mol_type = other DNA
atggccagcaccgaggagcagtacgacctgaagatcgtgaaggtggaggaggaccccatctgggaccaggagacccacctgagaggcaacaacttcagcggccaggaggccagcagacagctgttcagacagttctgctaccaggagacccccggccccagagaggccctgagcagactgagagagctgtgccaccagtggctgagacccgagatccacaccaaggagcagatcctggagctgctggtgctggagcagttcctgaccatcctgcccgaggagctgcaggcctgggtgagagagcaccaccccgagagcggctag

SEQ ID NO: 105939 - DNA, 237 bp, synthetic construct
  misc_feature 1..237: note = Description of Artificial Sequence: Synthetic coding sequence
  source 1..237: mol_type = other DNA
atggccagcaccgaggagcagtacgacctgaagatcgtgaaggtggaggaggaccccatctgggaccaggagacccacctgagaggcaacaacttcagcggccaggaggccagcagacagctgttcagacagttctgctaccaggagacccccggccccagagaggccctgagcagactgagagagctgtgccaccagtggctgagacccgagatccacaccaaggagcagatctag

SEQ ID NO: 105940 - DNA, 1221 bp, synthetic construct; identical to SEQ ID NO: 105935
  misc_feature 1..1221: note = Description of Artificial Sequence: Synthetic coding sequence
  source 1..1221: mol_type = other DNA

SEQ ID NO: 105941 - DNA, 54 bp, synthetic construct
  misc_feature 1..54: note = Description of Artificial Sequence: Synthetic coding sequence
  source 1..54: mol_type = other DNA
atggccagcaccgaggagcagtacgacctgaagatcgtgaaggtggaggagtag

SEQ ID NO: 105942 - DNA, 468 bp, synthetic construct
  misc_feature 1..468: note = Description of Artificial Sequence: Synthetic coding sequence
  source 1..468: mol_type = other DNA
atggccagcaccgaggagcagtacgacctgaagatcgtgaaggtggaggaggaccccatctgggaccaggagacccacctgagaggcaacaacttcagcggccaggaggccagcagacagctgttcagacagttctgctaccaggagacccccggccccagagaggccctgagcagactgagagagctgtgccaccagtggctgagacccgagatccacaccaaggagcagatcctggagctgctggtgctggagcagttcctgaccatcctgcccgaggagctgcaggcctgggtgagagagcaccaccccgagagcggcgaggaggccgtggccgtggtggaggacctggagcaggagctgagcgagcccggcaaccaggcccccgaccacgagcacggccacagcgaggtgctgctggaggacgtggagcacctgaaggtgaagcaggagcccaccgacatctag

SEQ ID NO: 105943 - DNA, 75 bp, synthetic construct
  misc_feature 1..75: note = Description of Artificial Sequence: Synthetic coding sequence
  source 1..75: mol_type = other DNA
atggccagcaccgaggagcagtacgacctgaagatcgtgaaggtggaggaggaccccatctgggaccaggagtag

SEQ ID NO: 105944 - DNA, 312 bp, synthetic construct
  misc_feature 1..312: note = Description of Artificial Sequence: Synthetic coding sequence
  source 1..312: mol_type = other DNA
atggccagcaccgaggagcagtacgacctgaagatcgtgaaggtggaggaggaccccatctgggaccaggagacccacctgagaggcaacaacttcagcggccaggaggccagcagacagctgttcagacagttctgctaccaggagacccccggccccagagaggccctgagcagactgagagagctgtgccaccagtggctgagacccgagatccacaccaaggagcagatcctggagctgctggtgctggagcagttcctgaccatcctgcccgaggagctgcaggcctgggtgagagagcaccactag

SEQ ID NO: 105945 - DNA, 447 bp, synthetic construct
  misc_feature 1..447: note = Description of Artificial Sequence: Synthetic coding sequence
  source 1..447: mol_type = other DNA
atggccagcaccgaggagcagtacgacctgaagatcgtgaaggtggaggaggaccccatctgggaccaggagacccacctgagaggcaacaacttcagcggccaggaggccagcagacagctgttcagacagttctgctaccaggagacccccggccccagagaggccctgagcagactgagagagctgtgccaccagtggctgagacccgagatccacaccaaggagcagatcctggagctgctggtgctggagcagttcctgaccatcctgcccgaggagctgcaggcctgggtgagagagcaccaccccgagagcggcgaggaggccgtggccgtggtggaggacctggagcaggagctgagcgagcccggcaaccaggcccccgaccacgagcacggccacagcgaggtgctgctggaggacgtggagcacctgaaggtgtag

SEQ ID NO: 105946 - DNA, 654 bp, synthetic construct
  misc_feature 1..654: note = Description of Artificial Sequence: Synthetic coding sequence
  source 1..654: mol_type = other DNA
atggccagcaccgaggagcagtacgacctgaagatcgtgaaggtggaggaggaccccatctgggaccaggagacccacctgagaggcaacaacttcagcggccaggaggccagcagacagctgttcagacagttctgctaccaggagacccccggccccagagaggccctgagcagactgagagagctgtgccaccagtggctgagacccgagatccacaccaaggagcagatcctggagctgctggtgctggagcagttcctgaccatcctgcccgaggagctgcaggcctgggtgagagagcaccaccccgagagcggcgaggaggccgtggccgtggtggaggacctggagcaggagctgagcgagcccggcaaccaggcccccgaccacgagcacggccacagcgaggtgctgctggaggacgtggagcacctgaaggtgaagcaggagcccaccgacatccagctgcagcccatggtgacccagctgagatacgagagcttctgcctgcaccagttccaggagcaggacggcgagagcatccccgagaaccaggagctggccagcaagcaggagatcctgaaggagatggagcacctgggcgacagcaagctgcagagagacgtgagcctggacagcaagtacagatag

SEQ ID NO: 105947 - DNA, 963 bp, synthetic construct
  misc_feature 1..963: note = Description of Artificial Sequence: Synthetic coding sequence
  source 1..963: mol_type = other DNA
atgcccaagaagaagaccggcgccagaaagaaggccgagaacagaagagagagagagaagcagctgagagccagcagaagcaccatcgacctggccaagcacccctgcaacgccagcatggagtgcgacaagtgccagagaagacagaagaacagagccttctgctacttctgcaacagcgtgcagaagctgcccatctgcgcccagtgcggcaagaccaagtgcatgatgaagagcagcgactgcgtgatcaagcacgccggcgtgtacagcaccggcctggccatggtgggcgccatctgcgacttctgcgaggcctgggtgtgccacggcagaaagtgcctgagcacccacgcctgcgcctgccccctgaccgacgccgagtgcgtggagtgcgagagaggcgtgtgggaccacggcggcagaatcttcagctgcagcttctgccacaacttcctgtgcgaggacgaccagttcgagcaccaggccagctgccaggtgctggaggccgagaccttcaagtgcgtgagctgcaacagactgggccagcacagctgcctgagatgcaaggcctgcttctgcgacgaccacaccagaagcaaggtgttcaagcaggagaagggcaagcagcccccctgccccaagtgcggccacgagacccaggagaccaaggacctgagcatgagcaccagaagcctgaagttcggcagacagaccggcggcgaggagggcgacggcgccagcggctacgacgcctactggaagaacctgagcagcgacaagtacggcgacaccagctaccacgacgaggaggaggacgagtacgaggccgaggacgacgaggaggaggaggacgagggcagaaaggacagcgacaccgagagcagcgacctgttcaccaacctgaacctgggcagaacctacgccagcggctacgcccactacgaggagcaggagaactag

SEQ ID NO: 105948 - DNA, 783 bp, synthetic construct
  misc_feature 1..783: note = Description of Artificial Sequence: Synthetic coding sequence
  source 1..783: mol_type = other DNA
atgccccagtggaacgtgaccagcgtgagaggcaagaccaagtgcatgatgaagagcagcgactgcgtgatcaagcacgccggcgtgtacagcaccggcctggccatggtgggcgccatctgcgacttctgcgaggcctgggtgtgccacggcagaaagtgcctgagcacccacgcctgcgcctgccccctgaccgacgccgagtgcgtggagtgcgagagaggcgtgtgggaccacggcggcagaatcttcagctgcagcttctgccacaacttcctgtgcgaggacgaccagttcgagcaccaggccagctgccaggtgctggaggccgagaccttcaagtgcgtgagctgcaacagactgggccagcacagctgcctgagatgcaaggcctgcttctgcgacgaccacaccagaagcaaggtgttcaagcaggagaagggcaagcagcccccctgccccaagtgcggccacgagacccaggagaccaaggacctgagcatgagcaccagaagcctgaagttcggcagacagaccggcggcgaggagggcgacggcgccagcggctacgacgcctactggaagaacctgagcagcgacaagtacggcgacaccagctaccacgacgaggaggaggacgagtacgaggccgaggacgacgaggaggaggaggacgagggcagaaaggacagcgacaccgagagcagcgacctgttcaccaacctgaacctgggcagaacctacgccagcggctacgcccactacgaggagcaggagaactag

SEQ ID NO: 105949 - DNA, 423 bp, synthetic construct
  misc_feature 1..423: note = Description of Artificial Sequence: Synthetic coding sequence
  source 1..423: mol_type = other DNA
atgcccaagaagaagaccggcgccagaaagaaggccgagaacagaagagagagagagaagcagctgagagccagcagaagcaccatcgacctggccaagcacccctgcaacgccagcatggagtgcgacaagtgccagagaagacagaagaacagagccttctgctacttctgcaacagcgtgcagaagctgcccatctgcgcccagtgcggcaagaccaagtgcatgatgaagagcagcgactgcgtgatcaagcacgccggcgtgtacagcaccggcctggccatggtgggcgccatctgcgacttctgcgaggcctgggtgtgccacggcagaaagtgcctgagcacccacgcctgcgcctgccccctgaccgacgccgagtgcgtggagtgcgagagaggcgtgtgggaccacggctag

SEQ ID NO: 105950 - DNA, 462 bp, synthetic construct
  misc_feature 1..462: note = Description of Artificial Sequence: Synthetic coding sequence
  source 1..462: mol_type = other DNA
atgcccaagaagaagaccggcgccagaaagaaggccgagaacagaagagagagagagaagcagctgagagccagcagaagcaccatcgacctggccaagcacccctgcaacgccagcatggagtgcgacaagtgccagagaagacagaagaacagagccttctgctacttctgcaacagcgtgcagaagctgcccatctgcgcccagtgcggcaagaccaagtgcatgatgaagagcagcgactgcgtgatcaagcacgccggcgtgtacagcaccggcctggccatggtgggcgccatctgcgacttctgcgaggcctgggtgtgccacggcagaaagtgcctgagcacccacgcctgcgcctgccccctgaccgacgccgagtgcgtggagtgcgagagaggcgtgtgggaccacggcggcagaatcttcagctgcagcttctgccacaacttcctgtag

SEQ ID NO: 105951 - DNA, 690 bp, synthetic construct
  misc_feature 1..690: note = Description of Artificial Sequence: Synthetic coding sequence
  source 1..690: mol_type = other DNA
atgcccaagaagaagaccggcgccagaaagaaggccgagaacagaagagagagagagaagcagctgagagccagcagaagcaccatcgacctggccaagcacccctgcaacgccagcatggagtgcgacaagtgccagagaagacagaagaacagagccttctgctacttctgcaacagcgtgcagaagctgcccatctgcgcccagtgcggcaagaccaagtgcatgatgaagagcagcgactgcgtgatcaagcacgccggcgtgtacagcaccggcctggccatggtgggcgccatctgcgacttctgcgaggcctgggtgtgccacggcagaaagtgcctgagcacccacgcctgcgcctgccccctgaccgacgccgagtgcgtggagtgcgagagaggcgtgtgggaccacggcggcagaatcttcagctgcagcttctgccacaacttcctgtgcgaggacgaccagttcgagcaccaggccagctgccaggtgctggaggccgagaccttcaagtgcgtgagctgcaacagactgggccagcacagctgcctgagatgcaaggcctgcttctgcgacgaccacaccagaagcaaggtgttcaagcaggagaagggcaagcagcccccctgccccaagtgcggccacgagacccaggagaccaaggacctgagcatgagctag

SEQ ID NO: 105952 - DNA, 1392 bp, synthetic construct
  misc_feature 1..1392: note = Description of Artificial Sequence: Synthetic coding sequence
  source 1..1392: mol_type = other DNA
atggcccagggcctggtgaccttcgccgacgtggccatcgacttcagccaggaggagtgggcctgcctgaacagcgcccagagagacctgtactgggacgtgatgctggagaactacagcaacctggtgagcctggacctggagagcgcctacgagaacaagagcctgcccaccgagaagaacatccacgagatcagagccagcaagagaaacagcgacagaagaagcaagagcctgggcagaaactggatctgcgagggcaccctggagagaccccagagaagcagaggcagatacgtgaaccagatgatcatcaactacgtgaagagacccgccaccagagagggcaccccccccagaacccaccagagacaccacaaggagaacagcttcgagtgcaaggactgcggcaaggccttcagcagaggctaccagctgagccagcaccagaagatccacaccggcgagaagccctacgagtgcaaggagtgcaagaaggccttcagatggggcaaccagctgacccagcaccagaagatccacaccggcgagaagccctacgagtgcaaggactgcggcaaggccttcagatggggcagcagcctggtgatccacaagagaatccacaccggcgagaagccctacgagtgcaaggactgcggcaaggccttcagaagaggcgacgagctgacccagcaccagagattccacaccggcgagaaggactacgagtgcaaggactgcggcaagaccttcagcagagtgtacaagctgatccagcacaagagaatccacagcggcgagaagccctacgagtgcaaggactgcggcaaggccttcatctgcggcagcagcctgatccagcacaagagaatccacaccggcgagaagccctacgagtgccaggagtgcggcaaggccttcaccagagtgaactacctgacccagcaccagaagatccacaccggcgagaagccccacgagtgcaaggagtgcggcaaggccttcagatggggcagcagcctggtgaagcacgagagaatccacaccggcgagaagccctacaagtgcaccgagtgcggcaaggccttcaactgcggctaccacctgacccagcacgagagaatccacaccggcgagaccccctacaagtgcaaggagtgcggcaaggccttcatctacggcagcagcctggtgaagcacgagagaatccacaccggcgtgaagccctacggctgcaccgagtgcggcaagagcttcagccacggccaccagctgacccagcaccagaagacccacagcggcgccaagagctacgagtgcaaggagtgcggcaaggcctgcaaccacctgaaccacctgagagagcaccagagaatccacaacagctag

SEQ ID NO: 105953 - DNA, 1392 bp, synthetic construct; identical to SEQ ID NO: 105952
  misc_feature 1..1392: note = Description of Artificial Sequence: Synthetic coding sequence
  source 1..1392: mol_type = other DNA

SEQ ID NO: 105954 - DNA, 1392 bp, synthetic construct; identical to SEQ ID NO: 105952
  misc_feature 1..1392: note = Description of Artificial Sequence: Synthetic coding sequence
  source 1..1392: mol_type = other DNA

SEQ ID NO: 105955 - DNA, 192 bp, synthetic construct
  misc_feature 1..192: note = Description of Artificial Sequence: Synthetic coding sequence
  source 1..192: mol_type = other DNA
atggcccagggcctggtgaccttcgccgacgtggccatcgacttcagccaggaggagtgggcctgcctgaacagcgcccagagagacctgtactgggacgtgatgctggagaactacagcaacctggtgagcctggacctggagagcgcctacgagaacaagagcctgcccaccgagaagaacatccactag

SEQ ID NO: 105956 - DNA, 258 bp, synthetic construct
  misc_feature 1..258: note = Description of Artificial Sequence: Synthetic coding sequence
  source 1..258: mol_type = other DNA
atggcccagggcctggtgaccttcgccgacgtggccatcgacttcagccaggaggagtgggcctgcctgaacagcgcccagagagacctgtactgggacgtgatgctggagaactacagcaacctggtgagcctggacctggagagcgcctacgagaacaagagcctgcccaccgagaagaacatccacgagatcagagccagcaagagaaacagcgacagaagaagcaagagcctgggcagaaactggatctgctag

SEQ ID NO: 105957 - DNA, 201 bp, synthetic construct
  misc_feature 1..201: note = Description of Artificial Sequence: Synthetic coding sequence
  source 1..201: mol_type = other DNA
atggcccagggcctggtgaccttcgccgacgtggccatcgacttcagccaggaggagtgggcctgcctgaacagcgcccagagagacctgtactgggacgtgatgctggagaactacagcaacctggtgagcctggacctggagagcgcctacgagaacaagagcctgcccaccgagaagaacatccacgagatcagatag

SEQ ID NO: 105958 - DNA, 195 bp, synthetic construct
  misc_feature 1..195: note = Description of Artificial Sequence: Synthetic coding sequence
  source 1..195: mol_type = other DNA
atggcccagggcctggtgaccttcgccgacgtggccatcgacttcagccaggaggagtgggcctgcctgaacagcgcccagagagacctgtactgggacgtgatgctggagaactacagcaacctggtgagcctggacctggagagcgcctacgagaacaagagcctgcccaccgagaagaacatccacgagtag

SEQ ID NO: 105959 - DNA, 534 bp, synthetic construct
  misc_feature 1..534: note = Description of Artificial Sequence: Synthetic coding sequence
  source 1..534: mol_type = other DNA
atggcccagggcctggtgaccttcgccgacgtggccatcgacttcagccaggaggagtgggcctgcctgaacagcgcccagagagacctgtactgggacgtgatgctggagaactacagcaacctggtgagcctggacctggagagcgcctacgagaacaagagcctgcccaccgagaagaacatccacgagatcagagccagcaagagaaacagcgacagaagaagcaagagcctgggcagaaactggatctgcgagggcaccctggagagaccccagagaagcagaggcagatacgtgaaccagatgatcatcaactacgtgaagagacccgccaccagagagggcaccccccccagaacccaccagagacaccacaaggagaacagcttcgagtgcaaggactgcggcaaggccttcagcagaggctaccagctgagccagcaccagaagatccacaccggcgagaagccctacgagtgcaaggagtgcaagaaggccttcagatggggcaaccagctgacccagcactag

SEQ ID NO: 105960 - DNA, 264 bp, synthetic construct
  misc_feature 1..264: note = Description of Artificial Sequence: Synthetic coding sequence
  source 1..264: mol_type = other DNA
atggcccagggcctggtgaccttcgccgacgtggccatcgacttcagccaggaggagtgggcctgcctgaacagcgcccagagagacctgtactgggacgtgatgctggagaactacagcaacctggtgagcctggacctggagagcgcctacgagaacaagagcctgcccaccgagaagaacatccacgagatcagagccagcaagagaaacagcgacagaagaagcaagagcctgggcagaaactggatctgcgagggctag

SEQ ID NO: 105961 - DNA, 144 bp, synthetic construct
  misc_feature 1..144: note = Description of Artificial Sequence: Synthetic coding sequence
  source 1..144: mol_type = other DNA
atggcccagggcctggtgaccttcgccgacgtggccatcgacttcagccaggaggagtgggcctgcctgaacagcgcccagagagacctgtactgggacgtgatgctggagaactacagcaacctggtgagcctggacctgtag

SEQ ID NO: 105962 - DNA, 1392 bp, synthetic construct; identical to SEQ ID NO: 105952
  misc_feature 1..1392: note = Description of Artificial Sequence: Synthetic coding sequence
  source 1..1392: mol_type = other DNA

SEQ ID NO: 105963 - DNA, 318 bp, synthetic construct
  misc_feature 1..318: note = Description of Artificial Sequence: Synthetic coding sequence
  source 1..318: mol_type = other DNA
atggcccagggcctggtgaccttcgccgacgtggccatcgacttcagccaggaggagtgggcctgcctgaacagcgcccagagagacctgtactgggacgtgatgctggagaactacagcaacctggtgagcctggacctggagagcgcctacgagaacaagagcctgcccaccgagaagaacatccacgagatcagagccagcaagagaaacagcgacagaagaagcaagagcctgggcagaaactggatctgcgagggcaccctggagagaccccagagaagcagaggcagatacgtgaaccagatgatcatctag

SEQ ID NO: 105964 - DNA, 1392 bp, synthetic construct; identical to SEQ ID NO: 105952
  misc_feature 1..1392: note = Description of Artificial Sequence: Synthetic coding sequence
  source 1..1392: mol_type = other DNA

SEQ ID NO: 105965 - DNA, 1392 bp, synthetic construct; identical to SEQ ID NO: 105952
  misc_feature 1..1392: note = Description of Artificial Sequence: Synthetic coding sequence
  source 1..1392: mol_type = other DNA

SEQ ID NO: 105966 - DNA, 297 bp, synthetic construct
  misc_feature 1..297: note = Description of Artificial Sequence: Synthetic coding sequence
  source 1..297: mol_type = other DNA
atggcccagggcctggtgaccttcgccgacgtggccatcgacttcagccaggaggagtgggcctgcctgaacagcgcccagagagacctgtactgggacgtgatgctggagaactacagcaacctggtgagcctggacctggagagcgcctacgagaacaagagcctgcccaccgagaagaacatccacgagatcagagccagcaagagaaacagcgacagaagaagcaagagcctgggcagaaactggatctgcgagggcaccctggagagaccccagagaagcagaggcagatag

SEQ ID NO: 105967 - DNA, 1392 bp, synthetic construct; identical to SEQ ID NO: 105952
  misc_feature 1..1392: note = Description of Artificial Sequence: Synthetic coding sequence
  source 1..1392: mol_type = other DNA

SEQ ID NO: 105968 - DNA, 504 bp, synthetic construct
  misc_feature 1..504: note = Description of Artificial Sequence: Synthetic coding sequence
  source 1..504: mol_type = other DNA
atggcccagggcctggtgaccttcgccgacgtggccatcgacttcagccaggaggagtgggcctgcctgaacagcgcccagagagacctgtactgggacgtgatgctggagaactacagcaacctggtgagcctggacctggagagcgcctacgagaacaagagcctgcccaccgagaagaacatccacgagatcagagccagcaagagaaacagcgacagaagaagcaagagcctgggcagaaactggatctgcgagggcaccctggagagaccccagagaagcagaggcagatacgtgaaccagatgatcatcaactacgtgaagagacccgccaccagagagggcaccccccccagaacccaccagagacaccacaaggagaacagcttcgagtgcaaggactgcggcaaggccttcagcagaggctaccagctgagccagcaccagaagatccacaccggcgagaagccctacgagtgcaaggagtgcaagaaggcctag

SEQ ID NO: 105969 - DNA, 303 bp, synthetic construct
  misc_feature 1..303: note = Description of Artificial Sequence: Synthetic coding sequence
  source 1..303: mol_type = other DNA
atggcccagggcctggtgaccttcgccgacgtggccatcgacttcagccaggaggagtgggcctgcctgaacagcgcccagagagacctgtactgggacgtgatgctggagaactacagcaacctggtgagcctggacctggagagcgcctacgagaacaagagcctgcccaccgagaagaacatccacgagatcagagccagcaagagaaacagcgacagaagaagcaagagcctgggcagaaactggatctgcgagggcaccctggagagaccccagagaagcagaggcagatacgtgtag

SEQ ID NO: 105970 - DNA, 1998 bp, synthetic construct
  misc_feature 1..1998: note = Description of Artificial Sequence: Synthetic coding sequence
  source 1..1998: mol_type = other DNA
atggagagcgtgaccttcgaggacgtggccgtggagttcatccaggagtgggccctgctggacagcgccagaagaagcctgtgcaagtacagaatgctggaccagtgcagaaccctggccagcagaggcacccccccctgcaagcccagctgcgtgagccagctgggccagagagccgagcccaaggccaccgagagaggcatcctgagagccaccggcgtggcctgggagagccagctgaagcccgaggagctgcccagcatgcaggacctgctggaggaggccagcagcagagacatgcagatgggccccggcctgttcctgagaatgcagctggtgcccagcatcgaggagagagagacccccctgaccagagaggacagacccgccctgcaggagcccccctggagcctgggctgcaccggcctgaaggccgccatgcagatccagagagtggtgatccccgtgcccaccctgggccacagaaacccctgggtggccagagacagcgccgtgcccgccagagaccccgcctggctgcaggaggacaaggtggaggaggaggccatggcccccggcctgcccaccgcctgcagccaggagcccgtgaccttcgccgacgtggccgtggtgttcacccccgaggagtgggtgttcctggacagcacccagagaagcctgtacagagacgtgatgctggagaactacagaaacctggccagcgtggccgaccagctgtgcaagcccaacgccctgagctacctggaggagagaggcgagcagtggaccaccgacagaggcgtgctgagcgacacctgcgccgagccccagtgccagccccaggaggccatccccagccaggacaccttcaccgagatcctgagcatcgacgtgaagggcgagcagccccagcccggcgagaagctgtacaagtacaacgagctggagaagcccttcaacagcatcgagcccctgttccagtaccagagaatccacgccggcgaggccagctgcgagtgccaggagatcagaaacagcttcttccagagcgcccacctgatcgtgcccgagaagatcagaagcggcgacaagagctacgcctgcaacaagtgcgagaagagcttcagatacagcagcgacctgatcagacacgagaagacccacaccgccgagaagtgcttcgactgccaggagtgcggccaggccttcaagtacagcagcaacctgagaagacacatgagaacccacaccggcgagaagcccttcgagtgcagccagtgcggcaagaccttcaccagaaacttcaacctgatcctgcaccagagaaaccacaccggcgagaagccctacgagtgcaaggactgcggcaaggccttcaaccagcccagcagcctgagaagccacgtgagaacccacaccggcgagaagcccttcgagtgcagccagtgcggcaaggccttcagagagcacagcagcctgaagacccacctgagaacccacaccagagagaagccctacgagtgcaaccagtgcggcaagcccttcagaaccagcacccacctgaacgtgcacaagagaatccacaccggcgagaagctgtacgagtgcgccacctgcggccaggtgctgagcagactgagcaccctgaagagccacatgagaacccacaccggcgagaagccctacgtgtgccaggagtgcggcagagccttcagcgagcccagcagcctgagaaagcacgccagaacccacagcggcaagaagccctacgcctgccaggagtgcggcagagccttcggccagagcagccacctgatcgtgcacgtgagaacccacagcgccggcagaccctaccagtgcaaccagtgcgagaaggccttcagacacagcagcagcctgaccgtgcacaagagaacccacgtgggcagagagaccatcagaaacggcagcctgcccctgagcatgagccacccctactgcggccccctggccaactag

SEQ ID NO: 105971 - DNA, 549 bp, synthetic construct
  misc_feature 1..549: note = Description of Artificial Sequence: Synthetic coding sequence
  source 1..549: mol_type = other DNA
atggagagcgtgaccttcgaggacgtggccgtggagttcatccaggagtgggccctgctggacagcgccagaagaagcctgtgcaagtacagaatgctggaccagtgcagaaccctggccagcagaggcacccccccctgcaagcccagctgcgtgagccagctgggccagagagccgagcccaaggccaccgagagaggcatcctgagagccaccggcgtggcctgggagagccagctgaagcccgaggagctgcccagcatgcaggacctgctggaggaggccagcagcagagacatgcagatgggccccggcctgttcctgagaatgcagctggtgcccagcatcgaggagagagagacccccctgaccagagaggacagacccgccctgcaggagcccccctggagcctgggctgcaccctgcccctgctgagcctgctgctgcccagctgccccgagccccccctggtgctgctggacagcagcagcgcccccgacagacacctgggcagcaccctggacaccgaggccagaggcatcccctag

SEQ ID NO: 105972 - DNA, 1671 bp, synthetic construct
  misc_feature 1..1671: note = Description of Artificial Sequence: Synthetic coding sequence
  source 1..1671: mol_type = other DNA
atgcagctggtgcccagcatcgaggagagagagacccccctgaccagagaggacagacccgccctgcaggagcccccctggagcctgggctgcaccggcctgaaggccgccatgcagatccagagagtggtgatccccgtgcccaccctgggccacagaaacccctgggtggccagagacagcgccgtgcccgccagagaccccgcctggctgcaggaggacaaggtggaggaggaggccatggcccccggcctgcccaccgcctgcagccaggagcccgtgaccttcgccgacgtggccgtggtgttcacccccgaggagtgggtgttcctggacagcacccagagaagcctgtacagagacgtgatgctggagaactacagaaacctggccagcgtggccgaccagctgtgcaagcccaacgccctgagctacctggaggagagaggcgagcagtggaccaccgacagaggcgtgctgagcgacacctgcgccgagccccagtgccagccccaggaggccatccccagccaggacaccttcaccgagatcctgagcatcgacgtgaagggcgagcagccccagcccggcgagaagctgtacaagtacaacgagctggagaagcccttcaacagcatcgagcccctgttccagtaccagagaatccacgccggcgaggccagctgcgagtgccaggagatcagaaacagcttcttccagagcgcccacctgatcgtgcccgagaagatcagaagcggcgacaagagctacgcctgcaacaagtgcgagaagagcttcagatacagcagcgacctgatcagacacgagaagacccacaccgccgagaagtgcttcgactgccaggagtgcggccaggccttcaagtacagcagcaacctgagaagacacatgagaacccacaccggcgagaagcccttcgagtgcagccagtgcggcaagaccttcaccagaaacttcaacctgatcctgcaccagagaaaccacaccggcgagaagccctacgagtgcaaggactgcggcaaggccttcaaccagcccagcagcctgagaagccacgtgagaacccacaccggcgagaagcccttcgagtgcagccagtgcggcaaggccttcagagagcacagcagcctgaagacccacctgagaacccacaccagagagaagccctacgagtgcaaccagtgcggcaagcccttcagaaccagcacccacctgaacgtgcacaagagaatccacaccggcgagaagctgtacgagtgcgccacctgcggccaggtgctgagcagactgagcaccctgaagagccacatgagaacccacaccggcgagaagccctacgtgtgccaggagtgcggcagagccttcagcgagcccagcagcctgagaaagcacgccagaacccacagcggcaagaagccctacgcctgccaggagtgcggcagagccttcggccagagcagccacctgatcgtgcacgtgagaacccacagcgccggcagaccctaccagtgcaaccagtgcgagaaggccttcagacacagcagcagcctgaccgtgcacaagagaacccacgtgggcagagagaccatcagaaacggcagcctgcccctgagcatgagccacccctactgcggccccctggccaactag

SEQ ID NO: 105973 - DNA, 912 bp, synthetic construct
  misc_feature 1..912: note = Description of Artificial Sequence: Synthetic coding sequence
  source 1..912: mol_type = other DNA
atggagagcgtgaccttcgaggacgtggccgtggagttcatccaggagtgggccctgctggacagcgccagaagaagcctgtgcaagtacagaatgctggaccagtgcagaaccctggccagcagaggcacccccccctgcaagcccagctgcgtgagccagctgggccagagagccgagcccaaggccaccgagagaggcatcctgagagccaccggcgtggcctgggagagccagctgaagcccgaggagctgcccagcatgcaggacctgctggaggaggccagcagcagagacatgcagatgggccccggcctgttcctgagaatgcagctggtgcccagcatcgaggagagagagacccccctgaccagagaggacagacccgccctgcaggagcccccctggagcctgggctgcaccggcctgaaggccgccatgcagatccagagagtggtgatccccgtgcccaccctgggccacagaaacccctgggtggccagagacagcgccgtgcccgccagagaccccgcctggctgcaggaggacaaggtggaggaggaggccatggcccccggcctgcccaccgcctgcagccaggagcccgtgaccttcgccgacgtggccgtggtgttcacccccgaggagtgggtgttcctggacagcacccagagaagcctgtacagagacgtgatgctggagaactacagaaacctggccagcgtggccgaccagctgtgcaagcccaacgccctgagctacctggaggagagaggcgagcagtggaccaccgacagaggcgtgctgagcgacacctgcgccgagccccagtgccagccccaggaggccatccccagccaggacaccttcaccgagatcctgagcatcgacgtgaagggcccccccaactag

SEQ ID NO: 105974 - DNA, 3360 bp, synthetic construct
  misc_feature 1..3360: note = Description of Artificial Sequence: Synthetic coding sequence
  source 1..3360: mol_type = other DNA
gccgccgaggagagaggctggagacccagaagatgcagaagccagagaggcacctggctgagaaagcccagaagcgaggtgcccagaccctacgcccccctgagcggcagcccccccatcagatggagaagaaccagatggagagccgccgccaccagacccctgggcctggccggccccagaagccccctgagagccgcctgggtgtgggcccccagcagagtgagaagacagcagagaagaagaggcagacccggcgccggcagaggcatcgacgacctggaggaggacagcgactacaaccccgccgaggacgagcccagaggcagacagctgagactgcagagacccacccccagcacccccagacccagaagaagacccggcagacccagaaagctgcccagactggagatcagcgacctgcccgacggcgtggagggcgagcccctggtgagcagccagagcggccagagcccccccgagccccaggaccccgaggcccccagcagcagcggccccggccacctggtggccatgggcaaggtgagcagaacccccgtggaggccggcgtgagccagagcgacgccgagaacgccgcccccagctgccccgacgagcacgacaccctgcccagaagaagaggcagacccagcagaagattcctgggcaagaagtacagaaagtactactacaagagccccaagcccctgctgagacccttcctgtgcagaatctgcggcagcagattcctgagccacgaggacctgagattccacgtgaacagccacgaggccggcgacccccagctgttcaagtgcctgcagtgcagctacagaagcagaagatggagcagcctgaaggagcacatgttcaaccacgtgggcagcaagccctacaagtgcgacgagtgcagctacaccagcgtgtacagaaaggacgtgatcagacacgccgccgtgcacagcagagacagaaagaagagacccgaccccacccccaagctgagcagcttcccctgccccgtgtgcggcagagtgtaccccatgcagaagagactgacccagcacatgaagacccacagcaccgagaagccccacatgtgcgacaagtgcggcaagagcttcaagaagagatacaccttcaagatgcacctgctgacccacatccaggccgtggccaacagaagattcaagtgcgagttctgcgagttcgtgtgcgaggacaagaaggccctgctgaaccaccagctgagccacgtgagcgacaagcccttcaagtgcagcttctgcccctacagaaccttcagagaggacttcctgctgagccacgtggccgtgaagcacaccggcgccaagcccttcgcctgcgagtactgccacttcagcaccagacacaagaagaacctgagactgcacgtgagatgcagacacgccagcagcttcgaggagtggggcagaagacaccccgaggagccccccagcagaagaagacccttcttcagcctgcagcagatcgaggagctgaagcagcagcacagcgccgcccccggccccccccccagcagccccggcccccccgagatcccccccgaggccaccaccttccagagcagcgaggcccccagcctgctgtgcagcgacaccctgggcggcgccaccatcatctaccagcagggcgccgaggagagcaccgccatggccacccagaccgccctggacctgctgctgaacatgagcgcccagagagagctgggcggcaccgccctgcaggtggccgtggtgaagagcgaggacgtggaggccggcctggccagccccggcggccagcccagccccgagggcgccaccccccaggtggtgaccctgcacgtggccgagcccggcggcggcgccgccgccgagagccagctgggcccccccgacctgccccagatcaccctggcccccggccccttcggcggcaccggctacagcgtgatcaccgccccccccatggaggagggcaccagcgcccccggcaccccctacagcgaggagcccgccggcgaggccgcccaggccgtggtggtgagcgacaccctgaaggaggccggcacccactacatcatggccaccgacggcacccagctgcaccacatcgagctgaccgccgacggcagcatcagcttccccagccccgacgccctggccagcggcgccaagtggcccctgctgcagtgcggcggcctgcccagagacggccccgagccccccagccccgccaagacccactgcgtgggcgacagccagagcagcgccagcagcccccccgccaccagcaaggccctgggcctggccgtgccccccagcccccccagcgccgccaccgccgccagcaagaagttcagctgcaagatctgcgccgaggccttccccggcagagccgagatggagagccacaagagagcccacgccggccccggcgccttcaagtgccccgactgccccttcagcgccagacagtggcccgaggtgagagcccacatggcccagcacagcagcctgagaccccaccagtgcagccagtgcagcttcgccagcaagaacaagaaggacctgagaagacacatgctgacccacaccaaggagaagcccttcgcctgccacctgtgcggccagagattcaacagaaacggccacctgaagttccacatccagagactgcacagccccgacggcagaaagagcggcacccccaccgccagagcccccacccagacccccacccagaccatcatcctgaacagcgacgacgagaccctggccaccctgcacaccgccctgcagagcagccacggcgtgctgggccccgagagactgcagcaggccctgagccaggagcacatcatcgtggcccaggagcagaccgtgaccaaccaggaggaggccgcctacatccaggagatcaccaccgccgacggccagaccgtgcagcacctggtgaccagcgacaaccaggtgcagtacatcatcagccaggacggcgtgcagcacctgctgccccaggagtacgtggtggtgcccgagggccaccacatccaggtgcaggagggccagatcacccacatccagtacgagcagggcgcccccttcctgcaggagagccagatccagtacgtgcccgtgagccccggccagcagctggtgacccaggcccagctggaggccgccgcccacagcgccgtgaccgccgtggccgacgccgccatggcccaggcccagggcctgttcggcaccgacgagaccgtgcccgagcacatccagcagctgcagcaccagggcatcgagtacgacgtgatcaccctggccgacgactag

SEQ ID NO: 105975 - DNA, 4029 bp, synthetic construct
  misc_feature 1..4029: note = Description of Artificial Sequence: Synthetic coding sequence
  source 1..4029: mol_type = other DNA
atggaggagaacgaggtggagagcagcagcgacgccgcccccggccccggcagacccgaggagcccagcgagagcggcctgggcgtgggcaccagcgaggccgtgagcgccgacagcagcgacgccgccgccgcccccggccaggccgaggccgacgacagcggcgtgggccagagcagcgacagaggcagcagaagccaggaggaggtgagcgagagcagcagcagcgccgaccccctgcccaacagctacctgcccgacagcagcagcgtgagccacggccccgtggccggcgtgaccggcggcccccccgccctggtgcacagcagcgccctgcccgaccccaacatgctggtgagcgactgcaccgccagcagcagcgacctgggcagcgccatcgacaagatcatcgagagcaccatcggccccgacctgatccagaactgcatcaccgtgaccagcgccgaggacggcggcgccgagaccaccagatacctgatcctgcagggccccgacgacggcgcccccatgaccagccccatgagcagcagcaccctggcccacagcctggccgccatcgaggccctggccgacggccccaccagcaccagcacctgcctggaggcccagggcggccccagcagccccgtgcagctgccccccgccagcggcgccgaggagcccgacctgcagagcctggaggccatgatggaggtggtggtggtgcagcagttcaagtgcaagatgtgccagtacagaagcagcaccaaggccaccctgctgagacacatgagagagagacacttcagacccgtggccgccgccgccgccgccgccggcaagaagggcagactgagaaagtggagcaccagcaccaagagccaggaggaggagggccccgaggaggaggacgacgacgacatcgtggacgccggcgccatcgacgacctggaggaggacagcgactacaaccccgccgaggacgagcccagaggcagacagctgagactgcagagacccacccccagcacccccagacccagaagaagacccggcagacccagaaagctgcccagactggagatcagcgacctgcccgacggcgtggagggcgagcccctggtgagcagccagagcggccagagcccccccgagccccaggaccccgaggcccccagcagcagcggccccggccacctggtggccatgggcaaggtgagcagaacccccgtggaggccggcgtgagccagagcgacgccgagaacgccgcccccagctgccccgacgagcacgacaccctgcccagaagaagaggcagacccagcagaagattcctgggcaagaagtacagaaagtactactacaagagccccaagcccctgctgagacccttcctgtgcagaatctgcggcagcagattcctgagccacgaggacctgagattccacgtgaacagccacgaggccggcgacccccagctgttcaagtgcctgcagtgcagctacagaagcagaagatggagcagcctgaaggagcacatgttcaaccacgtgggcagcaagccctacaagtgcgacgagtgcagctacaccagcgtgtacagaaaggacgtgatcagacacgccgccgtgcacagcagagacagaaagaagagacccgaccccacccccaagctgagcagcttcccctgccccgtgtgcggcagagtgtaccccatgcagaagagactgacccagcacatgaagacccacagcaccgagaagccccacatgtgcgacaagtgcggcaagagcttcaagaagagatacaccttcaagatgcacctgctgacccacatccaggccgtggccaacagaagattcaagtgcgagttctgcgagttcgtgtgcgaggacaagaaggccctgctgaaccaccagctgagccacgtgagcgacaagcccttcaagtgcagcttctgcccctacagaaccttcagagaggacttcctgctgagccacgtggccgtgaagcacaccggcgccaagcccttcgcctgcgagtactgccacttcagcaccagacacaagaagaacctgagactgcacgtgagatgcagacacgccagcagcttcgaggagtggggcagaagacaccccgaggagccccccagcagaagaagacccttcttcagcctgcagcagatcgaggagctgaagcagcagcacagcgccgcccccggccccccccccagcagccccggcccccccgagatcccccccgaggccaccaccttccagagcagcgaggcccccagcctgctgtgcagcgacaccctgggcggcgccaccatcatctaccagcagggcgccgaggagagcaccgccatggccacccagaccgccctggacctgctgctgaacatgagcgcccagagagagctgggcggcaccgccctgcaggtggccgtggtgaagagcgaggacgtggaggccggcctggccagccccggcggccagcccagccccgagggcgccaccccccaggtggtgaccctgcacgtggccgagcccggcggcggcgccgccgccgagagccagctgggcccccccgacctgccccagatcaccctggcccccggccccttcggcggcaccggctacagcgtgatcaccgccccccccatggaggagggcaccagcgcccccggcaccccctacagcgaggagcccgccggcgaggccgcccaggccgtggtggtgagcgacaccctgaaggaggccggcacccactacatcatggccaccgacggcacccagctgcaccacatcgagctgaccgccgacggcagcatcagcttccccagccccgacgccctggccagcggcgccaagtggcccctgctgcagtgcggcggcctgcccagagacggccccgagccccccagccccgccaagacccactgcgtgggcgacagccagagcagcgccagcagcccccccgccaccagcaaggccctgggcctggccgtgccccccagcccccccagcgccgccaccgccgccagcaagaagttcagctgcaagatctgcgccgaggccttccccggcagagccgagatggagagccacaagagagcccacgccggccccggcgccttcaagtgccccgactgccccttcagcgccagacagtggcccgaggtgagagcccacatggcccagcacagcagcctgagaccccaccagtgcagccagtgcagcttcgccagcaagaacaagaaggacctgagaagacacatgctgacccacaccaaggagaagcccttcgcctgccacctgtgcggccagagattcaacagaaacggccacctgaagttccacatccagagactgcacagccccgacggcagaaagagcggcacccccaccgccagagcccccacccagacccccacccagaccatcatcctgaacagcgacgacgagaccctggccaccctgcacaccgccctgcagagcagccacggcgtgctgggccccgagagactgcagcaggccctgagccaggagcacatcatcgtggcccaggagcagaccgtgaccaaccaggaggaggccgcctacatccaggagatcaccaccgccgacggccagaccgtgcagcacctggtgaccagcgacaaccaggtgcagtacatcatcagccaggacggcgtgcagcacctgctgccccaggagtacgtggtggtgcccgagggccaccacatccaggtgcaggagggccagatcacccacatccagtacgagcagggcgcccccttcctgcaggagagccagatccagtacgtgcccgtgagccccggccagcagctggtgacccaggcccagctggaggccgccgcccacagcgccgtgaccgccgtggccgacgccgccatggcccaggcccagggcctgttcggcaccgacgagaccgtgcccgagcacatccagcagctgcagcaccagggcatcgagtacgacgtgatcaccctggccgacgactag

SEQ ID NO: 105976 - DNA, 3564 bp, synthetic construct
  misc_feature 1..3564: note = Description of Artificial Sequence: Synthetic coding sequence
  source 1..3564: mol_type = other DNA
atggccaccagcagcatgcccgagagcgagagaaacgtggccaccaaggccagcggcgcccccatgaccagccccatgagcagcagcaccctggcccacagcctggccgccatcgaggccctggccgacggccccaccagcaccagcacctgcctggaggcccagggcggccccagcagccccgtgcagctgccccccgccagcggcgccgaggagcccgacctgcagagcctggaggccatgatggaggtggtggtggtgcagcagttcaagtgcaagatgtgccagtacagaagcagcaccaaggccaccctgctgagacacatgagagagagacacttcagacccgtggccgccgccgccgccgccgccggcaagaagggcagactgagaaagtggagcaccagcaccaagagccaggaggaggagggccccgaggaggaggacgacgacgacatcgtggacgccggcgccatcgacgacctggaggaggacagcgactacaaccccgccgaggacgagcccagaggcagacagctgagactgcagagacccacccccagcacccccagacccagaagaagacccggcagacccagaaagctgcccagactggagatcagcgacctgcccgacggcgtggagggcgagcccctggtgagcagccagagcggccagagcccccccgagccccaggaccccgaggcccccagcagcagcggccccggccacctggtggccatgggcaaggtgagcagaacccccgtggaggccggcgtgagccagagcgacgccgagaacgccgcccccagctgccccgacgagcacgacaccctgcccagaagaagaggcagacccagcagaagattcctgggcaagaagtacagaaagtactactacaagagccccaagcccctgctgagacccttcctgtgcagaatctgcggcagcagattcctgagccacgaggacctgagattccacgtgaacagccacgaggccggcgacccccagctgttcaagtgcctgcagtgcagctacagaagcagaagatggagcagcctgaaggagcacatgttcaaccacgtgggcagcaagccctacaagtgcgacgagtgcagctacaccagcgtgtacagaaaggacgtgatcagacacgccgccgtgcacagcagagacagaaagaagagacccgaccccacccccaagctgagcagcttcccctgccccgtgtgcggcagagtgtaccccatgcagaagagactgacccagcacatgaagacccacagcaccgagaagccccacatgtgcgacaagtgcggcaagagcttcaagaagagatacaccttcaagatgcacctgctgacccacatccaggccgtggccaacagaagattcaagtgcgagttctgcgagttcgtgtgcgaggacaagaaggccctgctgaaccaccagctgagccacgtgagcgacaagcccttcaagtgcagcttctgcccctacagaaccttcagagaggacttcctgctgagccacgtggccgtgaagcacaccggcgccaagcccttcgcctgcgagtactgccacttcagcaccagacacaagaagaacctgagactgcacgtgagatgcagacacgccagcagcttcgaggagtggggcagaagacaccccgaggagccccccagcagaagaagacccttcttcagcctgcagcagatcgaggagctgaagcagcagcacagcgccgcccccggccccccccccagcagccccggcccccccgagatcccccccgaggccaccaccttccagagcagcgaggcccccagcctgctgtgcagcgacaccctgggcggcgccaccatcatctaccagcagggcgccgaggagagcaccgccatggccacccagaccgccctggacctgctgctgaacatgagcgcccagagagagctgggcggcaccgccctgcaggtggccgtggtgaagagcgaggacgtggaggccggcctggccagccccggcggccagcccagccccgagggcgccaccccccaggtggtgaccctgcacgtggccgagcccggcggcggcgccgccgccgagagccagctgggcccccccgacctgccccagatcaccctggcccccggccccttcggcggcaccggctacagcgtgatcaccgccccccccatggaggagggcaccagcgcccccggcaccccctacagcgaggagcccgccggcgaggccgcccaggccgtggtggtgagcgacaccctgaaggaggccggcacccactacatcatggccaccgacggcacccagctgcaccacatcgagctgaccgccgacggcagcatcagcttccccagccccgacgccctggccagcggcgccaagtggcccctgctgcagtgcggcggcctgcccagagacggccccgagccccccagccccgccaagacccactgcgtgggcgacagccagagcagcgccagcagcccccccgccaccagcaaggccctgggcctggccgtgccccccagcccccccagcgccgccaccgccgccagcaagaagttcagctgcaagatctgcgccgaggccttccccggcagagccgagatggagagccacaagagagcccacgccggccccggcgccttcaagtgccccgactgccccttcagcgccagacagtggcccgaggtgagagcccacatggcccagcacagcagcctgagaccccaccagtgcagccagtgcagcttcgccagcaagaacaagaaggacctgagaagacacatgctgacccacaccaaggagaagcccttcgcctgccacctgtgcggccagagattcaacagaaacggccacctgaagttccacatccagagactgcacagccccgacggcagaaagagcggcacccccaccgccagagcccccacccagacccccacccagaccatcatcctgaacagcgacgacgagaccctggccaccctgcacaccgccctgcagagcagccacggcgtgctgggccccgagagactgcagcaggccctgagccaggagcacatcatcgtggcccaggagcagaccgtgaccaaccaggaggaggccgcctacatccaggagatcaccaccgccgacggccagaccgtgcagcacctggtgaccagcgacaaccaggtgcagtacatcatcagccaggacggcgtgcagcacctgctgccccaggagtacgtggtggtgcccgagggccaccacatccaggtgcaggagggccagatcacccacatccagtacgagcagggcgcccccttcctgcaggagagccagatccagtacgtgcccgtgagccccggccagcagctggtgacccaggcccagctggaggccgccgcccacagcgccgtgaccgccgtggccgacgccgccatggcccaggcccagggcctgttcggcaccgacgagaccgtgcccgagcacatccagcagctgcagcaccagggcatcgagtacgacgtgatcaccctggccgacgactag

SEQ ID NO: 105977 - DNA, 330 bp, synthetic construct
  misc_feature 1..330: note = Description of Artificial Sequence: Synthetic coding sequence
  source 1..330: mol_type = other DNA
atgctggagaactacagcaacctggtgagcgtgggctactgcgtgcacaagcccgaggtgatcttcagactgcagcagggcgaggagccctggaagcaggaggaggagttccccagccagagcttccccgagatgggcttccaccacgtgcccgccggcctgaagctgctgagcagcagcgacccccccgccctggccagccagagcggcagaatcaccggcatgagccacagcatcccccccgtgatgggcagcttcaagttcaccaccagcatcttcacctgcgtgggcctgttcagattcttcttcttctacctgagctggttctag

SEQ ID NO: 105978 - DNA, 417 bp, synthetic construct
  misc_feature 1..417: note = Description of Artificial Sequence: Synthetic coding sequence
  source 1..417: mol_type = other DNA
atgaacaaggtggagcagaagagccaggagagcgtgagcttcaaggacgtgaccgtgggcttcacccaggaggagtggcagcacctggaccccagccagagagccctgtacagagacgtgatgctggagaactacagcaacctggtgagcgtgggctactgcgtgcacaagcccgaggtgatcttcagactgcagcagggcgaggagccctggaagcaggaggaggagttccccagccagagcttccccgaggtgtggaccgccgaccacctgaaggagagaagccaggagaaccagagcaagcacctgtgggaggtggtgttcatcaacaacgagatgctgaccaaggagcagggcgacgtgatcggcatccccttcaacgtggacgcccccgagatgctgatgcccctggactag

SEQ ID NO: 105979 - DNA, 2433 bp, synthetic construct
  misc_feature 1..2433: note = Description of Artificial Sequence: Synthetic coding sequence
  source 1..2433: mol_type = other DNA
atgaacaaggtggagcagaagagccaggagagcgtgagcttcaaggacgtgaccgtgggcttcacccaggaggagtggcagcacctggaccccagccagagagccctgtacagagacgtgatgctggagaactacagcaacctggtgagcgtgggctactgcgtgcacaagcccgaggtgatcttcagactgcagcagggcgaggagccctggaagcaggaggaggagttccccagccagagcttccccgtgtggaccgccgaccacctgaaggagagaagccaggagaaccagagcaagcacctgtgggaggtggtgttcatcaacaacgagatgctgaccaaggagcagggcgacgtgatcggcatccccttcaacgtggacgtgagcagcttccccagcagaaagatgttctgccagtgcgacagctgcggcatgagcttcaacaccgtgagcgagctggtgatcagcaagatcaactacctgggcaagaagagcgacgagttcaacgcctgcggcaagctgctgctgaacatcaagcacgacgagacccacacccaggagaagaacgaggtgctgaagaacagaaacaccctgagccaccacgaggagaccctgcagcacgagaagatccagaccctggagcacaacttcgagtacagcatctgccaggagaccctgctggagaaggccgtgttcaacacccagaagagagagaacgccgaggagaacaactgcgactacaacgagttcggcagaaccctgtgcgacagcagcagcctgctgttccaccagatcagccccagcagagacaaccactacgagttcagcgactgcgagaagttcctgtgcgtgaagagcaccctgagcaagccccacggcgtgagcatgaagcactacgactgcggcgagagcggcaacaacttcagaagaaagctgtgcctgagccacctgcagaagggcgacaagggcgagaagcacttcgagtgcaacgagtgcggcaaggccttctgggagaagagccacctgaccagacaccagagagtgcacaccggccagaagcccttccagtgcaacgagtgcgagaaggccttctgggacaagagcaacctgaccaagcaccagagaagccacaccggcgagaagcccttcgagtgcaacgagtgcggcaaggccttcagccacaagagcgccctgaccctgcaccagagaacccacaccggcgagaagccctaccagtgcaacgcctgcggcaagaccttctgccagaagagcgacctgaccaagcaccagagaacccacaccggcctgaagccctacgagtgctacgagtgcggcaagagcttcagagtgaccagccacctgaaggtgcaccagagaacccacaccggcgagaagcccttcgagtgcctggagtgcggcaagagcttcagcgagaagagcaacctgacccagcaccagagaatccacatcggcgacaagagctacgagtgcaacgcctgcggcaagaccttctaccacaagagcctgctgaccagacaccagatcatccacaccggctggaagccctacgagtgctacgagtgcggcaagaccttctgcctgaagagcgacctgaccgtgcaccagagaacccacaccggccagaagcccttcgcctgccccgagtgcggcaagttcttcagccacaagagcaccctgagccagcactacagaacccacaccggcgagaagccctacgagtgccacgagtgcggcaagatcttctacaacaagagctacctgaccaagcacaacagaacccacaccggcgagaagccctacgagtgcaacgagtgcggcaaggccttctaccagaagagccagctgacccagcaccagagaatccacatcggcgagaagccctacaagtgcaacgagtgcggcaaggccttctgccacaagagcgccctgatcgtgcaccagagaacccacacccaggagaagccctacaagtgcaacgagtgcggcaagagcttctgcgtgaagagcggcctgatcttccacgagagaaagcacaccggcgagaagccctacgagtgcaacgagtgcggcaagttcttcagacacaagagcagcctgaccgtgcaccacagagcccacaccggcgagaagagctgccagtgcaacgagtgcggcaagatcttctacagaaagagcgagctggcccagcaccagagaagccacaccggcgagaagccctacgagtgcaacacctgcagaaagaccttcagccagaagagcaacctgatcgtgcaccagagaagacacatcggcgagaacctgatgaacgagatggacatcagaaacttccagccccaggtgagcctgcacaacgccagcgagtacagccactgcggcgagagccccgacgacatcctgaacgtgcagtag

SEQ ID NO: 105980 - DNA, 2436 bp, synthetic construct
  misc_feature 1..2436: note = Description of Artificial Sequence: Synthetic coding sequence
  source 1..2436: mol_type = other DNA
atgaacaaggtggagcagaagagccaggagagcgtgagcttcaaggacgtgaccgtgggcttcacccaggaggagtggcagcacctggaccccagccagagagccctgtacagagacgtgatgctggagaactacagcaacctggtgagcgtgggctactgcgtgcacaagcccgaggtgatcttcagactgcagcagggcgaggagccctggaagcaggaggaggagttccccagccagagcttccccgaggtgtggaccgccgaccacctgaaggagagaagccaggagaaccagagcaagcacctgtgggaggtggtgttcatcaacaacgagatgctgaccaaggagcagggcgacgtgatcggcatccccttcaacgtggacgtgagcagcttccccagcagaaagatgttctgccagtgcgacagctgcggcatgagcttcaacaccgtgagcgagctggtgatcagcaagatcaactacctgggcaagaagagcgacgagttcaacgcctgcggcaagctgctgctgaacatcaagcacgacgagacccacacccaggagaagaacgaggtgctgaagaacagaaacaccctgagccaccacgaggagaccctgcagcacgagaagatccagaccctggagcacaacttcgagtacagcatctgccaggagaccctgctggagaaggccgtgttcaacacccagaagagagagaacgccgaggagaacaactgcgactacaacgagttcggcagaaccctgtgcgacagcagcagcctgctgttccaccagatcagccccagcagagacaaccactacgagttcagcgactgcgagaagttcctgtgcgtgaagagcaccctgagcaagccccacggcgtgagcatgaagcactacgactgcggcgagagcggcaacaacttcagaagaaagctgtgcctgagccacctgcagaagggcgacaagggcgagaagcacttcgagtgcaacgagtgcggcaaggccttctgggagaagagccacctgaccagacaccagagagtgcacaccggccagaagcccttccagtgcaacgagtgcgagaaggccttctgggacaagagcaacctgaccaagcaccagagaagccacaccggcgagaagcccttcgagtgcaacgagtgcggcaaggccttcagccacaagagcgccctgaccctgcaccagagaacccacaccggcgagaagccctaccagtgcaacgcctgcggcaagaccttctgccagaagagcgacctgaccaagcaccagagaacccacaccggcctgaagccctacgagtgctacgagtgcggcaagagcttcagagtgaccagccacctgaaggtgcaccagagaacccacaccggcgagaagcccttcgagtgcctggagtgcggcaagagcttcagcgagaagagcaacctgacccagcaccagagaatccacatcggcgacaagagctacgagtgcaacgcctgcggcaagaccttctaccacaagagcctgctgaccagacaccagatcatccacaccggctggaagccctacgagtgctacgagtgcggcaagaccttctgcctgaagagcgacctgaccgtgcaccagagaacccacaccggccagaagcccttcgcctgccccgagtgcggcaagttcttcagccacaagagcaccctgagccagcactacagaacccacaccggcgagaagccctacgagtgccacgagtgcggcaagatcttctacaacaagagctacctgaccaagcacaacagaacccacaccggcgagaagccctacgagtgcaacgagtgcggcaaggccttctaccagaagagccagctgacccagcaccagagaatccacatcggcgagaagccctacaagtgcaacgagtgcggcaaggccttctgccacaagagcgccctgatcgtgcaccagagaacccacacccaggagaagccctacaagtgcaacgagtgcggcaagagcttctgcgtgaagagcggcctgatcttccacgagagaaagcacaccggcgagaagccctacgagtgcaacgagtgcggcaagttcttcagacacaagagcagcctgaccgtgcaccacagagcccacaccggcgagaagagctgccagtgcaacgagtgcggcaagatcttctacagaaagagcgagctggcccagcaccagagaagccacaccggcgagaagccctacgagtgcaacacctgcagaaagaccttcagccagaagagcaacctgatcgtgcaccagagaagacacatcggcgagaacctgatgaacgagatggacatcagaaacttccagccccaggtgagcctgcacaacgccagcgagtacagccactgcggcgagagccccgacgacatcctgaacgtgcagtag

SEQ ID NO: 105981 - DNA, 2454 bp, synthetic construct
  misc_feature 1..2454: note = Description of Artificial Sequence: Synthetic coding sequence
  source 1..2454: mol_type = other DNA
atggccaacgccaccagaagaggcagcggcgtggagcagaagagccaggagagcgtgagcttcaaggacgtgaccgtgggcttcacccaggaggagtggcagcacctggaccccagccagagagccctgtacagagacgtgatgctggagaactacagcaacctggtgagcgtgggctactgcgtgcacaagcccgaggtgatcttcagactgcagcagggcgaggagccctggaagcaggaggaggagttccccagccagagcttccccgtgtggaccgccgaccacctgaaggagagaagccaggagaaccagagcaagcacctgtgggaggtggtgttcatcaacaacgagatgctgaccaaggagcagggcgacgtgatcggcatccccttcaacgtggacgtgagcagcttccccagcagaaagatgttctgccagtgcgacagctgcggcatgagcttcaacaccgtgagcgagctggtgatcagcaagatcaactacctgggcaagaagagcgacgagttcaacgcctgcggcaagctgctgctgaacatcaagcacgacgagacccacacccaggagaagaacgaggtgctgaagaacagaaacaccctgagccaccacgaggagaccctgcagcacgagaagatccagaccctggagcacaacttcgagtacagcatctgccaggagaccctgctggagaaggccgtgttcaacacccagaagagagagaacgccgaggagaacaactgcgactacaacgagttcggcagaaccctgtgcgacagcagcagcctgctgttccaccagatcagccccagcagagacaaccactacgagttcagcgactgcgagaagttcctgtgcgtgaagagcaccctgagcaagccccacggcgtgagcatgaagcactacgactgcggcgagagcggcaacaacttcagaagaaagctgtgcctgagccacctgcagaagggcgacaagggcgagaagcacttcgagtgcaacgagtgcggcaaggccttctgggagaagagccacctgaccagacaccagagagtgcacaccggccagaagcccttccagtgcaacgagtgcgagaaggccttctgggacaagagcaacctgaccaagcaccagagaagccacaccggcgagaagcccttcgagtgcaacgagtgcggcaaggccttcagccacaagagcgccctgaccctgcaccagagaacccacaccggcgagaagccctaccagtgcaacgcctgcggcaagaccttctgccagaagagcgacctgaccaagcaccagagaacccacaccggcctgaagccctacgagtgctacgagtgcggcaagagcttcagagtgaccagccacctgaaggtgcaccagagaacccacaccggcgagaagcccttcgagtgcctggagtgcggcaagagcttcagcgagaagagcaacctgacccagcaccagagaatccacatcggcgacaagagctacgagtgcaacgcctgcggcaagaccttctaccacaagagcctgctgaccagacaccagatcatccacaccggctggaagccctacgagtgctacgagtgcggcaagaccttctgcctgaagagcgacctgaccgtgcaccagagaacccacaccggccagaagcccttcgcctgccccgagtgcggcaagttcttcagccacaagagcaccctgagccagcactacagaacccacaccggcgagaagccctacgagtgccacgagtgcggcaagatcttctacaacaagagctacctgaccaagcacaacagaacccacaccggcgagaagccctacgagtgcaacgagtgcggcaaggccttctaccagaagagccagctgacccagcaccagagaatccacatcggcgagaagccctacaagtgcaacgagtgcggcaaggccttctgccacaagagcgccctgatcgtgcaccagagaacccacacccaggagaagccctacaagtgcaacgagtgcggcaagagcttctgcgtgaagagcggcctgatcttccacgagagaaagcacaccggcgagaagccctacgagtgcaacgagtgcggcaagttcttcagacacaagagcagcctgaccgtgcaccacagagcccacaccggcgagaagagctgccagtgcaacgagtgcggcaagatcttctacagaaagagcgagctggcccagcaccagagaagccacaccggcgagaagccctacgagtgcaacacctgcagaaagaccttcagccagaagagcaacctgatcgtgcaccagagaagacacatcggcgagaacctgatgaacgagatggacatcagaaacttccagccccaggtgagcctgcacaacgccagcgagtacagccactgcggcgagagccccgacgacatcctgaacgtgcagtag

SEQ ID NO: 105982 - DNA, 2433 bp, synthetic construct; identical to SEQ ID NO: 105979
  misc_feature 1..2433: note = Description of Artificial Sequence: Synthetic coding sequence
  source 1..2433: mol_type = other DNA

SEQ ID NO: 105983 - DNA, 417 bp, synthetic construct; identical to SEQ ID NO: 105978
  misc_feature 1..417: note = Description of Artificial Sequence: Synthetic coding sequence
  source 1..417: mol_type = other DNA

SEQ ID NO: 105984 - DNA, 2337 bp, synthetic construct
  misc_feature 1..2337: note = Description of Artificial Sequence: Synthetic coding sequence
  source 1..2337: mol_type = other DNA
atgaacaaggtggaccagaagttccagggcagcgtgagcttcaaggacgtgaccgtgggcttcacccaggaggagtggcagcacctggaccccagccagagagccctgtacagagacgtgatgctggagaactacagcaacctggtgagcgtgggctactgcgcccacaagcccgaggtgatcttcagactggagcagggcgaggagccctggagactggaggaggagttccccagccagagcttccccgaggtgtggaccgccgaccacctgaaggagagaagccaggagaaccagagcaagcacctgtgggaggtggtgttcatcaacaacgagatgctgaccaaggagcagggcaacgtgatcggcatccccttcaacatggacgtgagcagcttccccagcagaaagatgttctgccagtacgacagcagaggcatgagcttcaacaccgtgagcgagctggtgatcagcaagatcaactacctgggcaagaagagcgacgagttcaacgcctgcggcaagctgctgctgaacatcaagcacgacgagacccacaccagagagaagaacgaggtgctgaagaacagaaacaccctgagccacagagagaacaccctgcagcacgagaagatccagaccctggaccacaacttcgagtacagcatctgccaggagaccctgctggagaaggccgtgttcaacaccagaaagagagagaacgccgaggagaacaactgcgactacaacgagttcggcagaaccttctgcgacagcagcagcctgctgttccaccagatcccccccagcaaggacagccactacgagttcagcgactgcgagaagttcctgtgcgtgaagagcaccctgagcaagcacgacggcgtgcccgtgaagcactacgactgcggcgagagcggcaacaacttcagaagaaagctgtgcctgagccagctgcagaagggcgacaagggcgagaagcacttcgagtgcaacgagtgcggcaaggccttctgggagaagagccacctgaccagacaccagagagtgcacaccggcgagaagcacttccagtgcaaccagtgcggcaagaccttctgggagaagagcaacctgaccaagcaccagagaagccacaccggcgagaagcccttcgagtgcaacgagtgcggcaaggccttcagccacaagagcgccctgaccctgcaccagagaacccacaccggcgagaagccctaccagtgcaacgcctgcggcaagaccttctaccagaagagcgacctgaccaagcaccagagaacccacaccggccagaagccctacgagtgctacgagtgcggcaagagcttctgcatgaacagccacctgaccgtgcaccagagaacccacaccggcgagaagcccttcgagtgcctggagtgcggcaagagcttctgccagaagagccacctgacccagcaccagagaacccacatcggcgacaagccctacgagtgcaacgcctgcggcaagaccttctaccacaagagcgtgctgaccagacaccagatcatccacaccggcctgaagccctacgagtgctacgagtgcggcaagaccttctgcctgaagagcgacctgaccatccaccagagaacccacaccggcgagaagcccttcgcctgccccgagtgcggcaagttcttcagccacaagagcaccctgagccagcactacagaacccacaccggcgagaagccctacgagtgccacgagtgcggcaagatcttctacaacaagagctacctgaccaagcacaacagaacccacaccggcgagaagccctacgagtgcaacgagtgcggcaagaccttctgccagaagagccagctgacccagcaccagagaatccacatcggcgagaagccctacgagtgcaacgagtgcggcaaggccttctgccacaagagcgccctgatcgtgcaccagagaacccacacccaggagaagccctacaagtgcaacgagtgcggcaagagcttctgcgtgaagagcggcctgatcctgcacgagagaaagcacaccggcgagaagccctacgagtgcaacgagtgcggcaagagcttcagccacaagagcagcctgaccgtgcaccacagagcccacaccggcgagaagagctgccagtgcaacgagtgcggcaagatcttctacagaaagagcgacctggccaagcaccagagaagccacaccggcgagaagccctacgagtgcaacacctgcagaaagaccttcagccagaagagcaacctgatcgtgcaccagagaacccacatcggcgagaagccctacgagtag

SEQ ID NO: 105985 - DNA, 2235 bp, synthetic construct
  misc_feature 1..2235: note = Description of Artificial Sequence: Synthetic coding sequence
  source 1..2235: mol_type = other DNA
atgaacaaggtggaccagaagttccagggcagcgtgagcttcaaggacgtgaccgtgggcttcacccaggaggagtggcagcacctggaccccagccagagagccctgtacagagacgtgatgctggagaactacagcaacctggtgagcgtgggcaccgccgaccacctgaaggagagaagccaggagaaccagagcaagcacctgtgggaggtggtgttcatcaacaacgagatgctgaccaaggagcagggcaacgtgatcggcatccccttcaacatggacgtgagcagcttccccagcagaaagatgttctgccagtacgacagcagaggcatgagcttcaacaccgtgagcgagctggtgatcagcaagatcaactacctgggcaagaagagcgacgagttcaacgcctgcggcaagctgctgctgaacatcaagcacgacgagacccacaccagagagaagaacgaggtgctgaagaacagaaacaccctgagccacagagagaacaccctgcagcacgagaagatccagaccctggaccacaacttcgagtacagcatctgccaggagaccctgctggagaaggccgtgttcaacaccagaaagagagagaacgccgaggagaacaactgcgactacaacgagttcggcagaaccttctgcgacagcagcagcctgctgttccaccagatcccccccagcaaggacagccactacgagttcagcgactgcgagaagttcctgtgcgtgaagagcaccctgagcaagcacgacggcgtgcccgtgaagcactacgactgcggcgagagcggcaacaacttcagaagaaagctgtgcctgagccagctgcagaagggcgacaagggcgagaagcacttcgagtgcaacgagtgcggcaaggccttctgggagaagagccacctgaccagacaccagagagtgcacaccggcgagaagcacttccagtgcaaccagtgcggcaagaccttctgggagaagagcaacctgaccaagcaccagagaagccacaccggcgagaagcccttcgagtgcaacgagtgcggcaaggccttcagccacaagagcgccctgaccctgcaccagagaacccacaccggcgagaagccctaccagtgcaacgcctgcggcaagaccttctaccagaagagcgacctgaccaagcaccagagaacccacaccggccagaagccctacgagtgctacgagtgcggcaagagcttctgcatgaacagccacctgaccgtgcaccagagaacccacaccggcgagaagcccttcgagtgcctggagtgcggcaagagcttctgccagaagagccacctgacccagcaccagagaacccacatcggcgacaagccctacgagtgcaacgcctgcggcaagaccttctaccacaagagcgtgctgaccagacaccagatcatccacaccggcctgaagccctacgagtgctacgagtgcggcaagaccttctgcctgaagagcgacctgaccatccaccagagaacccacaccggcgagaagcccttcgcctgccccgagtgcggcaagttcttcagccacaagagcaccctgagccagcactacagaacccacaccggcgagaagccctacgagtgccacgagtgcggcaagatcttctacaacaagagctacctgaccaagcacaacagaacccacaccggcgagaagccctacgagtgcaacgagtgcggcaagaccttctgccagaagagccagctgacccagcaccagagaatccacatcggcgagaagccctacgagtgcaacgagtgcggcaaggccttctgccacaagagcgccctgatcgtgcaccagagaacccacacccaggagaagccctacaagtgcaacgagtgcggcaagagcttctgcgtgaagagcggcctgatcctgcacgagagaaagcacaccggcgagaagccctacgagtgcaacgagtgcggcaagagcttcagccacaagagcagcctgaccgtgcaccacagagcccacaccggcgagaagagctgccagtgcaacgagtgcggcaagatcttctacagaaagagcgacctggccaagcaccagagaagccacaccggcgagaagccctacgagtgcaacacctgcagaaagaccttcagccagaagagcaacctgatcgtgcaccagagaacccacatcggcgagaagccctacgagtag

SEQ ID NO: 105986 - DNA, 1683 bp, synthetic construct
  misc_feature 1..1683: note = Description of Artificial Sequence: Synthetic coding sequence
  source 1..1683: mol_type = other DNA
atgctgctgctgctgagcgaccagctgctgctgaccgccctgagaaagcccaacccccaggccatggccgccctgttcctgagcgcccccccccaggccgaggtgaccttcgaggacgtggccgtgtacctgagcagagaggagtggggcagactgggccccgcccagagaggcctgtacagagacgtgatgctggagacctacggcaacctggtgagcctgggcgtgggccccgccggccccaagcccggcgtgatcagccagctggagagaggcgacgagccctgggtgctggacgtgcagggcaccagcggcaaggagcacctgagagtgaacagccccgccctgggcaccagaaccgagtacaaggagctgaccagccaggagaccttcggcgaggaggacccccagggcagcgagcccgtggaggcctgcgaccacatcagcaagagcgagggcagcctggagaagctggtggagcagagaggccccagagccgtgaccctgaccaacggcgagagcagcagagagagcggcggcaacctgagactgctgagcagacccgtgcccgaccagagaccccacaagtgcgacatctgcgagcagagcttcgagcagagaagctacctgaacaaccacaagagagtgcacagaagcaagaagaccaacaccgtgagaaacagcggcgagatcttcagcgccaacctggtggtgaaggaggaccagaagatccccaccggcaagaagctgcactactgcagctactgcggcaagaccttcagatacagcgccaacctggtgaagcaccagagactgcacaccgaggagaagccctacaagtgcgacgagtgcggcaaggccttcagccagagctgcgagttcatcaaccacagaagaatgcacagcggcgagatcccctacagatgcgacgagtgcggcaagaccttcaccagaagacccaacctgatgaagcaccagagaatccacaccggcgagaagccctacaagtgcggcgagtgcggcaagcacttcagcgcctacagcagcctgatctaccaccagagaatccacaccggcgagaagccctacaagtgcaacgactgcggcaaggccttcagcgacggcagcatcctgatcagacacagaagaacccacaccggcgagaagcccttcgagtgcaaggagtgcggcaagggcttcacccagagcagcaacctgatccagcaccagagaatccacaccggcgagaagccctacaagtgcaacgagtgcgagaaggccttcatccagaagaccaagctggtggagcaccagagaagccacaccggcgagaagccctacgagtgcaacgactgcggcaaggtgttcagccagagcacccacctgatccagcaccagagaatccacaccggcgagaagccctacaagtgcagcgagtgcggcaaggccttccacaacagcagcagactgatccaccaccagagactgcaccacggcgagaagccctacagatgcagcgactgcaagaaggccttcagccagagcacctacctgatccagcacagaagaatccacaccggcgagaagccctacaagtgcagcgagtgcggcaaggccttcagacacagcagcaacatgtgccagcaccagagaatccacctgagagaggacttcagcatgtag

SEQ ID NO: 105987 - DNA, 1620 bp, synthetic construct
  misc_feature 1..1620: note = Description of Artificial Sequence: Synthetic coding sequence
  source 1..1620: mol_type = other DNA
atggccgccctgttcctgagcgcccccccccaggccgaggtgaccttcgaggacgtggccgtgtacctgagcagagaggagtggggcagactgggccccgcccagagaggcctgtacagagacgtgatgctggagacctacggcaacctggtgagcctgggcgtgggccccgccggccccaagcccggcgtgatcagccagctggagagaggcgacgagccctgggtgctggacgtgcagggcaccagcggcaaggagcacctgagagtgaacagccccgccctgggcaccagaaccgagtacaaggagctgaccagccaggagaccttcggcgaggaggacccccagggcagcgagcccgtggaggcctgcgaccacatcagcaagagcgagggcagcctggagaagctggtggagcagagaggccccagagccgtgaccctgaccaacggcgagagcagcagagagagcggcggcaacctgagactgctgagcagacccgtgcccgaccagagaccccacaagtgcgacatctgcgagcagagcttcgagcagagaagctacctgaacaaccacaagagagtgcacagaagcaagaagaccaacaccgtgagaaacagcggcgagatcttcagcgccaacctggtggtgaaggaggaccagaagatccccaccggcaagaagctgcactactgcagctactgcggcaagaccttcagatacagcgccaacctggtgaagcaccagagactgcacaccgaggagaagccctacaagtgcgacgagtgcggcaaggccttcagccagagctgcgagttcatcaaccacagaagaatgcacagcggcgagatcccctacagatgcgacgagtgcggcaagaccttcaccagaagacccaacctgatgaagcaccagagaatccacaccggcgagaagccctacaagtgcggcgagtgcggcaagcacttcagcgcctacagcagcctgatctaccaccagagaatccacaccggcgagaagccctacaagtgcaacgactgcggcaaggccttcagcgacggcagcatcctgatcagacacagaagaacccacaccggcgagaagcccttcgagtgcaaggagtgcggcaagggcttcacccagagcagcaacctgatccagcaccagagaatccacaccggcgagaagccctacaagtgcaacgagtgcgagaaggccttcatccagaagaccaagctggtggagcaccagagaagccacaccggcgagaagccctacgagtgcaacgactgcggcaaggtgttcagccagagcacccacctgatccagcaccagagaatccacaccggcgagaagccctacaagtgcagcgagtgcggcaaggccttccacaacagcagcagactgatccaccaccagagactgcaccacggcgagaagccctacagatgcagcgactgcaagaaggccttcagccagagcacctacctgatccagcacagaagaatccacaccggcgagaagccctacaagtgcagcgagtgcggcaaggccttcagacacagcagcaacatgtgccagcaccagagaatccacctgagagaggacttcagcatgtag

SEQ ID NO: 105988 - DNA, 1560 bp, synthetic construct
  misc_feature 1..1560: note = Description of Artificial Sequence: Synthetic coding sequence
  source 1..1560: mol_type = other DNA
atgtacctgatcagagagagccacgccagcggcagcagcagcgtgaccagcagctgcagcctgcccagcgagagccccaccctgagacagtggagaccctgcagctgcctgccccaccccagacccggcgtgatcagccagctggagagaggcgacgagccctgggtgctggacgtgcagggcaccagcggcaaggagcacctgagagtgaacagccccgccctgggcaccagaaccgagtacaaggagctgaccagccaggagaccttcggcgaggaggacccccagggcagcgagcccgtggaggcctgcgaccacatcagcaagagcgagggcagcctggagaagctggtggagcagagaggccccagagccgtgaccctgaccaacggcgagagcagcagagagagcggcggcaacctgagactgctgagcagacccgtgcccgaccagagaccccacaagtgcgacatctgcgagcagagcttcgagcagagaagctacctgaacaaccacaagagagtgcacagaagcaagaagaccaacaccgtgagaaacagcggcgagatcttcagcgccaacctggtggtgaaggaggaccagaagatccccaccggcaagaagctgcactactgcagctactgcggcaagaccttcagatacagcgccaacctggtgaagcaccagagactgcacaccgaggagaagccctacaagtgcgacgagtgcggcaaggccttcagccagagctgcgagttcatcaaccacagaagaatgcacagcggcgagatcccctacagatgcgacgagtgcggcaagaccttcaccagaagacccaacctgatgaagcaccagagaatccacaccggcgagaagccctacaagtgcggcgagtgcggcaagcacttcagcgcctacagcagcctgatctaccaccagagaatccacaccggcgagaagccctacaagtgcaacgactgcggcaaggccttcagcgacggcagcatcctgatcagacacagaagaacccacaccggcgagaagcccttcgagtgcaaggagtgcggcaagggcttcacccagagcagcaacctgatccagcaccagagaatccacaccggcgagaagccctacaagtgcaacgagtgcgagaaggccttcatccagaagaccaagctggtggagcaccagagaagccacaccggcgagaagccctacgagtgcaacgactgcggcaaggtgttcagccagagcacccacctgatccagcaccagagaatccacaccggcgagaagccctacaagtgcagcgagtgcggcaaggccttccacaacagcagcagactgatccaccaccagagactgcaccacggcgagaagccctacagatgcagcgactgcaagaaggccttcagccagagcacctacctgatccagcacagaagaatccacaccggcgagaagccctacaagtgcagcgagtgcggcaaggccttcagacacagcagcaacatgtgccagcaccagagaatccacctgagagaggacttcagcatgtag

SEQ ID NO: 105989 - DNA, 1584 bp, synthetic construct
  misc_feature 1..1584: note = Description of Artificial Sequence: Synthetic coding sequence
  source 1..1584: mol_type = other DNA
atgaccgccgagctgagagaggccatggccctggccccctggggccccgtgaaggtgaagaaggaggaggaggaggaggagaacttccccggccaggccagcagccagcaggtgcacagcgagaacatcaaggtgtgggcccccgtgcagggcctgcagaccggcctggacggcagcgaggaggaggagaagggccagaacatcagctgggacatggccgtggtgctgaaggccacccaggaggcccccgccgccagcaccctgggcagctacagcctgcccggcaccctggccaagagcgagatcctggagacccacggcaccatgaacttcctgggcgccgagaccaagaacctgcagctgctggtgcccaagaccgagatctgcgaggaggccgagaagcccctgatcatcagcgagagaatccagaaggccgacccccagggccccgagctgggcgaggcctgcgagaagggcaacatgctgaagagacagagaatcaagagagagaagaaggacttcagacaggtgatcgtgaacgactgccacctgcccgagagcttcaaggaggaggagaaccagaagtgcaagaagagcggcggcaagtacagcctgaacagcggcgccgtgaagaaccccaagacccagctgggccagaagcccttcacctgcagcgtgtgcggcaagggcttcagccagagcgccaacctggtggtgcaccagagaatccacaccggcgagaagcccttcgagtgccacgagtgcggcaaggccttcatccagagcgccaacctggtggtgcaccagagaatccacaccggccagaagccctacgtgtgcagcaagtgcggcaaggccttcacccagagcagcaacctgaccgtgcaccagaagatccacagcctggagaagaccttcaagtgcaacgagtgcgagaaggccttcagctacagcagccagctggccagacaccagaaggtgcacatcaccgagaagtgctacgagtgcaacgagtgcggcaagaccttcaccagaagcagcaacctgatcgtgcaccagagaatccacaccggcgagaagcccttcgcctgcaacgactgcggcaaggccttcacccagagcgccaacctgatcgtgcaccagagaagccacaccggcgagaagccctacgagtgcaaggagtgcggcaaggccttcagctgcttcagccacctgatcgtgcaccagagaatccacaccgccgagaagccctacgactgcagcgagtgcggcaaggccttcagccagctgagctgcctgatcgtgcaccagagaatccacagcggcgacctgccctacgtgtgcaacgagtgcggcaaggccttcacctgcagcagctacctgctgatccaccagagaatccacaacggcgagaagccctacacctgcaacgagtgcggcaaggccttcagacagagaagcagcctgaccgtgcaccagagaacccacaccggcgagaagccctacgagtgcgagaagtgcggcgccgccttcatcagcaacagccacctgatgagacaccacagaacccacctggtggagtag

SEQ ID NO: 105990 - DNA, 405 bp, synthetic construct
  misc_feature 1..405: note = Description of Artificial Sequence: Synthetic coding sequence
  source 1..405: mol_type = other DNA
atgaccgccgagctgagagaggccatggccctggccccctggggccccgtgaaggtgaagaaggaggaggaggaggaggagaacttccccggccaggccagcagccagcaggtgcacagcgagaacatcaaggtgtgggcccccgtgcagggcctgcagaccggcctggacggcagcgaggaggaggagaagggccagaacatcagctgggacatggccgtggtgctgaaggccacccaggaggcccccgccgccagcaccctgggcagctacagcctgcccggcaccctggccaagagcgagatcctggagacccacggcaccatgaacttcctgggcgccgagaccaagaacctgcagctgctggtgcccaagaccgagatctgcgaggaggccgagaagtag

SEQ ID NO: 105991 - DNA, 339 bp, synthetic construct
  misc_feature 1..339: note = Description of Artificial Sequence: Synthetic coding sequence
  source 1..339: mol_type = other DNA
atgaccgccgagctgagagaggccatggccctggccccctggggccccgtgaaggtgaagaaggaggaggaggaggaggagaacttccccggccaggccagcagccagcaggtgcacagcgagaacatcaaggtgtgggcccccgtgcagggcctgcagaccggcctggacggcagcgaggaggaggagaagggccagaacatcagctgggacatggccgtggtgctgaaggccacccaggaggcccccgccgccagcaccctgggcagctacagcctgcccggcaccctggccaagagcgagatcctggagacccacggcaccatgaacttcctgtag

SEQ ID NO: 105992 - DNA, 1104 bp, synthetic construct
  misc_feature 1..1104: note = Description of Artificial Sequence: Synthetic coding sequence
  source 1..1104: mol_type = other DNA
atgctgaagagacagagaatcaagagagagaagaaggacttcagacaggtgatcgtgaacgactgccacctgcccgagagcttcaaggaggaggagaaccagaagtgcaagaagagcggcggcaagtacagcctgaacagcggcgccgtgaagaaccccaagacccagctgggccagaagcccttcacctgcagcgtgtgcggcaagggcttcagccagagcgccaacctggtggtgcaccagagaatccacaccggcgagaagcccttcgagtgccacgagtgcggcaaggccttcatccagagcgccaacctggtggtgcaccagagaatccacaccggccagaagccctacgtgtgcagcaagtgcggcaaggccttcacccagagcagcaacctgaccgtgcaccagaagatccacagcctggagaagaccttcaagtgcaacgagtgcgagaaggccttcagctacagcagccagctggccagacaccagaaggtgcacatcaccgagaagtgctacgagtgcaacgagtgcggcaagaccttcaccagaagcagcaacctgatcgtgcaccagagaatccacaccggcgagaagcccttcgcctgcaacgactgcggcaaggccttcacccagagcgccaacctgatcgtgcaccagagaagccacaccggcgagaagccctacgagtgcaaggagtgcggcaaggccttcagctgcttcagccacctgatcgtgcaccagagaatccacaccgccgagaagccctacgactgcagcgagtgcggcaaggccttcagccagctgagctgcctgatcgtgcaccagagaatccacagcggcgacctgccctacgtgtgcaacgagtgcggcaaggccttcacctgcagcagctacctgctgatccaccagagaatccacaacggcgagaagccctacacctgcaacgagtgcggcaaggccttcagacagagaagcagcctgaccgtgcaccagagaacccacaccggcgagaagccctacgagtgcgagaagtgcggcgccgccttcatcagcaacagccacctgatgagacaccacagaacccacctggtggagtag

SEQ ID NO: 105993 - DNA, 981 bp, synthetic construct
  misc_feature 1..981: note = Description of Artificial Sequence: Synthetic coding sequence
  source 1..981: mol_type = other DNA
atggacctgaccgccatctacgagagcctgctgagcctgagccccgacgtgcccgtgcccagcgaccacggcggcaccgagagcagccccggctggggcagcagcggcccctggagcctgagccccagcgacagcagccccagcggcgtgaccagcagactgcccggcagaagcaccagcctggtggagggcagaagctgcggctgggtgccccccccccccggcttcgcccccctggcccccagactgggccccgagctgagccccagccccaccagccccaccgccaccagcaccacccccagcagatacaagaccgagctgtgcagaaccttcagcgagagcggcagatgcagatacggcgccaagtgccagttcgcccacggcctgggcgagctgagacaggccaacagacaccccaagtacaagaccgagctgtgccacaagttctacctgcagggcagatgcccctacggcagcagatgccacttcatccacaaccccagcgaggacctggccgcccccggccacccccccgtgctgagacagagcatcagcttcagcggcctgcccagcggcagaagaaccagcccccccccccccggcctggccggccccagcctgagcagcagcagcttcagccccagcagcagcccccccccccccggcgacctgcccctgagccccagcgccttcagcgccgcccccggcacccccctggccagaagagaccccacccccgtgtgctgccccagctgcagaagagccacccccatcagcgtgtggggccccctgggcggcctggtgagaacccccagcgtgcagagcctgggcagcgaccccgacgagtacgccagcagcggcagcagcctgggcggcagcgacagccccgtgttcgaggccggcgtgttcgcccccccccagcccgtggccgcccccagaagactgcccatcttcaacagaatcagcgtgagcgagtag

SEQ ID NO: 105994 - DNA, 1017 bp, synthetic construct
  misc_feature 1..1017: note = Description of Artificial Sequence: Synthetic coding sequence
  source 1..1017: mol_type = other DNA
atgaccaccaccctggtgagcgccaccatcttcgacctgagcgaggtgctgtgcaagggcaacaagatgctgaactacagcgcccccagcgccggcggctgcctgctggacagaaaggccgtgggcacccccgccggcggcggcttccccagaagacacagcgtgaccctgcccagcagcaagttccaccagaaccagctgctgagcagcctgaagggcgagcccgcccccgccctgagcagcagagacagcagattcagagacagaagcttcagcgagggcggcgagagactgctgcccacccagaagcagcccggcggcggccaggtgaacagcagcagatacaagaccgagctgtgcagacccttcgaggagaacggcgcctgcaagtacggcgacaagtgccagttcgcccacggcatccacgagctgagaagcctgaccagacaccccaagtacaagaccgagctgtgcagaaccttccacaccatcggcttctgcccctacggccccagatgccacttcatccacaacgccgaggagagaagagccctggccggcgccagagacctgagcgccgacagacccagactgcagcacagcttcagcttcgccggcttccccagcgccgccgccaccgccgccgccaccggcctgctggacagccccaccagcatcacccccccccccatcctgagcgccgacgacctgctgggcagccccaccctgcccgacggcaccaacaaccccttcgccttcagcagccaggagctggccagcctgttcgcccccagcatgggcctgcccggcggcggcagccccaccaccttcctgttcagacccatgagcgagagcccccacatgttcgacagcccccccagcccccaggacagcctgagcgaccaggagggctacctgagcagcagcagcagcagccacagcggcagcgacagccccaccctggacaacagcagaagactgcccatcttcagcagactgagcatcagcgacgactag

SEQ ID NO: 105995 - DNA, 501 bp, synthetic construct
  misc_feature 1..501: note = Description of Artificial Sequence: Synthetic coding sequence
  source 1..501: mol_type = other DNA
atgaacacctacaccagaagcgccagcttcacccccaagaccttcaccttccccctggcccagaacagaaccagccaccccaccaccaccagcaagctgaagtacctgggcagacccagccccagaagagacgccctgcaggccaacggcgagggccccgaggtgggccccggcaccgaggagcccgcccacagactgcccgtgggcagcggcagcgccggcgaggccgccgccagcctgggcaccgccagagtgagaagcggcagagccgagtgcaccgccaagctggccggcgacggccacgccagactggccagcgccttcctgcacagaagagccgccctgcccccccccctgggcacctgcagacccagactgggcgagggcggcagcgcccccgccctgggccccagccccagaagaggcagaagagtgagcgagggcctgagagacagcctgccccccctgggcagcctgaccctgggcaagagccccaagtag

SEQ ID NO: 105996 - DNA, 966 bp, synthetic construct
  misc_feature 1..966: note = Description of Artificial Sequence: Synthetic coding sequence
  source 1..966: mol_type = other DNA
atgaccaccaccctggtgagcgccaccatcttcgacctgagcgaggtgctgtgcaagggcaacaagatgctgaactacagcgcccccagcgccggcggctgcctgctggacagaaaggccgtgggcacccccgccggcggcggcttccccagaagacacagcgtgaccctgcccagcagcaagttccaccagaaccagctgctgagcagcctgaagggcgagcccgcccccgccctgagcagcagagacagcagattcagagacagaagcttcagcgagggcggcgagagactgctgcccacccagaagcagcccttcgaggagaacggcgcctgcaagtacggcgacaagtgccagttcgcccacggcatccacgagctgagaagcctgaccagacaccccaagtacaagaccgagctgtgcagaaccttccacaccatcggcttctgcccctacggccccagatgccacttcatccacaacgccgaggagagaagagccctggccggcgccagagacctgagcgccgacagacccagactgcagcacagcttcagcttcgccggcttccccagcgccgccgccaccgccgccgccaccggcctgctggacagccccaccagcatcacccccccccccatcctgagcgccgacgacctgctgggcagccccaccctgcccgacggcaccaacaaccccttcgccttcagcagccaggagctggccagcctgttcgcccccagcatgggcctgcccggcggcggcagccccaccaccttcctgttcagacccatgagcgagagcccccacatgttcgacagcccccccagcccccaggacagcctgagcgaccaggagggctacctgagcagcagcagcagcagccacagcggcagcgacagccccaccctggacaacagcagaagactgcccatcttcagcagactgagcatcagcgacgactag

SEQ ID NO: 105997 - DNA, 1017 bp, synthetic construct; identical to SEQ ID NO: 105994
  misc_feature 1..1017: note = Description of Artificial Sequence: Synthetic coding sequence
  source 1..1017: mol_type = other DNA

SEQ ID NO: 105998 - DNA, 1485 bp, synthetic construct
  misc_feature 1..1485: note = Description of Artificial Sequence: Synthetic coding sequence
  source 1..1485: mol_type = other DNA
atgagcaccaccctgctgagcgccttctacgacgtggacttcctgtgcaagaccgagaagagcctggccaacctgaacctgaacaacatgctggacaagaaggccgtgggcacccccgtggccgccgcccccagcagcggcttcgcccccggcttcctgagaagacacagcgccagcaacctgcacgccctggcccaccccgcccccagccccggcagctgcagccccaagttccccggcgccgccaacggcagcagctgcggcagcgccgccgccggcggccccaccagctacggcaccctgaaggagcccagcggcggcggcggcaccgccctgctgaacaaggagaacaagttcagagacagaagcttcagcgagaacggcgacagaagccagcacctgctgcacctgcagcagcagcagaagggcggcggcggcagccagatcaacagcaccagatacaagaccgagctgtgcagacccttcgaggagagcggcacctgcaagtacggcgagaagtgccagttcgcccacggcttccacgagctgagaagcctgaccagacaccccaagtacaagaccgagctgtgcagaaccttccacaccatcggcttctgcccctacggccccagatgccacttcatccacaacgccgacgagagaagacccgcccccagcggcggcgccagcggcgacctgagagccttcggcaccagagacgccctgcacctgggcttccccagagagcccagacccaagctgcaccacagcctgagcttcagcggcttccccagcggccaccaccagccccccggcggcctggagagccccctgctgctggacagccccaccagcagaaccccccccccccccagctgcagcagcgccagcagctgcagcagcagcgccagcagctgcagcagcgccagcgccgccagcacccccagcggcgcccccacctgctgcgccagcgccgccgccgccgccgccgccgccctgctgtacggcaccggcggcgccgaggacctgctggcccccggcgccccctgcgccgcctgcagcagcgccagctgcgccaacaacgccttcgccttcggccccgagctgagcagcctgatcacccccctggccatccagacccacaacttcgccgccgtggccgccgccgcctactacagaagccagcagcagcagcagcagcagggcctggccccccccgcccagccccccgccccccccagcgccaccctgcccgccggcgccgccgccccccccagcccccccttcagcttccagctgcccagaagactgagcgacagccccgtgttcgacgccccccccagcccccccgacagcctgagcgacagagacagctacctgagcggcagcctgagcagcggcagcctgagcggcagcgagagccccagcctggaccccggcagaagactgcccatcttcagcagactgagcatcagcgacgactag

SEQ ID NO: 105999 - DNA, 651 bp, synthetic construct
  misc_feature 1..651: note = Description of Artificial Sequence: Synthetic coding sequence
  source 1..651: mol_type = other DNA
atgagcgccctgggccagatcaccatcaccgtgagcagatgctggaacaccgagagaaaccagaccgacaagaacccctgcctgcacggcgcctacctgcagctgagagagaccgtgaagaacaagagcacccacctgaagaagcccctgatgaagcaggcccccccctggaaggaccacctgaccttccagcccctgcaccccgccgagagaaagacccaggtgtggagatggcagagcggcaacagcagcgacctggagaccaccagcagcgccagcccctggcccaccggcagcaacagagacgtggtgctgaacaccctggccgagagctgctgcggcctgagcgagctgatcaccgcccccccctacgccggcgtgagcatccagggcttcagccagatctgggtgctgttccccttctgcggcggcaccttccaccacaacgagaaggacgtgctgggcctgcaggacttcgagagagagagcgtgagcaccagccagagcagaaacatcagcctgctgaccctgggccagctgcagaactgcgtgatcggcaagctgaccatcatcgacctgctgaccgagcacctgctgggcgtgagacacggcgtgatctgcttcccctggggcctgcccagcagcagctag

SEQ ID NO: 106000 - DNA, 1224 bp, synthetic construct
  misc_feature 1..1224: note = Description of Artificial Sequence: Synthetic coding sequence
  source 1..1224: mol_type = other DNA
atgcagcagaaggccttcgaggagagcagatacccctggcaggagagcttcgagaacgtggccgtgtgcctgcccctgagatgccccagatgcggcgaccacaccagattcagaagcctgagcagcctgagagcccacctggagttcagccacagctacgaggagagaaccctgctgaccaagtgcagcctgttccccagcctgaaggacaccgacctggtgaccagcagcgagctgctgaagcccggcaagctgcagagcagcggcaacgtggtgaagcagaagcccagctacgtgaacctgtacagcatcagccacgagcacagcaaggacagaaagcccttcgaggtggtggccgagagacccgtgagctacgtgcagacctacaccgccatggacctgcacgccgacagcctggacggcaccagaagcggccccggcctgcccaccagcgacaccaaggccagcttcgaggcccacgtgagagagaagttcaacagaatggtggaggccgtggacagaaccatcgagaagagaatcgacaagctgaccaaggagctggcccagaagaccgccgagctgctggaggtgagagccgccttcgtgcagctgacccagaagaagcaggaggtgcagagaagagagagagccctgaacagacaggtggacgtggccgtggagatgatcgccgtgctgagacagagactgaccgagagcgaggaggagctgctgagaaaggaggaggaggtggtgaccttcaaccacttcctggaggccgccgccgagaaggaggtgcagggcaaggccagactgcaggacttcatcgagaacctgctgcagagagtggagctggccgagaagcagctggagtactaccagagccagcaggccagcggcttcgtgagagacctgagcggccacgtgctgaccgacatcagcagcaacagaaagcccaagtgcctgagcagaggccacccccacagcgtgtgcaaccaccccgacctgaaggcccacttccaccccaagggcagaaaccacctgaagaaggccaaggacgacagagccagcatgcagcccgccaaggccatccacgagcaggccgagagcagcagagacctgtgcagaccccccaagaagggcgagctgctgggcttcggcagaaagggcaacatcagacccaagatggccaagaagaagcccaccgccatcgtgaacatcatctag

SEQ ID NO: 106001 - DNA, 1002 bp, synthetic construct
  misc_feature 1..1002: note = Description of Artificial Sequence: Synthetic coding sequence
  source 1..1002: mol_type = other DNA
atgcagcagaaggccttcgaggagagcagatacccctggcaggagagcttcgagaacgtggccgtgtgcctgcccctgagatgccccagatgcggcgaccacaccagattcagaagcctgagcagcctgagagcccacctggagttcagccacagctacgaggagagaaccctgctgaccaagtgcagcctgttccccagcctgaaggacaccgacctggtgaccagcagcgagctgctgaagcccggcaagctgcagagcagcggcaacgtggtgaagcagaagcccagctacgtgaacctgtacagcatcagccacgagcacagcaaggacagaaagcccttcgaggtggtggccgagagacccgtgagctacgtgcagacctacaccgccatggacctgcacgccgacagcctggacggcaccagaagcggccccggcctgcccaccagcgacaccaaggccagcttcgaggcccacgtgagagagaagttcaacagaatggtggaggccgtggacagaaccatcgagaagagaatcgacaagctgaccaaggagctggcccagaagaccgccgagctgctggaggtgagagccgccttcgtgcagctgacccagaagaagcaggaggtgcagagaagagagagagccctgaacagacaggtggacgtggccgtggagatgatcgccgtgctgagacagagactgaccgagagcgaggaggagctgctgagaaaggaggaggaggtggtgaccttcaaccacttcctggaggccgccgccgagaaggaggtgcagggcaaggccagactgcaggacttcatcgagaacctgctgcagagagtggagctggccgagaagcagctggagtactaccagagccagcaggccagcggcttcgtgagagacctgagcggccacgtgagctggaagggcgccggcgaggccagactggtgtgccagaacgacctggagctggaggagagcgccatcgtggagtag

SEQ ID NO: 106002 - DNA, 1389 bp, synthetic construct
  misc_feature 1..1389: note = Description of Artificial Sequence: Synthetic coding sequence
  source 1..1389: mol_type = other DNA
atgcagcagaaggccttcgaggagagcagatacccctggcaggagagcttcgagaacgtggccgtgtgcctgcccctgagatgccccagatgcggcgaccacaccagattcagaagcctgagcagcctgagagcccacctggagttcagccacagctacgaggagagaaccctgctgaccaagtgcagcctgttccccagcctgaaggacaccgacctggtgaccagcagcgagctgctgaagcccggcaagctgcagagcagcggcaacgtggtgaagcagaagcccagctacgtgaacctgtacagcatcagccacgagcacagcaaggacagaaagcccttcgaggtggtggccgagagacccgtgagctacgtgcagacctacaccgccatggacctgcacgccgacagcctggacggcaccagaagcggccccggcctgcccaccagcgacaccaaggccagcttcgaggcccacgtgagagagaagttcaacagaatggtggaggccgtggacagaaccatcgagaagagaatcgacaagctgaccaaggagctggcccagaagaccgccgagctgctggaggtgagagccgccttcgtgcagctgacccagaagaagcaggaggtgcagagaagagagagagccctgaacagacaggtggacgtggccgtggagatgatcgccgtgctgagacagagactgaccgagagcgaggaggagctgctgagaaaggaggaggaggtggtgaccttcaaccacttcctggaggccgccgccgagaaggaggtgcagggcaaggccagactgcaggacttcatcgagaacctgctgcagagagtggagctggccgagaagcagctggagtactaccagagccagcaggccagcggcttcgtgagagacctgagcggccacgtgagctggaagggcgccggcgaggccagactggtgtgccagaacgacctggagctggagatcttcggccacatcaaccaccacctgagcggcctgaaggacagccactgcctggtgttcctgcaggccccccccgtgccctggatcatcctggccagcttcctgtggatcctgggcaacccctggaccagcagcaccgccaccgccggcttcagccagatctgggtgctgttccccttctgcggcggcaccttccaccacaacgagaaggacgtgctgggcctgcaggacttcgagagagagagcgtgagcaccagccagagcagaaacatcagcctgctgaccctgggccagctgcagaactgcgtgatcggcaagctgaccatcatcgacctgctgaccgagcacctgctgggcgtgagacacggcgtgatctgcttcccctggggcctgcccagcagcagctag

SEQ ID NO: 106003 - DNA, 162 bp, synthetic construct
  misc_feature 1..162: note = Description of Artificial Sequence: Synthetic coding sequence
  source 1..162: mol_type = other DNA
atgcagcagaaggccttcgaggagagcagatacccctggcaggagagcttcgagaacgtggccgtgtgcctgcccctgagatgccccagatgcggcgaccacaccagattcagaagcctgagcagcctgagagcccacctggagttcagccacagctactag

SEQ ID NO: 106004 - DNA, 1893 bp, synthetic construct
  misc_feature 1..1893: note = Description of Artificial Sequence: Synthetic coding sequence
  source 1..1893: mol_type = other DNA
atgagcgtgagcagcggcgtgcagatcctgaccaagcccgagaccgtggacagaagaagaagcgccgagaccaccaaggaggccggcagacccctggagatggccgtgagcgagcccgaggccagcgccgccgagtggaagcagctggaccccgcccagagcaacctgtacaacgacgtgatgctggagaactactgcaaccaggccagcatgggctgccaggcccccaagcccgacatgatcagcaagctggagaagggcgaggccccctggctgggcaagggcaagagacccagccagggctgccccagcaagatcgccagacccaagcagaaggagaccgacggcaaggtgcagaaggacgacgaccagctggagaacatccagaagagccagaacaagctgctgagagaggtggccgtgaagaagaagacccaggccaagaagaacggcagcgactgcggcagcctgggcaagaagaacaacctgcacaagaagcacgtgcccagcaagaagagactgctgaagttcgagagctgcggcaagatcctgaagcagaacctggacctgcccgaccacagcagaaactgcgtgaagagaaagagcgacgccgccaaggagcacaagaagagcttcaaccacagcctgagcgacaccagaaagggcaagaagcagaccggcaagaagcacgagaagctgagcagccacagcagcagcgacaagtgcaacaagaccggcaagaagcacgacaagctgtgctgccacagcagcagccacatcaagcaggacaagatccagaccggcgagaagcacgagaagagccccagcctgagcagcagcaccaagcacgagaagccccaggcctgcgtgaagccctacgagtgcaaccagtgcggcaaggtgctgagccacaagcagggcctgatcgaccaccagagagtgcacaccggcgagaagccctacgagtgcaacgagtgcggcatcgccttcagccagaagagccacctggtggtgcaccagagaacccacaccggcgagaagccctacgagtgcatccagtgcggcaaggcccacggccacaagcacgccctgaccgaccacctgagaatccacaccggcgagaagccctacgagtgcgccgagtgcggcaagaccttcagacacagcagcaacctgatccagcacgtgagaagccacaccggcgagaagccctacgagtgcaaggagtgcggcaagagcttcagatacaacagcagcctgaccgagcacgtgagaacccacaccggcgagatcccctacgagtgcaacgagtgcggcaaggccttcaagtacagcagcagcctgaccaagcacatgagaatccacaccggcgagaagcccttcgagtgcaacgagtgcggcaaggccttcagcaagaagagccacctgatcatccaccagagaacccacaccaaggagaagccctacaagtgcaacgagtgcggcaaggccttcggccacagcagcagcctgacctaccacatgagaacccacaccggcgagagccccttcgagtgcaaccagtgcggcaagggcttcaagcagatcgagggcctgacccagcaccagagagtgcacaccggcgagaagccctacgagtgcaacgagtgcggcaaggccttcagccagaagagccacctgatcgtgcaccagagaacccacaccggcgagaagccctacgagtgcaacgagtgcgagaaggccttcaacgccaagagccagctggtgatccaccagagaagccacaccggcgagaagccctacgagtgcaacgagtgcggcaagaccttcaagcagaacgccagcctgaccaagcacgtgaagacccacagcgaggacaagagccacgagtag

SEQ ID NO: 106005 - DNA, 1938 bp, synthetic construct
  misc_feature 1..1938: note = Description of Artificial Sequence: Synthetic coding sequence
  source 1..1938: mol_type = other DNA
atgagcgtgagcagcggcgtgcagatcctgaccaagcccgagaccgtggacagaagaagaagcgccgagaccaccaaggaggccggcagacccctggagatggccgtgagcgagcccgaggccagcgccgccgtgagcgtgaccttcaagcacgtgaccatggccttcacccagaaggagtggaagcagctggaccccgcccagagcaacctgtacaacgacgtgatgctggagaactactgcaaccaggccagcatgggctgccaggcccccaagcccgacatgatcagcaagctggagaagggcgaggccccctggctgggcaagggcaagagacccagccagggctgccccagcaagatcgccagacccaagcagaaggagaccgacggcaaggtgcagaaggacgacgaccagctggagaacatccagaagagccagaacaagctgctgagagaggtggccgtgaagaagaagacccaggccaagaagaacggcagcgactgcggcagcctgggcaagaagaacaacctgcacaagaagcacgtgcccagcaagaagagactgctgaagttcgagagctgcggcaagatcctgaagcagaacctggacctgcccgaccacagcagaaactgcgtgaagagaaagagcgacgccgccaaggagcacaagaagagcttcaaccacagcctgagcgacaccagaaagggcaagaagcagaccggcaagaagcacgagaagctgagcagccacagcagcagcgacaagtgcaacaagaccggcaagaagcacgacaagctgtgctgccacagcagcagccacatcaagcaggacaagatccagaccggcgagaagcacgagaagagccccagcctgagcagcagcaccaagcacgagaagccccaggcctgcgtgaagccctacgagtgcaaccagtgcggcaaggtgctgagccacaagcagggcctgatcgaccaccagagagtgcacaccggcgagaagccctacgagtgcaacgagtgcggcatcgccttcagccagaagagccacctggtggtgcaccagagaacccacaccggcgagaagccctacgagtgcatccagtgcggcaaggcccacggccacaagcacgccctgaccgaccacctgagaatccacaccggcgagaagccctacgagtgcgccgagtgcggcaagaccttcagacacagcagcaacctgatccagcacgtgagaagccacaccggcgagaagccctacgagtgcaaggagtgcggcaagagcttcagatacaacagcagcctgaccgagcacgtgagaacccacaccggcgagatcccctacgagtgcaacgagtgcggcaaggccttcaagtacagcagcagcctgaccaagcacatgagaatccacaccggcgagaagcccttcgagtgcaacgagtgcggcaaggccttcagcaagaagagccacctgatcatccaccagagaacccacaccaaggagaagccctacaagtgcaacgagtgcggcaaggccttcggccacagcagcagcctgacctaccacatgagaacccacaccggcgagagccccttcgagtgcaaccagtgcggcaagggcttcaagcagatcgagggcctgacccagcaccagagagtgcacaccggcgagaagccctacgagtgcaacgagtgcggcaaggccttcagccagaagagccacctgatcgtgcaccagagaacccacaccggcgagaagccctacgagtgcaacgagtgcgagaaggccttcaacgccaagagccagctggtgatccaccagagaagccacaccggcgagaagccctacgagtgcaacgagtgcggcaagaccttcaagcagaacgccagcctgaccaagcacgtgaagacccacagcgaggacaagagccacgagtag

SEQ ID NO: 106006 - DNA, 1896 bp, synthetic construct
  misc_feature 1..1896: note = Description of Artificial Sequence: Synthetic coding sequence
  source 1..1896: mol_type = other DNA
atgagcgtgagcagcggcgtgcagatcctgaccaagcccgagaccgtggacagaagaagaagcgccgagaccaccaaggaggccggcagacccctggagatggccgtgagcgagcccgaggccagcgccgccaaggagtggaagcagctggaccccgcccagagcaacctgtacaacgacgtgatgctggagaactactgcaaccaggccagcatgggctgccaggcccccaagcccgacatgatcagcaagctggagaagggcgaggccccctggctgggcaagggcaagagacccagccagggctgccccagcaagatcgccagacccaagcagaaggagaccgacggcaaggtgcagaaggacgacgaccagctggagaacatccagaagagccagaacaagctgctgagagaggtggccgtgaagaagaagacccaggccaagaagaacggcagcgactgcggcagcctgggcaagaagaacaacctgcacaagaagcacgtgcccagcaagaagagactgctgaagttcgagagctgcggcaagatcctgaagcagaacctggacctgcccgaccacagcagaaactgcgtgaagagaaagagcgacgccgccaaggagcacaagaagagcttcaaccacagcctgagcgacaccagaaagggcaagaagcagaccggcaagaagcacgagaagctgagcagccacagcagcagcgacaagtgcaacaagaccggcaagaagcacgacaagctgtgctgccacagcagcagccacatcaagcaggacaagatccagaccggcgagaagcacgagaagagccccagcctgagcagcagcaccaagcacgagaagccccaggcctgcgtgaagccctacgagtgcaaccagtgcggcaaggtgctgagccacaagcagggcctgatcgaccaccagagagtgcacaccggcgagaagccctacgagtgcaacgagtgcggcatcgccttcagccagaagagccacctggtggtgcaccagagaacccacaccggcgagaagccctacgagtgcatccagtgcggcaaggcccacggccacaagcacgccctgaccgaccacctgagaatccacaccggcgagaagccctacgagtgcgccgagtgcggcaagaccttcagacacagcagcaacctgatccagcacgtgagaagccacaccggcgagaagccctacgagtgcaaggagtgcggcaagagcttcagatacaacagcagcctgaccgagcacgtgagaacccacaccggcgagatcccctacgagtgcaacgagtgcggcaaggccttcaagtacagcagcagcctgaccaagcacatgagaatccacaccggcgagaagcccttcgagtgcaacgagtgcggcaaggccttcagcaagaagagccacctgatcatccaccagagaacccacaccaaggagaagccctacaagtgcaacgagtgcggcaaggccttcggccacagcagcagcctgacctaccacatgagaacccacaccggcgagagccccttcgagtgcaaccagtgcggcaagggcttcaagcagatcgagggcctgacccagcaccagagagtgcacaccggcgagaagccctacgagtgcaacgagtgcggcaaggccttcagccagaagagccacctgatcgtgcaccagagaacccacaccggcgagaagccctacgagtgcaacgagtgcgagaaggccttcaacgccaagagccagctggtgatccaccagagaagccacaccggcgagaagccctacgagtgcaacgagtgcggcaagaccttcaagcagaacgccagcctgaccaagcacgtgaagacccacagcgaggacaagagccacgagtag

SEQ ID NO: 106007 - DNA, 1653 bp, synthetic construct
  misc_feature 1..1653: note = Description of Artificial Sequence: Synthetic coding sequence
  source 1..1653: mol_type = other DNA
atgcccctgcagggcagcgtgagcttcaaggacgtgaccgtggacttcacccaggaggagtggcagcagctggaccccgcccagaaggccctgtacagagacgtgatgctggagaactactgccacttcgtgagcgtgggcttccacatggccaagcccgacatgatcagaaagctggagcagggcgaggagctgtggacccagagaatcttccccagctacagctacctggaggaggacggcaagaccgaggacgtgctggtgaagttcaaggagtaccaggacagacacagcagacccctgatcttcatcaaccacaagaagctgatcaaggagagaagcaacatctacggcaagaccttcaccctgggcaagaacagaatcagcaagaccatcctgtgcgagtacaagcccgacggcaaggtgctgaagaacatcagcgagctggtgatcagaaacatcagccccatcaaggagaagttcggcgacagcaccggctgggagaagagcctgctgaacaccaagcacgagaagatccaccccgccgtgaacctgcacaagcagaccgagagagtgctgagcggcaagcaggagctgatccagcaccagaaggtgcaggcccccgagcagcccttcgaccacaacgagtgcgagaagagcttcctgatgaagggcatgctgttcacccacaccagagcccacagaggcgagagaaccttcgagtacaacaaggacggcatcgccttcatcgagaagagcagcctgagcgtgcaccccagcaacctgatggagaagaagcccagcgcctacaacaagtacggcaagttcctgtgcagaaagcccgtgttcatcatgccccagagaccccagaccgaggagaagcccttccactgcccctactgcggcaacaacttcagaagaaagagctacctgatcgagcaccagagaatccacaccggcgagaagccctacgtgtgcaaccagtgcggcaaggccttcagacagaagaccgccctgaccctgcacgagaagacccacatcgagggcaagcccttcatctgcatcgactgcggcaagagcttcagacagaaggccaccctgaccagacaccacaagacccacaccggcgagaaggcctacgagtgcccccagtgcggcagcgccttcagaaagaagagctacctgatcgaccaccagagaacccacaccggcgagaagccctaccagtgcaacgagtgcggcaaggccttcatccagaagaccaccctgaccgtgcaccagagaacccacaccggcgagaagccctacatctgcaacgagtgcggcaagagcttctgccagaagaccaccctgaccctgcaccagagaatccacaccggcgagaagccctacatctgcaacgagtgcggcaagagcttcagacagaaggccatcctgaccgtgcaccacagaatccacaccggcgagaagagcaacggctgcccccagtgcggcaaggccttcagcagaaagagcaacctgatcagacaccagaagacccacaccggcgagaagccctacgagtgcaagcagtgcggcaagttcttcagctgcaagagcaacctgatcgtgcaccagaagacccacaaggtggagaccaccggcatccagtag

SEQ ID NO: 106008 - DNA, 1650 bp, synthetic construct
  misc_feature 1..1650: note = Description of Artificial Sequence: Synthetic coding sequence
  source 1..1650: mol_type = other DNA
atgagccagggcagcgtgagcttcaaggacgtgaccgtggacttcacccaggaggagtggcagcagctggaccccgcccagaaggccctgtacagagacgtgatgctggagaactactgccacttcgtgagcgtgggcttccacatggccaagcccgacatgatcagaaagctggagcagggcgaggagctgtggacccagagaatcttccccagctacagctacctggaggaggacggcaagaccgaggacgtgctggtgaagttcaaggagtaccaggacagacacagcagacccctgatcttcatcaaccacaagaagctgatcaaggagagaagcaacatctacggcaagaccttcaccctgggcaagaacagaatcagcaagaccatcctgtgcgagtacaagcccgacggcaaggtgctgaagaacatcagcgagctggtgatcagaaacatcagccccatcaaggagaagttcggcgacagcaccggctgggagaagagcctgctgaacaccaagcacgagaagatccaccccgccgtgaacctgcacaagcagaccgagagagtgctgagcggcaagcaggagctgatccagcaccagaaggtgcaggcccccgagcagcccttcgaccacaacgagtgcgagaagagcttcctgatgaagggcatgctgttcacccacaccagagcccacagaggcgagagaaccttcgagtacaacaaggacggcatcgccttcatcgagaagagcagcctgagcgtgcaccccagcaacctgatggagaagaagcccagcgcctacaacaagtacggcaagttcctgtgcagaaagcccgtgttcatcatgccccagagaccccagaccgaggagaagcccttccactgcccctactgcggcaacaacttcagaagaaagagctacctgatcgagcaccagagaatccacaccggcgagaagccctacgtgtgcaaccagtgcggcaaggccttcagacagaagaccgccctgaccctgcacgagaagacccacatcgagggcaagcccttcatctgcatcgactgcggcaagagcttcagacagaaggccaccctgaccagacaccacaagacccacaccggcgagaaggcctacgagtgcccccagtgcggcagcgccttcagaaagaagagctacctgatcgaccaccagagaacccacaccggcgagaagccctaccagtgcaacgagtgcggcaaggccttcatccagaagaccaccctgaccgtgcaccagagaacccacaccggcgagaagccctacatctgcaacgagtgcggcaagagcttctgccagaagaccaccctgaccctgcaccagagaatccacaccggcgagaagccctacatctgcaacgagtgcggcaagagcttcagacagaaggccatcctgaccgtgcaccacagaatccacaccggcgagaagagcaacggctgcccccagtgcggcaaggccttcagcagaaagagcaacctgatcagacaccagaagacccacaccggcgagaagccctacgagtgcaagcagtgcggcaagttcttcagctgcaagagcaacctgatcgtgcaccagaagacccacaaggtggagaccaccggcatccagtag

SEQ ID NO: 106009 - DNA, 1503 bp, synthetic construct
  misc_feature 1..1503: note = Description of Artificial Sequence: Synthetic coding sequence
  source 1..1503: mol_type = other DNA
atggaggagagccacttcaacagcaacccctacttctggcccagcatccccaccgtgagcggccagatcgagaacaccatgttcatcaacaagatgaaggaccagctgctgcccgagaagggctgcggcctggcccccccccactaccccaccctgctgaccgtgcccgccagcgtgagcctgcccagcggcatcagcatggacaccgagagcaagagcgaccagctgaccccccacagccaggccagcgtgacccagaacatcaccgtggtgcccgtgcccagcaccggcctgatgaccgccggccccggcctggtgatcaccagccccagcggcagcctggtgaccaccgccagcagcgcccagaccttccccatcagcgcccccatgatcgtgagcgccctgccccccggcagccaggccctgcaggtggtgcccgacctgagcaagaaggtggccagcaccctgaccgaggagggcggcggcggcggcggcggcggcggcagcgtggcccccaagccccccagaggcagaaagaagaagagaatgctggagagcggcctgcccgagatgaacgacccctacgtgctgagccccgaggacgacgacgaccaccagaaggacggcaagacctacagatgcagaatgtgcagcctgaccttctacagcaagagcgagatgcagatccacagcaagagccacaccgagaccaagccccacaagtgcccccactgcagcaagaccttcgccaacagcagctacctggcccagcacatcagaatccacagcggcgccaagccctacagctgcaacttctgcgagaagagcttcagacagctgagccacctgcagcagcacaccagaatccacaccggcgacagaccctacaagtgcgcccaccccggctgcgagaaggccttcacccagctgagcaacctgcagagccacagaagacagcacaacaaggacaagcccttcaagtgccacaactgccacagagcctacaccgacgccgccagcctggaggtgcacctgagcacccacaccgtgaagcacgccaaggtgtacacctgcaccatctgcagcagagcctacaccagcgagacctacctgatgaagcacatgagaaagcacaacccccccgacctgcagcagcaggtgcaggccgccgccgccgccgccgccgtggcccaggcccaggcccaggcccaggcccaggcccaggcccaggcccaggcccaggcccaggcccaggccagccaggccagccagcagcagcagcagcagcagcagcagcagcagcagcagcagcagcagccccccccccacttccagagccccggcgccgccccccagggcggcggcggcggcgacagcaaccccaacccccccccccagtgcagcttcgacctgaccccctacaagaccgccgagcaccacaaggacatctgcctgaccgtgaccaccagcaccatccaggtggagcacctggccagcagctag

SEQ ID NO: 106010 - DNA, 1734 bp, synthetic construct
  misc_feature 1..1734: note = Description of Artificial Sequence: Synthetic coding sequence
  source 1..1734: mol_type = other DNA
atggaggagagccacttcaacagcaacccctacttctggcccagcatccccaccgtgagcggccagatcgagaacaccatgttcatcaacaagatgaaggaccagctgctgcccgagaagggctgcggcctggcccccccccactaccccaccctgctgaccgtgcccgccagcgtgagcctgcccagcggcatcagcatggacaccgagagcaagagcgaccagctgaccccccacagccaggccagcgtgacccagaacatcaccgtggtgcccgtgcccagcaccggcctgatgaccgccggcgtgagctgcagccagagatggagaagagagggcagccagagcagaggccccggcctggtgatcaccagccccagcggcagcctggtgaccaccgccagcagcgcccagaccttccccatcagcgcccccatgatcgtgagcgccctgccccccggcagccaggccctgcaggtggtgcccgacctgagcaagaaggtggccagcaccctgaccgaggagggcggcggcggcggcggcggcggcggcagcgtggcccccaagccccccagaggcagaaagaagaagagaatgctggagagcggcctgcccgagatgaacgacccctacgtgctgagccccgaggacgacgacgaccaccagaaggacggcaagacctacagatgcagaatgtgcagcctgaccttctacagcaagagcgagatgcagatccacagcaagagccacaccgagaccaagccccacaagtgcccccactgcagcaagaccttcgccaacagcagctacctggcccagcacatcagaatccacagcggcgccaagccctacagctgcaacttctgcgagaagagcttcagacagctgagccacctgcagcagcacaccagaatccacagcaagatgcacaccgagaccatcaagccccacaagtgcccccactgcagcaagaccttcgccaacaccagctacctggcccagcacctgagaatccacagcggcgccaagccctacaactgcagctactgccagaaggccttcagacagctgagccacctgcagcagcacaccagaatccacaccggcgacagaccctacaagtgcgcccaccccggctgcgagaaggccttcacccagctgagcaacctgcagagccacagaagacagcacaacaaggacaagcccttcaagtgccacaactgccacagagcctacaccgacgccgccagcctggaggtgcacctgagcacccacaccgtgaagcacgccaaggtgtacacctgcaccatctgcagcagagcctacaccagcgagacctacctgatgaagcacatgagaaagcacaacccccccgacctgcagcagcaggtgcaggccgccgccgccgccgccgccgtggcccaggcccaggcccaggcccaggcccaggcccaggcccaggcccaggcccaggcccaggcccaggccagccaggccagccagcagcagcagcagcagcagcagcagcagcagcagcagcagcagcagccccccccccacttccagagccccggcgccgccccccagggcggcggcggcggcgacagcaaccccaacccccccccccagtgcagcttcgacctgaccccctacaagaccgccgagcaccacaaggacatctgcctgaccgtgaccaccagcaccatccaggtggagcacctggccagcagctag

SEQ ID NO: 106011 - DNA, 1551 bp, synthetic construct
  misc_feature 1..1551: note = Description of Artificial Sequence: Synthetic coding sequence
  source 1..1551: mol_type = other DNA
atggaggagagccacttcaacagcaacccctacttctggcccagcatccccaccgtgagcggccagatcgagaacaccatgttcatcaacaagatgaaggaccagctgctgcccgagaagggctgcggcctggcccccccccactaccccaccctgctgaccgtgcccgccagcgtgagcctgcccagcggcatcagcatggacaccgagagcaagagcgaccagctgaccccccacagccaggccagcgtgacccagaacatcaccgtggtgcccgtgcccagcaccggcctgatgaccgccggcgtgagctgcagccagagatggagaagagagggcagccagagcagaggccccggcctggtgatcaccagccccagcggcagcctggtgaccaccgccagcagcgcccagaccttccccatcagcgcccccatgatcgtgagcgccctgccccccggcagccaggccctgcaggtggtgcccgacctgagcaagaaggtggccagcaccctgaccgaggagggcggcggcggcggcggcggcggcggcagcgtggcccccaagccccccagaggcagaaagaagaagagaatgctggagagcggcctgcccgagatgaacgacccctacgtgctgagccccgaggacgacgacgaccaccagaaggacggcaagacctacagatgcagaatgtgcagcctgaccttctacagcaagagcgagatgcagatccacagcaagagccacaccgagaccaagccccacaagtgcccccactgcagcaagaccttcgccaacagcagctacctggcccagcacatcagaatccacagcggcgccaagccctacagctgcaacttctgcgagaagagcttcagacagctgagccacctgcagcagcacaccagaatccacaccggcgacagaccctacaagtgcgcccaccccggctgcgagaaggccttcacccagctgagcaacctgcagagccacagaagacagcacaacaaggacaagcccttcaagtgccacaactgccacagagcctacaccgacgccgccagcctggaggtgcacctgagcacccacaccgtgaagcacgccaaggtgtacacctgcaccatctgcagcagagcctacaccagcgagacctacctgatgaagcacatgagaaagcacaacccccccgacctgcagcagcaggtgcaggccgccgccgccgccgccgccgtggcccaggcccaggcccaggcccaggcccaggcccaggcccaggcccaggcccaggcccaggcccaggccagccaggccagccagcagcagcagcagcagcagcagcagcagcagcagcagcagcagcagccccccccccacttccagagccccggcgccgccccccagggcggcggcggcggcgacagcaaccccaacccccccccccagtgcagcttcgacctgaccccctacaagaccgccgagcaccacaaggacatctgcctgaccgtgaccaccagcaccatccaggtggagcacctggccagcagctag

SEQ ID NO: 106012 - DNA, 1551 bp, synthetic construct; identical to SEQ ID NO: 106011
  misc_feature 1..1551: note = Description of Artificial Sequence: Synthetic coding sequence
  source 1..1551: mol_type = other DNA

SEQ ID NO: 106013 - DNA, 1734 bp, synthetic construct; identical to SEQ ID NO: 106010
  misc_feature 1..1734: note = Description of Artificial Sequence: Synthetic coding sequence
  source 1..1734: mol_type = other DNA

SEQ ID NO: 106014 - DNA, 1008 bp, synthetic construct
  misc_feature 1..1008: note = Description of Artificial Sequence: Synthetic coding sequence
  source 1..1008: mol_type = other DNA
atggaggagagccacttcaacagcaacccctacttctggcccagcatccccaccgtgagcggccagatcgagaacaccatgttcatcaacaagatgaaggaccagctgctgcccgagaagggctgcggcctggcccccccccactaccccaccctgctgaccgtgcccgccagcgtgagcctgcccagcggcatcagcatggacaccgagagcaagagcgaccagctgaccccccacagccaggccagcgtgacccagaacatcaccgtggtgcccgtgcccagcaccggcctgatgaccgccggcgtgagctgcagccagagatggagaagagagggcagccagagcagaggccccggcctggtgatcaccagccccagcggcagcctggtgaccaccgccagcagcgcccagaccttccccatcagcgcccccatgatcgtgagcgccctgccccccggcagccaggccctgcaggtggtgcccgacctgagcaagaaggtggccagcaccctgaccgaggagggcggcggcggcggcggcggcggcggcagcgtggcccccaagccccccagaggcagaaagaagaagagaatgctggagagcggcctgcccgagatgaacgacccctacgtgctgagccccgaggacgacgacgaccaccagaaggacggcaagacctacagaagcgagggcaactgcggcaccggcaacggccagagcctgggcctgatggacagcgtgcccggcagcaccaccaacctgctgtgcgaccccggctgcagaatgtgcagcctgaccttctacagcaagagcgagatgcagatccacagcaagagccacaccgagaccaagccccacaagtgcccccactgcagcaagaccttcgccaacagcagctacctggcccagcacatcagaatccacagcggcgccaagccctacagctgcaacttctgcgagaagagcttcagacagctgagccacctgcagcagcacaccagatag

SEQ ID NO: 106015 - DNA, 834 bp, synthetic construct
  misc_feature 1..834: note = Description of Artificial Sequence: Synthetic coding sequence
  source 1..834: mol_type = other DNA
atggaggagagccacttcaacagcaacccctacttctggcccagcatccccaccgtgagcggccagatcgagaacaccatgttcatcaacaagatgaaggaccagctgctgcccgagaagggctgcggcctggcccccccccactaccccaccctgctgaccgtgcccgccagcgtgagcctgcccagcggcatcagcatggacaccgagagcaagagcgaccagctgaccccccacagccaggccagcgtgacccagaacatcaccgtggtgcccgtgcccagcaccggcctgatgaccgccggccccggcctggtgatcaccagccccagcggcagcctggtgaccaccgccagcagcgcccagaccttccccatcagcgcccccatgatcgtgagcgccctgccccccggcagccaggccctgcaggtggtgcccgacctgagcaagaaggtggccagcaccctgaccgaggagggcggcggcggcggcggcggcggcggcagcgtggcccccaagccccccagaggcagaaagaagaagagaatgctggagagcggcctgcccgagatgaacgacccctacgtgctgagccccgaggacgacgacgaccaccagaaggacggcaagacctacagatgcagaatgtgcagcctgaccttctacagcaagagcgagatgcagatccacagcaagagccacaccgagaccaagccccacaagtgcccccactgcagcaagaccttcgccaacagcagctacctggcccagcacatcagaatccacagcggcgccaagccctacagctgcaacttctgcgagaagagcttctag

SEQ ID NO: 106016 - DNA, 1386 bp, synthetic construct
  misc_feature 1..1386: note = Description of Artificial Sequence: Synthetic coding sequence
  source 1..1386: mol_type = other DNA
atggaggagagccacttcaacagcaacccctacttctggcccagcatccccaccgtgagcggccagatcgagaacaccatgttcatcaacaagatgaaggaccagctgctgcccgagaagggctgcggcctggcccccccccactaccccaccctgctgaccgtgcccgccagcgtgagcctgcccagcggcatcagcatggacaccgagagcaagagcgaccagctgaccccccacagccaggccagcgtgacccagaacatcaccgtggtgcccgtgcccagcaccggcctgatgaccgccgccctgcaggtggtgcccgacctgagcaagaaggtggccagcaccctgaccgaggagggcggcggcggcggcggcggcggcggcagcgtggcccccaagccccccagaggcagaaagaagaagagaatgctggagagcggcctgcccgagatgaacgacccctacgtgctgagccccgaggacgacgacgaccaccagaaggacggcaagacctacagatgcagaatgtgcagcctgaccttctacagcaagagcgagatgcagatccacagcaagagccacaccgagaccaagccccacaagtgcccccactgcagcaagaccttcgccaacagcagctacctggcccagcacatcagaatccacagcggcgccaagccctacagctgcaacttctgcgagaagagcttcagacagctgagccacctgcagcagcacaccagaatccacaccggcgacagaccctacaagtgcgcccaccccggctgcgagaaggccttcacccagctgagcaacctgcagagccacagaagacagcacaacaaggacaagcccttcaagtgccacaactgccacagagcctacaccgacgccgccagcctggaggtgcacctgagcacccacaccgtgaagcacgccaaggtgtacacctgcaccatctgcagcagagcctacaccagcgagacctacctgatgaagcacatgagaaagcacaacccccccgacctgcagcagcaggtgcaggccgccgccgccgccgccgccgtggcccaggcccaggcccaggcccaggcccaggcccaggcccaggcccaggcccaggcccaggcccaggccagccaggccagccagcagcagcagcagcagcagcagcagcagcagcagcagcagcagcagccccccccccacttccagagccccggcgccgccccccagggcggcggcggcggcgacagcaaccccaacccccccccccagtgcagcttcgacctgaccccctacaagaccgccgagcaccacaaggacatctgcctgaccgtgaccaccagcaccatccaggtggagcacctggccagcagctag

SEQ ID NO: 106017 - DNA, 1161 bp, synthetic construct
  misc_feature 1..1161: note = Description of Artificial Sequence: Synthetic coding sequence
  source 1..1161: mol_type = other DNA
atgatcctgggcagcctgagcagagccggccccctgcccctgctgagacagccccccatcatgcagccccccctggacctgaagcagatcctgcccttccccctggagcccgcccccaccctgggcctgttcagcaactacagcaccatggaccccgtgcagaaggccgtgctgagccacaccttcggcggccccctgctgaagaccaagagacccgtgatcagctgcaacatctgccagatcagattcaacagccagagccaggccgaggcccactacaagggcaacagacacgccagaagagtgaagggcatcgaggccgccaagaccagaggcagagagcccggcgtgagagagcccggcgaccccgccccccccggcagcacccccaccaacggcgacggcgtggcccccagacccgtgagcatggagaacggcctgggccccgcccccggcagccccgagaagcagcccggcagccccagcccccccagcatccccgagaccggccagggcgtgaccaagggcgagggcggcacccccgcccccgccagcctgcccggcggcagcaaggaggaggaggagaaggccaagagactgctgtactgcgccctgtgcaaggtggccgtgaacagcctgagccagctggaggcccacaacaagggcaccaagcacaagaccatcctggaggccagaagcggcctgggccccatcaaggcctaccccagactgggcccccccacccccggcgagcccgaggcccccgcccaggacagaaccttccactgcgagatctgcaacgtgaaggtgaacagcgaggtgcagctgaagcagcacatcagcagcagaagacacagagacggcgtggccggcaagcccaaccccctgctgagcagacacaagaagagcagaggcgccggcgagctggccggcaccctgaccttcagcaaggagctgcccaagagcctggccggcggcctgctgcccagccccctggccgtggccgccgtgatggccgccgccgccggcagccccctgagcctgagacccgcccccgccgcccccctgctgcagggcccccccatcacccaccccctgctgcaccccgcccccggccccatcagaaccgcccacggccccatcctgttcagcccctactag

SEQ ID NO: 106018 - DNA, 918 bp, synthetic construct
  misc_feature 1..918: note = Description of Artificial Sequence: Synthetic coding sequence
  source 1..918: mol_type = other DNA
atgatcctgggcagcctgagcagagccggccccctgcccctgctgagacagccccccatcatgcagccccccctggacctgaagcagatcctgcccttccccctggagcccgcccccaccctgggcctgttcagcaactacagcaccatggaccccgtgcagaaggccgtgctgagccacaccttcggcggccccctgctgaagaccaagagacccgtgatcagctgcaacatctgccagatcagattcaacagccagagccaggccgaggcccactacaagggcaacagacacgccagaagagtgaagggcatcgaggccgccaagaccagaggcagagagcccggcgtgagagagcccggcgaccccgccccccccggcagcacccccaccaacggcgacggcgtggcccccagacccggcaccaagcacaagaccatcctggaggccagaagcggcctgggccccatcaaggcctaccccagactgggcccccccacccccggcgagcccgaggcccccgcccaggacagaaccttccactgcgagatctgcaacgtgaaggtgaacagcgaggtgcagctgaagcagcacatcagcagcagaagacacagagacggcgtggccggcaagcccaaccccctgctgagcagacacaagaagagcagaggcgccggcgagctggccggcaccctgaccttcagcaaggagctgcccaagagcctggccggcggcctgctgcccagccccctggccgtggccgccgtgatggccgccgccgccggcagccccctgagcctgagacccgcccccgccgcccccctgctgcagggcccccccatcacccaccccctgctgcaccccgcccccggccccatcagaaccgcccacggccccatcctgttcagcccctactag

SEQ ID NO: 106019 - DNA, 1101 bp, synthetic construct
  misc_feature 1..1101: note = Description of Artificial Sequence: Synthetic coding sequence
  source 1..1101: mol_type = other DNA
atgcagccccccctggacctgaagcagatcctgcccttccccctggagcccgcccccaccctgggcctgttcagcaactacagcaccatggaccccgtgcagaaggccgtgctgagccacaccttcggcggccccctgctgaagaccaagagacccgtgatcagctgcaacatctgccagatcagattcaacagccagagccaggccgaggcccactacaagggcaacagacacgccagaagagtgaagggcatcgaggccgccaagaccagaggcagagagcccggcgtgagagagcccggcgaccccgccccccccggcagcacccccaccaacggcgacggcgtggcccccagacccgtgagcatggagaacggcctgggccccgcccccggcagccccgagaagcagcccggcagccccagcccccccagcatccccgagaccggccagggcgtgaccaagggcgagggcggcacccccgcccccgccagcctgcccggcggcagcaaggaggaggaggagaaggccaagagactgctgtactgcgccctgtgcaaggtggccgtgaacagcctgagccagctggaggcccacaacaagggcaccaagcacaagaccatcctggaggccagaagcggcctgggccccatcaaggcctaccccagactgggcccccccacccccggcgagcccgaggcccccgcccaggacagaaccttccactgcgagatctgcaacgtgaaggtgaacagcgaggtgcagctgaagcagcacatcagcagcagaagacacagagacggcgtggccggcaagcccaaccccctgctgagcagacacaagaagagcagaggcgccggcgagctggccggcaccctgaccttcagcaaggagctgcccaagagcctggccggcggcctgctgcccagccccctggccgtggccgccgtgatggccgccgccgccggcagccccctgagcctgagacccgcccccgccgcccccctgctgcagggcccccccatcacccaccccctgctgcaccccgcccccggccccatcagaaccgcccacggccccatcctgttcagcccctactag

SEQ ID NO: 106020 - DNA, 699 bp, synthetic construct
  misc_feature 1..699: note = Description of Artificial Sequence: Synthetic coding sequence
  source 1..699: mol_type = other DNA
atgcagccccccctggacctgaagcagatcctgcccttccccctggagcccgcccccaccctgggcctgttcagcaactacagcaccatggaccccgtgcagaaggccgtgctgagccacaccttcggcggccccctgctgaagaccaagagacccgtgatcagctgcaacatctgccagatcagattcaacagccagagccaggccgaggcccactacaagggcaacagacacgccagaagagtgaagggcatcgaggccgccaagaccagaggcagagagcccggcgtgagagagcccggcgaccccgccccccccggcagcacccccaccaacggcgacggcgtggcccccagacccgtgagcatggagaacggcctgggccccgcccccggcagccccgagaagcagcccggcagccccagcccccccagcatccccgagaccggccagggcgtgaccaagggcgagggcggcacccccgcccccgccagcctgcccggcggcagcaaggaggaggaggagaaggccaagagactgctgtactgcgccctgtgcaaggtggccgtgaacagcctgagccagctggaggcccacaacaagggcaccaagcacaagaccatcctggaggccagaagcggcctgggccccatcaaggcctaccccagactgggcccccccacccccggcgagccctag

SEQ ID NO: 106021 - DNA, 1101 bp, synthetic construct; identical to SEQ ID NO: 106019
  misc_feature 1..1101: note = Description of Artificial Sequence: Synthetic coding sequence
  source 1..1101: mol_type = other DNA

SEQ ID NO: 106022 - DNA, 498 bp, synthetic construct
  misc_feature 1..498: note = Description of Artificial Sequence: Synthetic coding sequence
  source 1..498: mol_type = other DNA
atgcagccccccctggacctgaagcagatcctgcccttccccctggagcccgcccccaccctgggcctgttcagcaactacagcaccatggaccccgtgcagaaggccgtgctgagccacaccttcggcggccccctgctgaagaccaagagacccgtgatcagctgcaacatctgccagatcagattcaacagccagagccaggccgaggcccactacaagggcaacagacacgccagaagagtgaagggcatcgaggccgccaagaccagaggcagagagcccggcgtgagagagcccggcgaccccgccccccccggcagcacccccaccaacggcgacggcgtggcccccagacccgtgagcatggagaacggcctgggccccgcccccggcagccccgagaagcagcccggcagccccagcccccccagcatccccgagaccggccagggcgtgaccaagggcgagggcggcacccccgcccccgccagctag

SEQ ID NO: 106023 - DNA, 438 bp, synthetic construct
  misc_feature 1..438: note = Description of Artificial Sequence: Synthetic coding sequence
  source 1..438: mol_type = other DNA
atgcagccccccctggacctgaagcagatcctgcccttccccctggagcccgcccccaccctgggcctgttcagcaactacagcaccatggaccccgtgcagaaggccgtgctgagccacaccttcggcggccccctgctgaagaccaagagacccgtgatcagctgcaacatctgccagatcagattcaacagccagagccaggccgaggcccactacaagggcaacagacacgccagaagagtgaagggcatcgaggccgccaagaccagaggcagagagcccggcgtgagagagcccggcgaccccgccccccccggcagcacccccaccaacggcgacggcgtggcccccagacccgtgagcatggagaacggcctgggccccgcccccggcagccccgagaagcagcccggcagccccagcccccccagctag

SEQ ID NO: 106024 - DNA, 1101 bp, synthetic construct; identical to SEQ ID NO: 106019
  misc_feature 1..1101: note = Description of Artificial Sequence: Synthetic coding sequence
  source 1..1101: mol_type = other DNA

SEQ ID NO: 106025 - DNA, 858 bp, synthetic construct
  misc_feature 1..858: note = Description of Artificial Sequence: Synthetic coding sequence
  source 1..858: mol_type = other DNA
atgcagccccccctggacctgaagcagatcctgcccttccccctggagcccgcccccaccctgggcctgttcagcaactacagcaccatggaccccgtgcagaaggccgtgctgagccacaccttcggcggccccctgctgaagaccaagagacccgtgatcagctgcaacatctgccagatcagattcaacagccagagccaggccgaggcccactacaagggcaacagacacgccagaagagtgaagggcatcgaggccgccaagaccagaggcagagagcccggcgtgagagagcccggcgaccccgccccccccggcagcacccccaccaacggcgacggcgtggcccccagacccggcaccaagcacaagaccatcctggaggccagaagcggcctgggccccatcaaggcctaccccagactgggcccccccacccccggcgagcccgaggcccccgcccaggacagaaccttccactgcgagatctgcaacgtgaaggtgaacagcgaggtgcagctgaagcagcacatcagcagcagaagacacagagacggcgtggccggcaagcccaaccccctgctgagcagacacaagaagagcagaggcgccggcgagctggccggcaccctgaccttcagcaaggagctgcccaagagcctggccggcggcctgctgcccagccccctggccgtggccgccgtgatggccgccgccgccggcagccccctgagcctgagacccgcccccgccgcccccctgctgcagggcccccccatcacccaccccctgctgcaccccgcccccggccccatcagaaccgcccacggccccatcctgttcagcccctactag

SEQ ID NO: 106026 - DNA, 1110 bp, synthetic construct
  misc_feature 1..1110: note = Description of Artificial Sequence: Synthetic coding sequence
  source 1..1110: mol_type = other DNA
atgatgcagcccagcctggacatcaagcccttcatgagcttccccgtggacagcagcagcgccgtgggcctgttccccaacttcaacaccatggaccccgtgcagaaggccgtgatcaaccacaccttcggcgtgagcatcccccccaagaagaagcaggtgatcagctgcaacgtgtgccagctgagattcaacagcgacagccaggccgaggcccactacaagggcagcaagcacgccaagaaggtgaaggccctggacgccaccaagaacaagcccaagatggtgcccagcaaggacagcgccaaggccaaccccagctgcagcatcacccccatcaccggcaacaacagcgacaagagcgaggacaagggcaagctgaaggccagcagcagcagccagcccagcagcagcgagagcggcagcttcctgctgaagagcggcaccacccccctgccccccggcgccgccaccagccccagcaagagcaccaacggcgcccccggcaccgtggtggagagcgaggaggagaaggccaagaagctgctgtactgcagcctgtgcaaggtggccgtgaacagcctgagccagctggaggcccacaacaccggcagcaagcacaagaccatggtggaggccagaaacggcgccggccccatcaagagctaccccagacccggcagcagactgaagatgcagaacggcagcaagggcagcggcctgcagaacaagaccttccactgcgagatctgcgacgtgcacgtgaacagcgagatccagctgaagcagcacatcagcagcagaagacacaaggacagagtggccggcaagcccctgaagcccaagtacagcccctacaacaagctgcagagaagccccagcatcctggccgccaagctggccttccagaaggacatgatgaagcccctggcccccgccttcctgagcagccccctggccgccgccgccgccgtgagcagcgccctgagcctgccccccagacccagcgccagcctgttccaggcccccgccatcccccccgccctgctgagacccggccacggccccatcagagccacccccgccagcatcctgttcgccccctactag

SEQ ID NO: 106027 - DNA, 1188 bp, synthetic construct
  misc_feature 1..1188: note = Description of Artificial Sequence: Synthetic coding sequence
  source 1..1188: mol_type = other DNA
atgtggagcggcctgcccagcagaggcagcacctgccacaccaccaccctgcccgccctggtgagaacccccaccctgatgatgcagcccagcctggacatcaagcccttcatgagcttccccgtggacagcagcagcgccgtgggcctgttccccaacttcaacaccatggaccccgtgcagaaggccgtgatcaaccacaccttcggcgtgagcatcccccccaagaagaagcaggtgatcagctgcaacgtgtgccagctgagattcaacagcgacagccaggccgaggcccactacaagggcagcaagcacgccaagaaggtgaaggccctggacgccaccaagaacaagcccaagatggtgcccagcaaggacagcgccaaggccaaccccagctgcagcatcacccccatcaccggcaacaacagcgacaagagcgaggacaagggcaagctgaaggccagcagcagcagccagcccagcagcagcgagagcggcagcttcctgctgaagagcggcaccacccccctgccccccggcgccgccaccagccccagcaagagcaccaacggcgcccccggcaccgtggtggagagcgaggaggagaaggccaagaagctgctgtactgcagcctgtgcaaggtggccgtgaacagcctgagccagctggaggcccacaacaccggcagcaagcacaagaccatggtggaggccagaaacggcgccggccccatcaagagctaccccagacccggcagcagactgaagatgcagaacggcagcaagggcagcggcctgcagaacaagaccttccactgcgagatctgcgacgtgcacgtgaacagcgagatccagctgaagcagcacatcagcagcagaagacacaaggacagagtggccggcaagcccctgaagcccaagtacagcccctacaacaagctgcagagaagccccagcatcctggccgccaagctggccttccagaaggacatgatgaagcccctggcccccgccttcctgagcagccccctggccgccgccgccgccgtgagcagcgccctgagcctgccccccagacccagcgccagcctgttccaggcccccgccatcccccccgccctgctgagacccggccacggccccatcagagccacccccgccagcatcctgttcgccccctactag

SEQ ID NO: 106028 - DNA, 1110 bp, synthetic construct; identical to SEQ ID NO: 106026
  misc_feature 1..1110: note = Description of Artificial Sequence: Synthetic coding sequence
  source 1..1110: mol_type = other DNA

SEQ ID NO: 106029 - DNA, 1416 bp, synthetic construct
  misc_feature 1..1416: note = Description of Artificial Sequence: Synthetic coding sequence
  source 1..1416: mol_type = other DNA
atgaacatggccaacttcctgagaggcttcgaggagaagggcatcaagaacgacagacccgaggaccagctgagcaaggagaagaagaagatcctgttcagcttctgcgaggtgtgcaacatccagctgaacagcgccgcccaggcccaggtgcacagcaacggcaagagccacagaaagagagtgaagcagctgagcgacggccagccccccccccccgcccaggccagccccagcagcaacagcagcaccggcagcacctgccacaccaccaccctgcccgccctggtgagaacccccaccctgatgatgcagcccagcctggacatcaagcccttcatgagcttccccgtggacagcagcagcgccgtgggcctgttccccaacttcaacaccatggaccccgtgcagaaggccgtgatcaaccacaccttcggcgtgagcatcccccccaagaagaagcaggtgatcagctgcaacgtgtgccagctgagattcaacagcgacagccaggccgaggcccactacaagggcagcaagcacgccaagaaggtgaaggccctggacgccaccaagaacaagcccaagatggtgcccagcaaggacagcgccaaggccaaccccagctgcagcatcacccccatcaccggcaacaacagcgacaagagcgaggacaagggcaagctgaaggccagcagcagcagccagcccagcagcagcgagagcggcagcttcctgctgaagagcggcaccacccccctgccccccggcgccgccaccagccccagcaagagcaccaacggcgcccccggcaccgtggtggagagcgaggaggagaaggccaagaagctgctgtactgcagcctgtgcaaggtggccgtgaacagcctgagccagctggaggcccacaacaccggcagcaagcacaagaccatggtggaggccagaaacggcgccggccccatcaagagctaccccagacccggcagcagactgaagatgcagaacggcagcaagggcagcggcctgcagaacaagaccttccactgcgagatctgcgacgtgcacgtgaacagcgagatccagctgaagcagcacatcagcagcagaagacacaaggacagagtggccggcaagcccctgaagcccaagtacagcccctacaacaagctgcagagaagccccagcatcctggccgccaagctggccttccagaaggacatgatgaagcccctggcccccgccttcctgagcagccccctggccgccgccgccgccgtgagcagcgccctgagcctgccccccagacccagcgccagcctgttccaggcccccgccatcccccccgccctgctgagacccggccacggccccatcagagccacccccgccagcatcctgttcgccccctactag

SEQ ID NO: 106030 - DNA, 96 bp, synthetic construct
  misc_feature 1..96: note = Description of Artificial Sequence: Synthetic coding sequence
  source 1..96: mol_type = other DNA
atgaacatggccaacttcctgagaggcttcgaggagaagggcatcaagaacgacagacccgaggaccagctgagcaaggagaagaagaagatctag

SEQ ID NO: 106031 - DNA, 417 bp, synthetic construct
  misc_feature 1..417: note = Description of Artificial Sequence: Synthetic coding sequence
  source 1..417: mol_type = other DNA
atgctgggcagcacctgccacaccaccaccctgcccgccctggtgagaacccccaccctgatgatgcagcccagcctggacatcaagcccttcatgagcttccccgtggacagcagcagcgccgtgggcctgttccccaacttcaacaccaagagaagaggcctgttcgagaccaacaagttctgccagatggaccccgtgcagaaggccgtgatcaaccacaccttcggcgtgagcatcccccccaagaagaagcaggtgatcagctgcaacgtgtgccagctgagattcaacagcgacagccaggccgaggcccactacaagggcagcaagcacgccaagaaggtgaaggccctggacgccaccaagaacaagcccaagatggtgcccagcaaggacagcgccaaggccaactag

SEQ ID NO: 106032 - DNA, 228 bp, synthetic construct
  misc_feature 1..228: note = Description of Artificial Sequence: Synthetic coding sequence
  source 1..228: mol_type = other DNA
atgaacatggccaacttcctgagaggcttcgaggagaagggcatcaagaacgacagacccgaggaccagctgagcaaggagaagaagaagatcctgttcagcttctgcgaggtgtgcaacatccagctgaacagcgccgcccaggcccaggtgcacagcaacggcaagagccacagaaagagagtgaagcagctgagcgacggccagccccccccccccgcccagtag

SEQ ID NO: 106033 - DNA, 792 bp, synthetic construct
  misc_feature 1..792: note = Description of Artificial Sequence: Synthetic coding sequence
  source 1..792: mol_type = other DNA
atgatgcagcccagcctggacatcaagcccttcatgagcttccccgtggacagcagcagcgccgtgggcctgttccccaacttcaacaccatggaccccgtgcagaaggccgtgatcaaccacaccttcggcgtgagcatcccccccaagaagaagcaggtgatcagctgcaacgtgtgccagctgagattcaacagcgacagccaggccgaggcccactacaagggcagcaagcacgccaagaaggtgaaggccctggacgccaccaagaacaagcccaagatggtgcccagcaaggacagcgccaaggccaaccccagctgcagcatcacccccatcaccggcaacaacagcgacaagagcgaggacaagggcaagctgaaggccagcagcagcagccagcccagcagcagcgagagcggcagcttcctgctgaagagcggcaccacccccctgccccccggcgccgccaccagccccagcaagagcaccaacggcgcccccggcaccgtggtggagagcgaggaggagaaggccaagaagctgctgtactgcagcctgtgcaaggtggccgtgaacagcctgagccagctggaggcccacaacaccggcagcaagcacaagaccatggtggaggccagaaacggcgccggccccatcaagagctaccccagacccggcagcagactgaagatgcagaacggcagcaagggcagcggcctgcagaacaagaccttccactgcgagatctgcgacgtgcacgtgaacagcgagatccagctgaagcagtag

SEQ ID NO: 106034 - DNA, 1002 bp, synthetic construct
  misc_feature 1..1002: note = Description of Artificial Sequence: Synthetic coding sequence
  source 1..1002: mol_type = other DNA
atgagcgccaagctgggcaagagcagcagcctgctgacccagaccagcgaggagtgcaacggcatcctgaccgagaagatggaggaggaggagcagacctgcgaccccgacagcagcctgcactggagcagcagctacagccccgagaccttcagacagcagttcagacagttcggctaccaggacagccccggcccccacgaggccctgagcagactgtgggagctgtgccacctgtggctgagacccgaggtgcacaccaaggagcagatcctggagctgctggtgctggagcagttcctggccatcctgcccaaggagctgcaggcctgggtgcagaagcaccaccccgagaacggcgaggagaccgtgaccatgctggaggacgtggagagagagctggacggccccaagcagatcttcttcggcagaagaaaggacatgatcgccgagaagctggcccccagcgagatcaccgaggagctgcccagcagccagctgatgcccgtgaagaagcagctgcagggcgccagctgggagctgcagagcctgagaccccacgacgaggacatcaagaccaccaacgtgaagagcgccagcagacagaagaccagcctgggcatcgagctgcactgcaacgtgagcaacatcctgcacatgaacggcagccagagcagcacctacagaggcacctacgagcaggacggcagattcgagaagagacagggcaaccccagctggaagaagcagcagaagtgcgacgagtgcggcaagatcttcagccagagcagcgccctgatcctgcaccagagaatccacagcggcaagaagccctacgcctgcgacgagtgcgccaaggccttcagcagaagcgccatcctgatccagcacagaagaacccacaccgacagcaagtacgagcacgccatcgccgaggcccagaagaacatgtacttcaagaccagactgaagtgccccagaagcctgagcggcggcagatag

SEQ ID NO: 106035 - DNA, 1008 bp, synthetic construct
  misc_feature 1..1008: note = Description of Artificial Sequence: Synthetic coding sequence
  source 1..1008: mol_type = other DNA
atgagcgccaagctgggcaagagcagcagcctgctgacccagaccagcgaggagtgcaacggcatcctgaccgagaagatggaggaggaggagcagacctgcgaccccgacagcagcctgcactggagcagcagctacagccccgagaccttcagacagcagttcagacagttcggctaccaggacagccccggcccccacgaggccctgagcagactgtgggagctgtgccacctgtggctgagacccgaggtgcacaccaaggagcagatcctggagctgctggtgctggagcagttcctggccatcctgcccaaggagctgcaggcctgggtgcagaagcaccaccccgagaacggcgaggagaccgtgaccatgctggaggacgtggagagagagctggacggccccaagcagatcttcttcggcagaagaaaggacatgatcgccgagaagctggcccccagcgagatcaccgaggagctgcccagcagccagctgatgcccgtgaagaagcagctgcagggcgccagctgggagctgcagagcctgagaccccacgacgaggacatcaagaccaccaacgtgaagagcgccagcagacagaagaccagcctgggcatcgagctgcactgcaacgtgagcaacatcctgcacatgaacggcagccagagcagcacctacagaggcacctacgagcaggacggcagattcgagaagagacagggcaaccccagctggaagaagcagcagaagtgcgacgagtgcggcaagatcttcagccagagcagcgccctgatcctgcaccagagaatccacagcggcaagaagccctacgcctgcgacgagtgcgccaaggccttcagcagaagcgccatcctgatccagcacagaagaacccacaccggcgagaagccctacaagtgccacgactgcggcaaggccttcagccagagcagcaacctgttcagacacagaaagagacacatcagaaagaaggtgccctag

SEQ ID NO: 106036 - DNA, 828 bp, synthetic construct
  misc_feature 1..828: note = Description of Artificial Sequence: Synthetic coding sequence
  source 1..828: mol_type = other DNA
atggccgtggagagcggcgtgatcagcaccctgatcccccaggacccccccgagcaggagctgatcctggtgaaggtggaggacaacttcagctgggacgagaagttcaagcagaacggcagcacccagagctgccaggagctgttcagacagcagttcagaaagttctgctaccaggagacccccggccccagagaggccctgagcagactgcaggagctgtgctaccagtggctgatgcccgagctgcacaccaaggagcagatcctggagctgctggtgctggagcagttcctgagcatcctgcccgaggagctgcagatctgggtgcagcagcacaaccccgagagcggcgaggaggccgtgaccctgctggaggacctggagagagagttcgacgaccccggccagcaggtgcccgccagcccccagggccccgccgtgccctggaaggacctgacctgcctgagagccagccaggagagcaccgacatccacctgcagcccctgaagacccagctgaagagctggaagccctgcctgagccccaagagcgactgcgagaacagcgagaccgccaccaaggagggcatcagcgaggagaagagccagggcctgccccaggagcccagcttcagaggcatcaagctgagcagaccccccaaggccagcagcgccatcagatgggagtgcgtgagccccggcagcttccccggcgacatcatcgccgccgaggccacccacagcaccatcagctgcttcgccatcaacaccctgcccgccaccatcctgcccagcaagaacgtgaacagaaagtacttcagctag

SEQ ID NO: 106037 - DNA, 1605 bp, synthetic construct
  misc_feature 1..1605: note = Description of Artificial Sequence: Synthetic coding sequence
  source 1..1605: mol_type = other DNA
atggccgtggagagcggcgtgatcagcaccctgatcccccaggacccccccgagcaggagctgatcctggtgaaggtggaggacaacttcagctgggacgagaagttcaagcagaacggcagcacccagagctgccaggagctgttcagacagcagttcagaaagttctgctaccaggagacccccggccccagagaggccctgagcagactgcaggagctgtgctaccagtggctgatgcccgagctgcacaccaaggagcagatcctggagctgctggtgctggagcagttcctgagcatcctgcccgaggagctgcagatctgggtgcagcagcacaaccccgagagcggcgaggaggccgtgaccctgctggaggacctggagagagagttcgacgaccccggccagcaggtgcccgccagcccccagggccccgccgtgccctggaaggacctgacctgcctgagagccagccaggagagcaccgacatccacctgcagcccctgaagacccagctgaagagctggaagccctgcctgagccccaagagcgactgcgagaacagcgagaccgccaccaaggagggcatcagcgaggagaagagccagggcctgccccaggagcccagcttcagaggcatcagcgagcacgagagcaacctggtgtggaagcagggcagcgccaccggcgagaagctgagaagccccagccagggcggcagcttcagccaggtgatcttcaccaacaagagcctgggcaagagagacctgtacgacgaggccgagagatgcctgatcctgaccaccgacagcatcatgtgccagaaggtgccccccgaggagagaccctacagatgcgacgtgtgcggccacagcttcaagcagcacagcagcctgacccagcaccagagaatccacaccggcgagaagccctacaagtgcaaccagtgcggcaaggccttcagcctgagaagctacctgatcatccaccagagaatccacagcggcgagaaggcctacgagtgcagcgagtgcggcaaggccttcaaccagagcagcgccctgatcagacacagaaagatccacaccggcgagaaggcctgcaagtgcaacgagtgcggcaaggccttcagccagagcagctacctgatcatccaccagagaatccacaccggcgagaagccctacgagtgcaacgagtgcggcaagaccttcagccagagcagcaagctgatcagacaccagagaatccacaccggcgagagaccctacgagtgcaacgagtgcggcaaggccttcagacagagcagcgagctgatcacccaccagagaatccacagcggcgagaagccctacgagtgcagcgagtgcggcaaggccttcagcctgagcagcaacctgatcagacaccagagaatccacagcggcgaggagccctaccagtgcaacgagtgcggcaagaccttcaagagaagcagcgccctggtgcagcaccagagaatccacagcggcgacgaggcctacatctgcaacgagtgcggcaaggccttcagacacagaagcgtgctgatgagacaccagagagtgcacaccatcaagtag

SEQ ID NO: 106038 - DNA, 738 bp, synthetic construct
  misc_feature 1..738: note = Description of Artificial Sequence: Synthetic coding sequence
  source 1..738: mol_type = other DNA
atggccgtggagagcggcgtgatcagcaccctgatcccccaggacccccccgagcaggagctgatcctggtgaaggtggaggacaacttcagctgggacgagaagttcaagcagaacggcagcacccagagctgccaggagctgttcagacagcagttcagaaagttctgctaccaggagacccccggccccagagaggccctgagcagactgcaggagctgtgctaccagtggctgatgcccgagctgcacaccaaggagcagatcctggagctgctggtgctggagcagttcctgagcatcctgcccgaggagctgcagatctgggtgcagcagcacaaccccgagagcggcgaggaggccgtgaccctgctggaggacctggagagagagttcgacgaccccggccagcaggtgcccgccagcccccagggccccgccgtgccctggaaggacctgacctgcctgagagccagccaggagagcaccgacatccacctgcagcccctgaagacccagctgaagagctggaagccctgcctgagccccaagagcgagctgagcagaccccccaaggccagcagcgccatcagatgggagtgcgtgagccccggcagcttccccggcgacatcatcgccgccgaggccacccacagcaccatcagctgcttcgccatcaacaccctgcccgccaccatcctgcccagcaagaacgtgaacagaaagtacttcagctag

SEQ ID NO: 106039 - DNA, 2340 bp, synthetic construct
  misc_feature 1..2340: note = Description of Artificial Sequence: Synthetic coding sequence
  source 1..2340: mol_type = other DNA
atggccgccaacggcgacagccccccctggagccccgccctggccgccgagggcagaggcagcagctgcgaggccagcgtgagcttcgaggacgtgaccgtggacttcagcaaggaggagtggcagcacctggaccccgcccagagaagactgtactgggacgtgaccctggagaactacagccacctgctgagcgtgggctaccagatccccaagagcgaggccgccttcaagctggagcagggcgagggcccctggatgctggagggcgaggccccccaccagagctgcagcggcgaggccatcggcaagatgcagcagcagggcatccccggcggcatcttcttccactgcgagagattcgaccagcccatcggcgaggacagcctgtgcagcatcctggaggagctgtggcaggacaacgaccagctggagcagagacaggagaaccagaacaacctgctgagccacgtgaaggtgctgatcaaggagagaggctacgagcacaagaacatcgagaagatcatccacgtgaccaccaagctggtgcccagcatcaagagactgcacaactgcgacaccatcctgaagcacaccctgaacagccacaaccacaacagaaacagcgccaccaagaacctgggcaagatcttcggcaacggcaacaacttcccccacagccccagcagcaccaagaacgagaacgccaagaccggcgccaacagctgcgagcacgaccactacgagaagcacctgagccacaagcaggcccccacccaccaccagaagatccaccccgaggagaagctgtacgtgtgcaccgagtgcgtgatgggcttcacccagaagagccacctgttcgagcaccagagaatccacgccggcgagaagagcagagagtgcgacaagagcaacaaggtgttcccccagaagccccaggtggacgtgcaccccagcgtgtacaccggcgagaagccctacctgtgcacccagtgcggcaaggtgttcaccctgaagagcaacctgatcacccaccagaagatccacaccggccagaagccctacaagtgcagcgagtgcggcaaggccttcttccagagaagcgacctgttcagacacctgagaatccacaccggcgagaagccctacgagtgcagcgagtgcggcaagggcttcagccagaacagcgacctgagcatccaccagaagacccacaccggcgagaagcactacgagtgcaacgagtgcggcaaggccttcaccagaaagagcgccctgagaatgcaccagagaatccacaccggcgagaagccctacgtgtgcgccgactgcggcaaggccttcatccagaagagccacttcaacacccaccagagaatccacaccggcgagaagccctacgagtgcagcgactgcggcaagagcttcaccaagaagagccagctgcacgtgcaccagagaatccacaccggcgagaagccctacatctgcaccgagtgcggcaaggtgttcacccacagaaccaacctgaccacccaccagaagacccacaccggcgagaagccctacatgtgcgccgagtgcggcaaggccttcaccgaccagagcaacctgatcaagcaccagaagacccacaccggcgagaagccctacaagtgcaacggctgcggcaaggccttcatctggaagagcagactgaagatccaccagaagagccacatcggcgagagacactacgagtgcaaggactgcggcaaggccttcatccagaagagcaccctgagcgtgcaccagagaatccacaccggcgagaagccctacgtgtgccccgagtgcggcaaggccttcatccagaagagccacttcatcgcccaccacagaatccacaccggcgagaagccctacgagtgcagcgactgcggcaagtgcttcaccaagaagagccagctgagagtgcaccagaagatccacaccggcgagaagcccaacatctgcgccgagtgcggcaaggccttcaccgacagaagcaacctgatcacccaccagaagatccacaccagagagaagccctacgagtgcggcgactgcggcaagaccttcacctggaagagcagactgaacatccaccagaagagccacaccggcgagagacactacgagtgcagcaagtgcggcaaggccttcatccagaaggccaccctgagcatgcaccagatcatccacaccggcaagaagccctacgcctgcaccgagtgccagaaggccttcaccgacagaagcaacctgatcaagcaccagaagatgcacagcggcgagaagagatacaaggccagcgactag

SEQ ID NO: 106040 - DNA, 2340 bp, synthetic construct; identical to SEQ ID NO: 106039
  misc_feature 1..2340: note = Description of Artificial Sequence: Synthetic coding sequence
  source 1..2340: mol_type = other DNA

SEQ ID NO: 106041 - DNA, 2370 bp, synthetic construct
  misc_feature 1..2370: note = Description of Artificial Sequence: Synthetic coding sequence
  source 1..2370: mol_type = other DNA
atgggcaccctgccccacggccccagaccctggctgcagagagacgtggccgcccacgtgagcgccgaccacgccgccctgaacagcatcgtgagcctgcaggccagcgtgagcttcgaggacgtgaccgtggacttcagcaaggaggagtggcagcacctggaccccgcccagagaagactgtactgggacgtgaccctggagaactacagccacctgctgagcgtgggctaccagatccccaagagcgaggccgccttcaagctggagcagggcgagggcccctggatgctggagggcgaggccccccaccagagctgcagcggcgaggccatcggcaagatgcagcagcagggcatccccggcggcatcttcttccactgcgagagattcgaccagcccatcggcgaggacagcctgtgcagcatcctggaggagctgtggcaggacaacgaccagctggagcagagacaggagaaccagaacaacctgctgagccacgtgaaggtgctgatcaaggagagaggctacgagcacaagaacatcgagaagatcatccacgtgaccaccaagctggtgcccagcatcaagagactgcacaactgcgacaccatcctgaagcacaccctgaacagccacaaccacaacagaaacagcgccaccaagaacctgggcaagatcttcggcaacggcaacaacttcccccacagccccagcagcaccaagaacgagaacgccaagaccggcgccaacagctgcgagcacgaccactacgagaagcacctgagccacaagcaggcccccacccaccaccagaagatccaccccgaggagaagctgtacgtgtgcaccgagtgcgtgatgggcttcacccagaagagccacctgttcgagcaccagagaatccacgccggcgagaagagcagagagtgcgacaagagcaacaaggtgttcccccagaagccccaggtggacgtgcaccccagcgtgtacaccggcgagaagccctacctgtgcacccagtgcggcaaggtgttcaccctgaagagcaacctgatcacccaccagaagatccacaccggccagaagccctacaagtgcagcgagtgcggcaaggccttcttccagagaagcgacctgttcagacacctgagaatccacaccggcgagaagccctacgagtgcagcgagtgcggcaagggcttcagccagaacagcgacctgagcatccaccagaagacccacaccggcgagaagcactacgagtgcaacgagtgcggcaaggccttcaccagaaagagcgccctgagaatgcaccagagaatccacaccggcgagaagccctacgtgtgcgccgactgcggcaaggccttcatccagaagagccacttcaacacccaccagagaatccacaccggcgagaagccctacgagtgcagcgactgcggcaagagcttcaccaagaagagccagctgcacgtgcaccagagaatccacaccggcgagaagccctacatctgcaccgagtgcggcaaggtgttcacccacagaaccaacctgaccacccaccagaagacccacaccggcgagaagccctacatgtgcgccgagtgcggcaaggccttcaccgaccagagcaacctgatcaagcaccagaagacccacaccggcgagaagccctacaagtgcaacggctgcggcaaggccttcatctggaagagcagactgaagatccaccagaagagccacatcggcgagagacactacgagtgcaaggactgcggcaaggccttcatccagaagagcaccctgagcgtgcaccagagaatccacaccggcgagaagccctacgtgtgccccgagtgcggcaaggccttcatccagaagagccacttcatcgcccaccacagaatccacaccggcgagaagccctacgagtgcagcgactgcggcaagtgcttcaccaagaagagccagctgagagtgcaccagaagatccacaccggcgagaagcccaacatctgcgccgagtgcggcaaggccttcaccgacagaagcaacctgatcacccaccagaagatccacaccagagagaagccctacgagtgcggcgactgcggcaagaccttcacctggaagagcagactgaacatccaccagaagagccacaccggcgagagacactacgagtgcagcaagtgcggcaaggccttcatccagaaggccaccctgagcatgcaccagatcatccacaccggcaagaagccctacgcctgcaccgagtgccagaaggccttcaccgacagaagcaacctgatcaagcaccagaagatgcacagcggcgagaagagatacaaggccagcgactag

SEQ ID NO: 106042 - DNA, 537 bp, synthetic construct
  misc_feature 1..537: note = Description of Artificial Sequence: Synthetic coding sequence
  source 1..537: mol_type = other DNA
atgggcaccctgccccacggccccagaccctggctgcagagagacgtggccgcccacgtgagcgccgaccacgccgccctgaacagcatcgtgagcctgcaggccagcgtgagcttcgaggacgtgaccgtggacttcagcaaggaggagtggcagcacctggaccccgcccagagaagactgtactgggacgtgaccctggagaactacagccacctgctgagcgtgggctaccagatccccaagagcgaggccgccttcaagctggagcagggcgagggcccctggatgctggagggcgaggccccccaccagagctgcagcggcgaggccatcggcaagatgcagcagcagggcatccccggcggcatcttcttccactgcgagagattcgaccagcccatcggcgaggacagcctgtgcagcatcctggaggagctgtggcaggacaacgaccagctggagcagagacaggagaaccagaacaacctgctgagccacgtgaaggtgctgatcaaggagagaggctacgagtag

SEQ ID NO: 106043 - DNA, 3855 bp, synthetic construct
  misc_feature 1..3855: note = Description of Artificial Sequence: Synthetic coding sequence
  source 1..3855: mol_type = other DNA
atgcacaagaagagagtggaggagggcgaggccagcgacttcagcctggcctgggacagcagcgtgaccgccgccggcggcctggagggcgagcccgagtgcgaccagaagaccagcagagccctggaggacagaaacagcgtgaccagccaggaggagagaaacgaggacgacgaggacatggaggacgagagcatctacacctgcgaccactgccagcaggacttcgagagcctggccgacctgaccgaccacagagcccacagatgccccggcgacggcgacgacgacccccagctgagctgggtggccagcagccccagcagcaaggacgtggccagccccacccagatgatcggcgacggctgcgacctgggcctgggcgaggaggagggcggcaccggcctgccctacccctgccagttctgcgacaagagcttcatcagactgagctacctgaagagacacgagcagatccacagcgacaagctgcccttcaagtgcacctactgcagcagactgttcaagcacaagagaagcagagacagacacatcaagctgcacaccggcgacaagaagtaccactgccacgagtgcgaggccgccttcagcagaagcgaccacctgaagatccacctgaagacccacagcagcagcaagcccttcaagtgcaccgtgtgcaagagaggcttcagcagcaccagcagcctgcagagccacatgcaggcccacaagaagaacaaggagcacctggccaagagcgagaaggaggccaagaaggacgacttcatgtgcgactactgcgaggacaccttcagccagaccgaggagctggagaagcacgtgctgaccagacacccccagctgagcgagaaggccgacctgcagtgcatccactgccccgaggtgttcgtggacgagaacaccctgctggcccacatccaccaggcccacgccaaccagaagcacaagtgccccatgtgccccgagcagttcagcagcgtggagggcgtgtactgccacctggacagccacagacagcccgacagcagcaaccacagcgtgagccccgaccccgtgctgggcagcgtggccagcatgagcagcgccacccccgacagcagcgccagcgtggagagaggcagcacccccgacagcaccctgaagcccctgagaggccagaagaagatgagagacgacggccagggctggaccaaggtggtgtacagctgcccctactgcagcaagagagacttcaacagcctggccgtgctggagatccacctgaagaccatccacgccgacaagccccagcagagccacacctgccagatctgcctggacagcatgcccaccctgtacaacctgaacgagcacgtgagaaagctgcacaagaaccacgcctaccccgtgatgcagttcggcaacatcagcgccttccactgcaactactgccccgagatgttcgccgacatcaacagcctgcaggagcacatcagagtgagccactgcggccccaacgccaaccccagcgacggcaacaacgccttcttctgcaaccagtgcagcatgggcttcctgaccgagagcagcctgaccgagcacatccagcaggcccactgcagcgtgggcagcgccaagctggagagccccgtggtgcagcccacccagagcttcatggaggtgtacagctgcccctactgcaccaacagccccatcttcggcagcatcctgaagctgaccaagcacatcaaggagaaccacaagaacatccccctggcccacagcaagaagagcaaggccgagcagagccccgtgagcagcgacgtggaggtgagcagccccaagagacagagactgagcgccagcgccaacagcatcagcaacggcgagtacccctgcaaccagtgcgacctgaagttcagcaacttcgagagcttccagacccacctgaagctgcacctggagctgctgctgagaaagcaggcctgcccccagtgcaaggaggacttcgacagccaggagagcctgctgcagcacctgaccgtgcactacatgaccaccagcacccactacgtgtgcgagagctgcgacaagcagttcagcagcgtggacgacctgcagaagcacctgctggacatgcacaccttcgtgctgtaccactgcaccctgtgccaggaggtgttcgacagcaaggtgagcatccaggtgcacctggccgtgaagcacagcaacgagaagaagatgtacagatgcaccgcctgcaactgggacttcagaaaggaggccgacctgcaggtgcacgtgaagcacagccacctgggcaaccccgccaaggcccacaagtgcatcttctgcggcgagaccttcagcaccgaggtggagctgcagtgccacatcaccacccacagcaagaagtacaactgcaagttctgcagcaaggccttccacgccatcatcctgctggagaagcacctgagagagaagcactgcgtgttcgacgccgccaccgagaacggcaccgccaacggcgtgccccccatggccaccaagaaggccgagcccgccgacctgcagggcatgctgctgaagaaccccgaggcccccaacagccacgaggccagcgaggacgacgtggacgccagcgagcccatgtacggctgcgacatctgcggcgccgcctacaccatggaggtgctgctgcagaaccacagactgagagaccacaacatcagacccggcgaggacgacggcagcagaaagaaggccgagttcatcaagggcagccacaagtgcaacgtgtgcagcagaaccttcttcagcgagaacggcctgagagagcacctgcagacccacagaggccccgccaagcactacatgtgccccatctgcggcgagagattccccagcctgctgaccctgaccgagcacaaggtgacccacagcaagagcctggacaccggcacctgcagaatctgcaagatgcccctgcagagcgaggaggagttcatcgagcactgccagatgcaccccgacctgagaaacagcctgaccggcttcagatgcgtggtgtgcatgcagaccgtgaccagcaccctggagctgaagatccacggcaccttccacatgcagaagctggccggcagcagcgccgccagcagccccaacggccagggcctgcagaagctgtacaagtgcgccctgtgcctgaaggagttcagaagcaagcaggacctggtgaagctggacgtgaacggcctgccctacggcctgtgcgccggctgcatggccagaagcgccaacggccaggtgggcggcctggccccccccgagcccgccgacagaccctgcgccggcctgagatgccccgagtgcagcgtgaagttcgagagcgccgaggacctggagagccacatgcaggtggaccacagagacctgacccccgagaccagcggccccagaaagggcacccagaccagccccgtgcccagaaagaagacctaccagtgcatcaagtgccagatgaccttcgagaacgagagagagatccagatccacgtggccaaccacatgatcgaggagggcatcaaccacgagtgcaagctgtgcaaccagatgttcgacagccccgccaagctgctgtgccacctgatcgagcacagcttcgagggcatgggcggcaccttcaagtgccccgtgtgcttcaccgtgttcgtgcaggccaacaagctgcagcagcacatcttcgccgtgcacggccaggaggacaagatctacgactgcagccagtgcccccagaagttcttcttccagaccgagctgcagaaccacaccatgagccagcacgcccagtag

SEQ ID NO: 106044 - DNA, 3504 bp, synthetic construct
  misc_feature 1..3504: note = Description of Artificial Sequence: Synthetic coding sequence
  source 1..3504: mol_type = other DNA
atgatcggcgacggctgcgacctgggcctgggcgaggaggagggcggcaccggcctgccctacccctgccagttctgcgacaagagcttcatcagactgagctacctgaagagacacgagcagatccacagcgacaagctgcccttcaagtgcacctactgcagcagactgttcaagcacaagagaagcagagacagacacatcaagctgcacaccggcgacaagaagtaccactgccacgagtgcgaggccgccttcagcagaagcgaccacctgaagatccacctgaagacccacagcagcagcaagcccttcaagtgcaccgtgtgcaagagaggcttcagcagcaccagcagcctgcagagccacatgcaggcccacaagaagaacaaggagcacctggccaagagcgagaaggaggccaagaaggacgacttcatgtgcgactactgcgaggacaccttcagccagaccgaggagctggagaagcacgtgctgaccagacacccccagctgagcgagaaggccgacctgcagtgcatccactgccccgaggtgttcgtggacgagaacaccctgctggcccacatccaccaggcccacgccaaccagaagcacaagtgccccatgtgccccgagcagttcagcagcgtggagggcgtgtactgccacctggacagccacagacagcccgacagcagcaaccacagcgtgagccccgaccccgtgctgggcagcgtggccagcatgagcagcgccacccccgacagcagcgccagcgtggagagaggcagcacccccgacagcaccctgaagcccctgagaggccagaagaagatgagagacgacggccagggctggaccaaggtggtgtacagctgcccctactgcagcaagagagacttcaacagcctggccgtgctggagatccacctgaagaccatccacgccgacaagccccagcagagccacacctgccagatctgcctggacagcatgcccaccctgtacaacctgaacgagcacgtgagaaagctgcacaagaaccacgcctaccccgtgatgcagttcggcaacatcagcgccttccactgcaactactgccccgagatgttcgccgacatcaacagcctgcaggagcacatcagagtgagccactgcggccccaacgccaaccccagcgacggcaacaacgccttcttctgcaaccagtgcagcatgggcttcctgaccgagagcagcctgaccgagcacatccagcaggcccactgcagcgtgggcagcgccaagctggagagccccgtggtgcagcccacccagagcttcatggaggtgtacagctgcccctactgcaccaacagccccatcttcggcagcatcctgaagctgaccaagcacatcaaggagaaccacaagaacatccccctggcccacagcaagaagagcaaggccgagcagagccccgtgagcagcgacgtggaggtgagcagccccaagagacagagactgagcgccagcgccaacagcatcagcaacggcgagtacccctgcaaccagtgcgacctgaagttcagcaacttcgagagcttccagacccacctgaagctgcacctggagctgctgctgagaaagcaggcctgcccccagtgcaaggaggacttcgacagccaggagagcctgctgcagcacctgaccgtgcactacatgaccaccagcacccactacgtgtgcgagagctgcgacaagcagttcagcagcgtggacgacctgcagaagcacctgctggacatgcacaccttcgtgctgtaccactgcaccctgtgccaggaggtgttcgacagcaaggtgagcatccaggtgcacctggccgtgaagcacagcaacgagaagaagatgtacagatgcaccgcctgcaactgggacttcagaaaggaggccgacctgcaggtgcacgtgaagcacagccacctgggcaaccccgccaaggcccacaagtgcatcttctgcggcgagaccttcagcaccgaggtggagctgcagtgccacatcaccacccacagcaagaagtacaactgcaagttctgcagcaaggccttccacgccatcatcctgctggagaagcacctgagagagaagcactgcgtgttcgacgccgccaccgagaacggcaccgccaacggcgtgccccccatggccaccaagaaggccgagcccgccgacctgcagggcatgctgctgaagaaccccgaggcccccaacagccacgaggccagcgaggacgacgtggacgccagcgagcccatgtacggctgcgacatctgcggcgccgcctacaccatggaggtgctgctgcagaaccacagactgagagaccacaacatcagacccggcgaggacgacggcagcagaaagaaggccgagttcatcaagggcagccacaagtgcaacgtgtgcagcagaaccttcttcagcgagaacggcctgagagagcacctgcagacccacagaggccccgccaagcactacatgtgccccatctgcggcgagagattccccagcctgctgaccctgaccgagcacaaggtgacccacagcaagagcctggacaccggcacctgcagaatctgcaagatgcccctgcagagcgaggaggagttcatcgagcactgccagatgcaccccgacctgagaaacagcctgaccggcttcagatgcgtggtgtgcatgcagaccgtgaccagcaccctggagctgaagatccacggcaccttccacatgcagaagctggccggcagcagcgccgccagcagccccaacggccagggcctgcagaagctgtacaagtgcgccctgtgcctgaaggagttcagaagcaagcaggacctggtgaagctggacgtgaacggcctgccctacggcctgtgcgccggctgcatggccagaagcgccaacggccaggtgggcggcctggccccccccgagcccgccgacagaccctgcgccggcctgagatgccccgagtgcagcgtgaagttcgagagcgccgaggacctggagagccacatgcaggtggaccacagagacctgacccccgagaccagcggccccagaaagggcacccagaccagccccgtgcccagaaagaagacctaccagtgcatcaagtgccagatgaccttcgagaacgagagagagatccagatccacgtggccaaccacatgatcgaggagggcatcaaccacgagtgcaagctgtgcaaccagatgttcgacagccccgccaagctgctgtgccacctgatcgagcacagcttcgagggcatgggcggcaccttcaagtgccccgtgtgcttcaccgtgttcgtgcaggccaacaagctgcagcagcacatcttcgccgtgcacggccaggaggacaagatctacgactgcagccagtgcccccagaagttcttcttccagaccgagctgcagaaccacaccatgagccagcacgcccagtag

SEQ ID NO: 106045 - DNA, 3855 bp, synthetic construct; identical to SEQ ID NO: 106043
  misc_feature 1..3855: note = Description of Artificial Sequence: Synthetic coding sequence
  source 1..3855: mol_type = other DNA

SEQ ID NO: 106046 - DNA, 2430 bp, synthetic construct
  misc_feature 1..2430: note = Description of Artificial Sequence: Synthetic coding sequence
  source 1..2430: mol_type = other DNA
atgggccccctgaccttcatggacgtggccatcgagttctgcctggaggagtggcagtgcctggacatcgcccagcagaacctgtacagaaacgtgatgctggagaactacagaaacctggtgttcctgggcatcgccgtgagcaagcccgacctgatcacctgcctggagcaggagaaggagccctgggagcccatgagaagacacgagatggtggccaagccccccgtgatgtgcagccacttcacccaggacttctggcccgagcagcacatcaaggaccccttccagaaggccaccctgagaagatacaagaactgcgagcacaagaacgtgcacctgaagaaggaccacaagagcgtggacgagtgcaaggtgcacagaggcggctacaacggcttcaaccagtgcctgcccgccacccagagcaagatcttcctgttcgacaagtgcgtgaaggccttccacaagttcagcaacagcaacagacacaagatcagccacaccgagaagaagctgttcaagtgcaaggagtgcggcaagagcttctgcatgctgccccacctggcccagcacaagatcatccacaccagagtgaacttctgcaagtgcgagaagtgcggcaaggccttcaactgccccagcatcatcaccaagcacaagagaatcaacaccggcgagaagccctacacctgcgaggagtgcggcaaggtgttcaactggagcagcagactgaccacccacaagaagaactacaccagatacaagctgtacaagtgcgaggagtgcggcaaggccttcaacaagagcagcatcctgaccacccacaagatcatcagaaccggcgagaagttctacaagtgcaaggagtgcgccaaggccttcaaccagagcagcaacctgaccgagcacaagaagatccaccccggcgagaagccctacaagtgcgaggagtgcggcaaggccttcaactggcccagcaccctgaccaagcacaagagaatccacaccggcgagaagccctacacctgcgaggagtgcggcaaggccttcaaccagttcagcaacctgaccacccacaagagaatccacaccgccgagaagttctacaagtgcaccgagtgcggcgaggccttcagcagaagcagcaacctgaccaagcacaagaagatccacaccgagaagaagccctacaagtgcgaggagtgcggcaaggccttcaagtggagcagcaagctgaccgagcacaagctgacccacaccggcgagaagccctacaagtgcgaggagtgcggcaaggccttcaactggcccagcaccctgaccaagcacaacagaatccacaccggcgagaagccctacaagtgcgaggtgtgcggcaaggccttcaaccagttcagcaacctgaccacccacaagagaatccacaccgccgagaagccctacaagtgcgaggagtgcggcaaggccttcagcagaagcagcaacctgaccaagcacaagaagatccacatcgagaagaagccctacaagtgcgaggagtgcggcaaggccttcaagtggagcagcaagctgaccgagcacaagatcacccacaccggcgagaagccctacaagtgcgaggagtgcggcaaggccttcaaccacttcagcatcctgaccaagcacaagagaatccacaccggcgagaagccctacaagtgcgaggagtgcggcaaggccttcacccagagcagcaacctgaccacccacaagaagatccacaccggcgagaagttctacaagtgcgaggagtgcggcaaggccttcacccagagcagcaacctgaccacccacaagaagatccacaccggcggcaagccctacaagtgcgaggagtgcggcaaggccttcaaccagttcagcaccctgaccaagcacaagatcatccacaccgaggagaagccctacaagtgcgaggagtgcggcaaggccttcaagtggagcagcaccctgaccaagcacaagatcatccacaccggcgagaagccctacaagtgcgaggagtgcggcaaggccttcaagctgagcagcaccctgagcacccacaagatcatccacaccggcgagaagccctacaagtgcgagaagtgcggcaaggccttcaacagaagcagcaacctgatcgagcacaagaagatccacaccggcgagcagccctacaagtgcgaggagtgcggcaaggccttcaactacagcagccacctgaacacccacaagagaatccacaccaaggagcagccctacaagtgcaaggagtgcggcaaggccttcaaccagtacagcaacctgaccacccacaacaagatccacaccggcgagaagctgtacaagcccgaggacgtgaccgtgatcctgaccaccccccagaccttcagcaacatcaagtag

SEQ ID NO: 106047 - DNA, 2427 bp, synthetic construct
  misc_feature 1..2427: note = Description of Artificial Sequence: Synthetic coding sequence
  source 1..2427: mol_type = other DNA
ggccccctgaccttcatggacgtggccatcgagttctgcctggaggagtggcagtgcctggacatcgcccagcagaacctgtacagaaacgtgatgctggagaactacagaaacctggtgttcctgggcatcgccgtgagcaagcccgacctgatcacctgcctggagcaggagaaggagccctgggagcccatgagaagacacgagatggtggccaagccccccgtgatgtgcagccacttcacccaggacttctggcccgagcagcacatcaaggaccccttccagaaggccaccctgagaagatacaagaactgcgagcacaagaacgtgcacctgaagaaggaccacaagagcgtggacgagtgcaaggtgcacagaggcggctacaacggcttcaaccagtgcctgcccgccacccagagcaagatcttcctgttcgacaagtgcgtgaaggccttccacaagttcagcaacagcaacagacacaagatcagccacaccgagaagaagctgttcaagtgcaaggagtgcggcaagagcttctgcatgctgccccacctggcccagcacaagatcatccacaccagagtgaacttctgcaagtgcgagaagtgcggcaaggccttcaactgccccagcatcatcaccaagcacaagagaatcaacaccggcgagaagccctacacctgcgaggagtgcggcaaggtgttcaactggagcagcagactgaccacccacaagaagaactacaccagatacaagctgtacaagtgcgaggagtgcggcaaggccttcaacaagagcagcatcctgaccacccacaagatcatcagaaccggcgagaagttctacaagtgcaaggagtgcgccaaggccttcaaccagagcagcaacctgaccgagcacaagaagatccaccccggcgagaagccctacaagtgcgaggagtgcggcaaggccttcaactggcccagcaccctgaccaagcacaagagaatccacaccggcgagaagccctacacctgcgaggagtgcggcaaggccttcaaccagttcagcaacctgaccacccacaagagaatccacaccgccgagaagttctacaagtgcaccgagtgcggcgaggccttcagcagaagcagcaacctgaccaagcacaagaagatccacaccgagaagaagccctacaagtgcgaggagtgcggcaaggccttcaagtggagcagcaagctgaccgagcacaagctgacccacaccggcgagaagccctacaagtgcgaggagtgcggcaaggccttcaactggcccagcaccctgaccaagcacaacagaatccacaccggcgagaagccctacaagtgcgaggtgtgcggcaaggccttcaaccagttcagcaacctgaccacccacaagagaatccacaccgccgagaagccctacaagtgcgaggagtgcggcaaggccttcagcagaagcagcaacctgaccaagcacaagaagatccacatcgagaagaagccctacaagtgcgaggagtgcggcaaggccttcaagtggagcagcaagctgaccgagcacaagatcacccacaccggcgagaagccctacaagtgcgaggagtgcggcaaggccttcaaccacttcagcatcctgaccaagcacaagagaatccacaccggcgagaagccctacaagtgcgaggagtgcggcaaggccttcacccagagcagcaacctgaccacccacaagaagatccacaccggcgagaagttctacaagtgcgaggagtgcggcaaggccttcacccagagcagcaacctgaccacccacaagaagatccacaccggcggcaagccctacaagtgcgaggagtgcggcaaggccttcaaccagttcagcaccctgaccaagcacaagatcatccacaccgaggagaagccctacaagtgcgaggagtgcggcaaggccttcaagtggagcagcaccctgaccaagcacaagatcatccacaccggcgagaagccctacaagtgcgaggagtgcggcaaggccttcaagctgagcagcaccctgagcacccacaagatcatccacaccggcgagaagccctacaagtgcgagaagtgcggcaaggccttcaacagaagcagcaacctgatcgagcacaagaagatccacaccggcgagcagccctacaagtgcgaggagtgcggcaaggccttcaactacagcagccacctgaacacccacaagagaatccacaccaaggagcagccctacaagtgcaaggagtgcggcaaggccttcaaccagtacagcaacctgaccacccacaacaagatccacaccggcgagaagctgtacaagcccgaggacgtgaccgtgatcctgaccaccccccagaccttcagcaacatcaagtag

SEQ ID NO: 106048 - DNA, 2412 bp, synthetic construct
  misc_feature 1..2412: note = Description of Artificial Sequence: Synthetic coding sequence
  source 1..2412: mol_type = other DNA
atggacgtggccatcgagttctgcctggaggagtggcagtgcctggacatcgcccagcagaacctgtacagaaacgtgatgctggagaactacagaaacctggtgttcctgggcatcgccgtgagcaagcccgacctgatcacctgcctggagcaggagaaggagccctgggagcccatgagaagacacgagatggtggccaagccccccgtgatgtgcagccacttcacccaggacttctggcccgagcagcacatcaaggaccccttccagaaggccaccctgagaagatacaagaactgcgagcacaagaacgtgcacctgaagaaggaccacaagagcgtggacgagtgcaaggtgcacagaggcggctacaacggcttcaaccagtgcctgcccgccacccagagcaagatcttcctgttcgacaagtgcgtgaaggccttccacaagttcagcaacagcaacagacacaagatcagccacaccgagaagaagctgttcaagtgcaaggagtgcggcaagagcttctgcatgctgccccacctggcccagcacaagatcatccacaccagagtgaacttctgcaagtgcgagaagtgcggcaaggccttcaactgccccagcatcatcaccaagcacaagagaatcaacaccggcgagaagccctacacctgcgaggagtgcggcaaggtgttcaactggagcagcagactgaccacccacaagaagaactacaccagatacaagctgtacaagtgcgaggagtgcggcaaggccttcaacaagagcagcatcctgaccacccacaagatcatcagaaccggcgagaagttctacaagtgcaaggagtgcgccaaggccttcaaccagagcagcaacctgaccgagcacaagaagatccaccccggcgagaagccctacaagtgcgaggagtgcggcaaggccttcaactggcccagcaccctgaccaagcacaagagaatccacaccggcgagaagccctacacctgcgaggagtgcggcaaggccttcaaccagttcagcaacctgaccacccacaagagaatccacaccgccgagaagttctacaagtgcaccgagtgcggcgaggccttcagcagaagcagcaacctgaccaagcacaagaagatccacaccgagaagaagccctacaagtgcgaggagtgcggcaaggccttcaagtggagcagcaagctgaccgagcacaagctgacccacaccggcgagaagccctacaagtgcgaggagtgcggcaaggccttcaactggcccagcaccctgaccaagcacaacagaatccacaccggcgagaagccctacaagtgcgaggtgtgcggcaaggccttcaaccagttcagcaacctgaccacccacaagagaatccacaccgccgagaagccctacaagtgcgaggagtgcggcaaggccttcagcagaagcagcaacctgaccaagcacaagaagatccacatcgagaagaagccctacaagtgcgaggagtgcggcaaggccttcaagtggagcagcaagctgaccgagcacaagatcacccacaccggcgagaagccctacaagtgcgaggagtgcggcaaggccttcaaccacttcagcatcctgaccaagcacaagagaatccacaccggcgagaagccctacaagtgcgaggagtgcggcaaggccttcacccagagcagcaacctgaccacccacaagaagatccacaccggcgagaagttctacaagtgcgaggagtgcggcaaggccttcacccagagcagcaacctgaccacccacaagaagatccacaccggcggcaagccctacaagtgcgaggagtgcggcaaggccttcaaccagttcagcaccctgaccaagcacaagatcatccacaccgaggagaagccctacaagtgcgaggagtgcggcaaggccttcaagtggagcagcaccctgaccaagcacaagatcatccacaccggcgagaagccctacaagtgcgaggagtgcggcaaggccttcaagctgagcagcaccctgagcacccacaagatcatccacaccggcgagaagccctacaagtgcgagaagtgcggcaaggccttcaacagaagcagcaacctgatcgagcacaagaagatccacaccggcgagcagccctacaagtgcgaggagtgcggcaaggccttcaactacagcagccacctgaacacccacaagagaatccacaccaaggagcagccctacaagtgcaaggagtgcggcaaggccttcaaccagtacagcaacctgaccacccacaacaagatccacaccggcgagaagctgtacaagcccgaggacgtgaccgtgatcctgaccaccccccagaccttcagcaacatcaagtag

SEQ ID NO: 106049 - DNA, 1713 bp, synthetic construct
  misc_feature 1..1713: note = Description of Artificial Sequence: Synthetic coding sequence
  source 1..1713: mol_type = other DNA
atggagaacctgaagagcggcgtgtaccccctgaaggaggccagcggctgccccggcgccgacagaaacctgctggtgtacagcttctacgagaagggccccctgaccttcagagacgtggccatcgagttcagcctggaggagtggcagtgcctggacaccgcccagcaggacctgtacagaaaggtgatgctggagaactacagaaacctggtgttcctggccggcatcgccgtgagcaagcccgacctgatcacctgcctggagcagggcaaggagccctggaacatgaagagacacgccatggtggaccagccccccgtgacctacagccacttcgcccaggacctgtggcccgagcagggcatcaaggacagcttccaggaggtgatcctgagaagatacggcaagtgcggccacgaggacctgcagctgagaaccggctgcaagagcgtggacgagtgcaacctgcacaaggagtgctacgacgagctgaaccagtgcctgaccaccacccagagcgagatcttccagtacgacaagtacgtgaacgtgttctacaagttcagcaaccccaacatccagaagatcagacacaccggcaagaagcccttcaagtgcaagaagtgcgacaagagcttctgcatgctgctgcacctgacccagcacaagagaatccacatcagagagaacagctaccagtgcgaggagtgcggcaaggtgttcaactggttcagcaccctgaccagacacagaagaatccacaccggcgagaagccctacaagtgcgagcagtgcggcaaggccttcaagcagagcagcaccctgaccacccacaagatcatccacaccggcgagaagccctacagatgcgaggagtgcggcaagaccttcaacagaagcagccacctgaccacccacaagagaatccacaccggcgagaagccctacagatgcgaggagtgcggcagagccttcaacagaagcagccacctgaccacccacaagatcatccacaccggcgagaagccctacaagtgcgaggagtgcggcaaggccttcaaccagagcagcaccctgaccacccacaagatcatccacgccggcgagaagccctacaagtgcgaggagtgcggcaaggccttctacagattcagctacctgaccaagcacaagatcatccacaccggcgagaagttctacaagtgcgaggagtgcggcaagggcttcaactggagcagcaccctgaccaagcacaagagaatccacaccggcgagaagccctacaagtgcgagcagtgcggcaaggccttcaacgagagcagcaacctgaccgcccacaagatcatccacaccggcgagaagccctacaagtgcgaggagtgcggcaaggccttcaacagaagccccaagctgaccgcccacaaggtgatccacagcggcgagaagccctacaagtgcgaggagtgcggcaaggccttcaaccagttcagcaacctgaccaagcacaagatcacccacatcggcgacaccagctacaagtacctggagtgcgacaaggccttcagccagagcagcaccctgaccaagcacaaggtgatccacaccggcgagaagccctacaactgcgaggagtacggcaaggccttcaaccagagcagcaacctgatcgagcagagcaacagctactggagagagaccctgcagatgtag

SEQ ID NO: 106050 - DNA, 1413 bp, synthetic construct
  misc_feature 1..1413: note = Description of Artificial Sequence: Synthetic coding sequence
  source 1..1413: mol_type = other DNA
atggccgccaccctgctgatggccggcagccaggcccccgtgaccttcgaggacatggccatgtacctgaccagagaggagtggagacccctggacgccgcccagagagacctgtacagagacgtgatgcaggagaactacggcaacgtggtgagcctggacttcgagatcagaagcgagaacgaggtgaaccccaagcaggagatcagcgaggacgtgcagttcggcaccaccagcgagagacccgccgagaacgccgaggagaaccccgagagcgaggagggcttcgagagcggcgacagaagcgagagacagtggggcgacctgaccgccgaggagtgggtgagctaccccctgcagcccgtgaccgacctgctggtgcacaaggaggtgcacaccggcatcagataccacatctgcagccactgcggcaaggccttcagccagatcagcgacctgaacagacaccagaagacccacaccggcgacagaccctacaagtgctacgagtgcggcaagggcttcagcagaagcagccacctgatccagcaccagagaacccacaccggcgagagaccctacgactgcaacgagtgcggcaagagcttcggcagaagcagccacctgatccagcaccagaccatccacaccggcgagaagccccacaagtgcaacgagtgcggcaagagcttctgcagactgagccacctgatccagcaccagagaacccacagcggcgagaagccctacgagtgcgaggagtgcggcaagagcttcagcagaagcagccacctggcccagcaccagagaacccacaccggcgagaagccctacgagtgcaacgagtgcggcagaggcttcagcgagagaagcgacctgatcaagcactacagagtgcacaccggcgagagaccctacaagtgcgacgagtgcggcaagaacttcagccagaacagcgacctggtgagacacagaagagcccacaccggcgagaagccctaccactgcaacgagtgcggcgagaacttcagcagaatcagccacctggtgcagcaccagagaacccacaccggcgagaagccctacgagtgcaacgcctgcggcaagagcttcagcagaagcagccacctgatcacccaccagaagatccacaccggcgagaagccctacgagtgcaacgagtgctggagaagcttcggcgagagaagcgacctgatcaagcaccagagaacccacaccggcgagaagccctacgagtgcgtgcagtgcggcaagggcttcacccagagcagcaacctgatcacccaccagagagtgcacaccggcgagaagccctacgagtgcaccgagtgcgagaagagcttcagcagaagcagcgccctgatcaagcacaagagagtgcacaccgactag

SEQ ID NO: 106051 - DNA, 1413 bp, synthetic construct; identical to SEQ ID NO: 106050
  misc_feature 1..1413: note = Description of Artificial Sequence: Synthetic coding sequence
  source 1..1413: mol_type = other DNA

SEQ ID NO: 106052 - DNA, 909 bp, synthetic construct
  misc_feature 1..909: note = Description of Artificial Sequence: Synthetic coding sequence
  source 1..909: mol_type = other DNA
atggccgccaccctgctgatggccggcagccaggcccccgtgaccttcgaggacatggccatgtacctgaccagagaggagtggagacccctggacgccgcccagagagacctgtacagagacgtgatgcaggagaactacggcaacgtggtgagcctggacttcgagatcagaagcgagaacgaggtgaaccccaagcaggagatcagcgaggacgtgcagttcggcaccaccagcgagagacccgccgagaacgccgaggagaaccccgagagcgaggagggcttcgagagcggcgacagaagcgagagacagtggggcgacctgaccgccgaggagtgggtgagctaccccctgcagcccgtgaccgacctgctggtgcacaaggaggtgcacaccggcatcagataccacatctgcagccactgcggcaaggccttcagccagatcagcgacctgaacagacaccagaagacccacaccggcgacagaccctacaagtgctacgagtgcggcaagggcttcagcagaagcagccacctgatccagcaccagagaacccacaccggcgagagaccctacgactgcaacgagtgcggcaagagcttcggcagaagcagccacctgatccagcaccagaccatccacaccggcgagaagccccacaagtgcaacgagtgcggcaagagcttctgcagactgagccacctgatccagcaccagagaacccacagcggcgagaagccctacgagtgcgaggagtgcggcaagagcttcagcagaagcagccacctggcccagcaccagagaacccacaccggcgagaagccctacgagtgcaccgagtgcgagaagagcttcagcagaagcagcgccctgatcaagcacaagagagtgcacaccgactag

SEQ ID NO: 106053 - DNA, 1848 bp, synthetic construct
  misc_feature 1..1848: note = Description of Artificial Sequence: Synthetic coding sequence
  source 1..1848: mol_type = other DNA
atggacagcgtggccttcgaggacgtggccgtgaacttcacccacgaggagtgggccctgctgggccccagccagaagaacctgtacagagacgtgatgagagagaccatcagaaacctgaactgcatcggcatgaagtgggagaaccagaacatcgacgaccagcaccagaacctgagaagaaaccccagatgcgacgtggtggagagattcggcaagagcaaggacggcagccagtgcggcgagaccctgagccagatcagaaacagcatcgtgaacaagaacacccccgccagagtggacgcctgcggcagcagcgtgaacggcgaggtgatcatgggccacagcagcctgaactgctacatcagagtggacaccggccacaagcacagagagtgccacgagtacgccgagaagagctacacccacaagcagtgcggcaagggcctgagctacagacacagcttccagacctgcgagagaccccacaccggcaagaagccctacgactgcaaggagtgcggcaagaccttcagcagccccggcaacctgagaagacacatggtggtgaagggcggcgacggcccctacaagtgcgagctgtgcggcaaggccttcttctggcccagcctgctgagaatgcacgagagaacccacaccggcgagaagccctacgagtgcaagcagtgcagcaaggccttccccgtgtacagcagctacctgagacacgagaagatccacaccggcgagaagccctacgagtgcaagcagtgcagcaaggccttccccgactacagcagctacctgagacacgagagaacccacaccggcgagaagccctacaagtgcaagcagtgcggcaaggccttcagcgtgagcggcagcctgagagtgcacgagagaatccacaccggcgagaagccctacacctgcaagcagtgcggcaaggccttctgccacctgggcagcttccagagacacatgatcatgcacagcggcgacggcccccacaagtgcaagatctgcggcaagggcttcgacttccccggcagcgccagaatccacgagggcacccacaccctggagaagccctacgagtgcaagcagtgcggcaagctgctgagccacagaagcagcttcagaagacacatgatggcccacaccggcgacggcccccacaagtgcaccgtgtgcggcaaggccttcgacagccccagcgtgttccagagacacgagagaacccacaccggcgagaagccctacgagtgcaagcagtgcggcaaggccttcagaaccagcagcagcctgagaaagcacgagaccacccacaccggcgagcagccctacaagtgcaagtgcggcaaggccttcagcgacctgttcagcttccagagccacgagaccacccacagcgaggaggagccctacgagtgcaaggagtgcggcaaggccttcagcagcttcaagtacttctgcagacacgagagaacccacagcgaggagaagagctacgagtgccagatctgcggcaaggccttcagcagattcagctacctgaagacccacgagagaacccacaccgccgagaagccctacgagtgcaagcagtgcagaaaggccttcttctggcccagcttcctgctgagacacgagagaacccacaccggcgagagaccctacgagtgcaagcactgcggcaaggccttcagcagaagcagcttctgcagagagcacgagagaacccacaccggcgagaagccctacgagtgcaaggagtgcggcaaggccttcagcagcctgagcagcttcaacagacacaagagaacccactggaaggacatcctgtag

SEQ ID NO: 106054 - DNA, 1992 bp, synthetic construct
  misc_feature 1..1992: note = Description of Artificial Sequence: Synthetic coding sequence
  source 1..1992: mol_type = other DNA
atggccctgtgctacggcaccttctggggctaccccaagatgctggaggccgccaacctgatggagggcctggtggacatcggcccctgggtgaccctgcccagaggccagcccgaggtgctggagtggggcctgcccaaggaccaggacagcgtggccttcgaggacgtggccgtgaacttcacccacgaggagtgggccctgctgggccccagccagaagaacctgtacagagacgtgatgagagagaccatcagaaacctgaactgcatcggcatgaagtgggagaaccagaacatcgacgaccagcaccagaacctgagaagaaaccccagatgcgacgtggtggagagattcggcaagagcaaggacggcagccagtgcggcgagaccctgagccagatcagaaacagcatcgtgaacaagaacacccccgccagagtggacgcctgcggcagcagcgtgaacggcgaggtgatcatgggccacagcagcctgaactgctacatcagagtggacaccggccacaagcacagagagtgccacgagtacgccgagaagagctacacccacaagcagtgcggcaagggcctgagctacagacacagcttccagacctgcgagagaccccacaccggcaagaagccctacgactgcaaggagtgcggcaagaccttcagcagccccggcaacctgagaagacacatggtggtgaagggcggcgacggcccctacaagtgcgagctgtgcggcaaggccttcttctggcccagcctgctgagaatgcacgagagaacccacaccggcgagaagccctacgagtgcaagcagtgcagcaaggccttccccgtgtacagcagctacctgagacacgagaagatccacaccggcgagaagccctacgagtgcaagcagtgcagcaaggccttccccgactacagcagctacctgagacacgagagaacccacaccggcgagaagccctacaagtgcaagcagtgcggcaaggccttcagcgtgagcggcagcctgagagtgcacgagagaatccacaccggcgagaagccctacacctgcaagcagtgcggcaaggccttctgccacctgggcagcttccagagacacatgatcatgcacagcggcgacggcccccacaagtgcaagatctgcggcaagggcttcgacttccccggcagcgccagaatccacgagggcacccacaccctggagaagccctacgagtgcaagcagtgcggcaagctgctgagccacagaagcagcttcagaagacacatgatggcccacaccggcgacggcccccacaagtgcaccgtgtgcggcaaggccttcgacagccccagcgtgttccagagacacgagagaacccacaccggcgagaagccctacgagtgcaagcagtgcggcaaggccttcagaaccagcagcagcctgagaaagcacgagaccacccacaccggcgagcagccctacaagtgcaagtgcggcaaggccttcagcgacctgttcagcttccagagccacgagaccacccacagcgaggaggagccctacgagtgcaaggagtgcggcaaggccttcagcagcttcaagtacttctgcagacacgagagaacccacagcgaggagaagagctacgagtgccagatctgcggcaaggccttcagcagattcagctacctgaagacccacgagagaacccacaccgccgagaagccctacgagtgcaagcagtgcagaaaggccttcttctggcccagcttcctgctgagacacgagagaacccacaccggcgagagaccctacgagtgcaagcactgcggcaaggccttcagcagaagcagcttctgcagagagcacgagagaacccacaccggcgagaagccctacgagtgcaaggagtgcggcaaggccttcagcagcctgagcagcttcaacagacacaagagaacccactggaaggacatcctgtag

SEQ ID NO: 106055 - DNA, 1914 bp, synthetic construct
  misc_feature 1..1914: note = Description of Artificial Sequence: Synthetic coding sequence
  source 1..1914: mol_type = other DNA
atggccctgtgctacggcaccttctggggctaccccaagatgctggaggccgccaacctgatggagggcctggtggacatcggcccctgggtgaccctgcccagaggccagcccgaggtgctggagtggggcctgcccaaggaccaggacagcgtggccttcgaggacgtggccgtgaacttcacccacgaggagtgggccctgctgggccccagccagaagaacctgtacagagacgtgatgagagagaccatcagaaacctgaactgcatcggcatgaagtgggagaaccagaacatcgacgaccagcaccagaacctgagaagaaaccccagatgcgacgtggtggagagattcggcaagagcaaggacggcagccagtgcggcgagaccctgagccagatcagaaacagcatcgtgaacaagaacacccccgccagagtggacgcctgcggcagcagcgtgaacggcgaggtgatcatgggccacagcagcctgaactgctacatcagagtggacaccggccacaagcacagagagtgccacgagtacgccgagaagagctacacccacaagcagtgcggcaagggcctgagctacagacacagcttccagacctgcgagagaccccacaccggcaagaagccctacgactgcaaggagtgcggcaagaccttcagcagccccggcaacctgagaagacacatggtggtgaagggcggcgacggcccctacaagtgcgagctgtgcggcaaggccttcttctggcccagcctgctgagaatgcacgagagaacccacaccggcgagaagccctacgagtgcaagcagtgcagcaaggccttccccgtgtacagcagctacctgagacacgagaagatccacaccggcgagaagccctacgagtgcaagcagtgcagcaaggccttccccgactacagcagctacctgagacacgagagaacccacaccggcgagaagccctacaagtgcaagcagtgcggcaaggccttcagcgtgagcggcagcctgagagtgcacgagagaatccacaccggcgagaagccctacacctgcaagcagtgcggcaaggccttctgccacctgggcagcttccagagacacatgatcatgcacagcggcgacggcccccacaagtgcaagatctgcggcaagggcttcgacttccccggcagcgccagaatccacgagggcacccacaccctggagaagccctacgagtgcaagcagtgcggcaagctgctgagccacagaagcagcttcagaagacacatgatggcccacaccggcgacggcccccacaagtgcaccgtgtgcggcaaggccttcgacagccccagcgtgttccagagacacgagagaacccacaccggcgagaagccctacgagtgcaagcagtgcggcaaggccttcagaaccagcagcagcctgagaaagcacgagaccacccacaccggcgagcagccctacaagtgcaagtgcggcaaggccttcagcgacctgttcagcttccagagccacgagaccacccacagcgaggaggagccctacgagtgcaaggagtgcggcaaggccttcagcagcttcaagtacttctgcagacacgagagaacccacagcgaggagaagagctacgagtgccagatctgcggcaaggccttcagcagattcagctacctgaagacccacgagagaacccacaccgccgagaagccctacgagtgcaagcagtgcagaaaggccttcttctggcccagcttcctgctgagacacgagagaacccacaccggcgagagaccctacgagtgcaagcactgcggcaaggccttcagcagaagcagcttctgcagagagcacgagagaacccacaccggcgagaagccctacgagtag

SEQ ID NO: 106056 - DNA, 1770 bp, synthetic construct
  misc_feature 1..1770: note = Description of Artificial Sequence: Synthetic coding sequence
  source 1..1770: mol_type = other DNA
atggacagcgtggccttcgaggacgtggccgtgaacttcacccacgaggagtgggccctgctgggccccagccagaagaacctgtacagagacgtgatgagagagaccatcagaaacctgaactgcatcggcatgaagtgggagaaccagaacatcgacgaccagcaccagaacctgagaagaaaccccagatgcgacgtggtggagagattcggcaagagcaaggacggcagccagtgcggcgagaccctgagccagatcagaaacagcatcgtgaacaagaacacccccgccagagtggacgcctgcggcagcagcgtgaacggcgaggtgatcatgggccacagcagcctgaactgctacatcagagtggacaccggccacaagcacagagagtgccacgagtacgccgagaagagctacacccacaagcagtgcggcaagggcctgagctacagacacagcttccagacctgcgagagaccccacaccggcaagaagccctacgactgcaaggagtgcggcaagaccttcagcagccccggcaacctgagaagacacatggtggtgaagggcggcgacggcccctacaagtgcgagctgtgcggcaaggccttcttctggcccagcctgctgagaatgcacgagagaacccacaccggcgagaagccctacgagtgcaagcagtgcagcaaggccttccccgtgtacagcagctacctgagacacgagaagatccacaccggcgagaagccctacgagtgcaagcagtgcagcaaggccttccccgactacagcagctacctgagacacgagagaacccacaccggcgagaagccctacaagtgcaagcagtgcggcaaggccttcagcgtgagcggcagcctgagagtgcacgagagaatccacaccggcgagaagccctacacctgcaagcagtgcggcaaggccttctgccacctgggcagcttccagagacacatgatcatgcacagcggcgacggcccccacaagtgcaagatctgcggcaagggcttcgacttccccggcagcgccagaatccacgagggcacccacaccctggagaagccctacgagtgcaagcagtgcggcaagctgctgagccacagaagcagcttcagaagacacatgatggcccacaccggcgacggcccccacaagtgcaccgtgtgcggcaaggccttcgacagccccagcgtgttccagagacacgagagaacccacaccggcgagaagccctacgagtgcaagcagtgcggcaaggccttcagaaccagcagcagcctgagaaagcacgagaccacccacaccggcgagcagccctacaagtgcaagtgcggcaaggccttcagcgacctgttcagcttccagagccacgagaccacccacagcgaggaggagccctacgagtgcaaggagtgcggcaaggccttcagcagcttcaagtacttctgcagacacgagagaacccacagcgaggagaagagctacgagtgccagatctgcggcaaggccttcagcagattcagctacctgaagacccacgagagaacccacaccgccgagaagccctacgagtgcaagcagtgcagaaaggccttcttctggcccagcttcctgctgagacacgagagaacccacaccggcgagagaccctacgagtgcaagcactgcggcaaggccttcagcagaagcagcttctgcagagagcacgagagaacccacaccggcgagaagccctacgagtag

SEQ ID NO: 106057 - DNA, 1623 bp, synthetic construct
  misc_feature 1..1623: note = Description of Artificial Sequence: Synthetic coding sequence
  source 1..1623: mol_type = other DNA
atgggcatcgtggagaaggccagcagcagcagcgacagcgtgaccttcgaggacgtggccgtgaacttcacccaggaggagtggaccctgctggaccccagccagaagaagctgtacagagacgtgatgtgggagaccttcagaaacctggccaccatcggcaccaagcagaaggagtggaacatcgaggagcagtacaagaaccagggcagaaacctgagaaaccacatggtggagagactgtgcgagagcaaggagggcagccacggcggcgagggcttcagccagatcgccaacctgagcctgaacaagaagacccccagcggcggcaagctgtgggagagcagcgtgtgcggcaaggtgctgagccaccacagcagcctgaacagacacatcagaagctacaccagacacaagctgtacaagtgccaggagtacggcgagaagccctacaagtgcaagaagtgcggcaagcccttcagctacctgcagagcttcaagaagcacaagagaacccacagcgccggcatcgtgtacaagtgcaaggcctgcggcaaggccttcagctgccagagaagcttccagatccacggcagaacccacaccggcgacaagcccttcaagtgcaaggagtgcggcaaggccttcagataccaccagagcgcccagaagcacgagaaggcccacaccggcgagaagccctacaagtgcaaggagtgcggcaagcccttcatctacagacacagcgccagagcccacgagagaaaccacaccgtgcagaagagatacgagtgcaagcagtgcggcaagacctacatcagcagcgtgggcttccaggcccacgagagaacccacaccggcgagaagccctacgagtgcaagaagtgcggcaaggtgttcgtgtaccacaacagcgcccagagacacgagaagacccacaccggcgagaagccctacaagtgcaaggagtgcggcaaggccttcagctaccactgcaccgcccagaagcacgagagaaaccacaccgcccagaagcactacgagtgcaagctgtgcggcaagacctacctgagccccctgggcttccaggcccacgagagcacccacaccggcgacaagcccttcgagtgcaagaagtgcggcaaggccttcagatactactacagcgcccagagacacgagagaacccacaccggcgagaagccctacaagtgcaaggagtgcggcaaggccttctactgctgcagcagcgccagaagacacgagagaatgcacaccgccaagaagcagtacgagtgcaagaagtgcggcaagacctacatcaccctggccggcttccagatccacgagagaacccacaccggcgagaagccctacgagtgcaagcagtgcggcaaggccttcagcagcagcagctacatccacatccacgagagaatccacaccggcgagaagccctacgagtgcaaggagtgcggcaagcccttcagcttcctgaccggcttcagagtgcacatgagaatgcacaccggcgagaagccctacaagtgcaaggactgcggcaacgccttcatctggagagccagcctgcagtaccacgtgaagaaggtgcacgccgagtag

SEQ ID NO: 106058 - DNA, 1848 bp, synthetic construct; identical to SEQ ID NO: 106053
  misc_feature 1..1848: note = Description of Artificial Sequence: Synthetic coding sequence
  source 1..1848: mol_type = other DNA

SEQ ID NO: 106059 - DNA, 984 bp, synthetic construct
  misc_feature 1..984: note = Description of Artificial Sequence: Synthetic coding sequence
  source 1..984: mol_type = other DNA
atggaggtggccgtgcccgtgaagcaggaggccgagggcctggccctggacagcccctggcacagattcagaagattccacctgggcgacgcccccggccccagagaggccctgggcctgctgagagccctgtgcagagactggctgagacccgaggtgcacaccaaggagcagatgctggagctgctggtgctggagcagttcctgagcgccctgcccgccgacacccaggcctgggtgtgcagcagacagccccagagcggcgaggaggccgtggccctgctggaggagctgtggggccccgccgccagccccgacggcagcagcgccaccagagtgccccaggacgtgacccagggccccggcgccaccggcggcaaggaggacagcggcatgatccccctggccggcaccgcccccggcgccgagggccccgcccccggcgacagccaggccgtgagaccctacaagcaggagcccagcagcccccccctggcccccggcctgcccgccttcctggccgcccccggcaccaccagctgccccgagtgcggcaagaccagcctgaagcccgcccacctgctgagacacagacagagccacagcggcgagaagccccacgcctgccccgagtgcggcaaggccttcagaagaaaggagcacctgagaagacacagagacacccaccccggcagccccggcagccccggccccgccctgagacccctgcccgccagagagaagccccacgcctgctgcgagtgcggcaagaccttctactggagagagcacctggtgagacacagaaagacccacagcggcgccagacccttcgcctgctgggagtgcggcaagggcttcggcagaagagagcacgtgctgagacaccagagaatccacggcagagccgccgccagcgcccagggcgccgtggcccccggccccgacggcggcggccccttccccccctggcccctgggctag

SEQ ID NO: 106060 - DNA, 1557 bp, synthetic construct
  misc_feature 1..1557: note = Description of Artificial Sequence: Synthetic coding sequence
  source 1..1557: mol_type = other DNA
atggccgtggccctgggctgcgccatccaggccagcctgaaccagggcagcgtgttccaggagtacgacaccgactgcgaggtgttcagacagagattcagacagttccagtacagagaggccgccggcccccacgaggccttcaacaagctgtgggagctgtgctgccagtggctgaagcccaagatgagaagcaaggagcagatcctggagctgctggtgctggagcagttcctgaccatcctgcccaccgagatcgagacctgggtgagagagcactgccccgagaacagagagagagtggtgagcctgatcgaggacctgcagagagagctggagatccccgagcagcaggtggacatgcacgacatgctgctggaggagctggcccccgtgggcaccgcccacatcccccccaccatgcacctggagagccccgccctgcaggtgatgggccccgcccaggaggcccccgtggccgaggcctggatcccccaggccggcccccccgagctgaactacggcgccaccggcgagtgccagaacttcctggaccccggctaccccctgcccaagctggacatgaacttcagcctggagaacagagaggagccctgggtgaaggagctgcaggacagcaaggagatgaagcagctgctggacagcaagatcggcttcgagatcggcatcgagaacgaggaggacaccagcaagcagaagaagatggagaccatgtaccccttcatcgtgaccctggagggcaacgccctgcagggccccatcctgcagaaggactacgtgcagctggagaaccagtgggagaccccccccgaggacctgcagaccgacctggccaagctggtggaccagcagaaccccaccctgggcgagacccccgagaacagcaacctggaggagcccctgaaccccaagccccacaagaagaagagccccggcgagaagccccacagatgcccccagtgcggcaagtgcttcgccagaaagagccagctgaccggccaccagagaatccacagcggcgaggagccccacaagtgccccgagtgcggcaagagattcctgagaagcagcgacctgtacagacaccagagactgcacaccggcgagagaccctacgagtgcaccgtgtgcaagaagagattcaccagaagaagccacctgatcggccaccagagaacccacagcgaggaggagacctacaagtgcctggagtgcggcaagagcttctgccacggcagcagcctgaagagacacctgaagacccacaccggcgagaagccccacagatgccacaactgcggcaagagcttcagcagactgaccgccctgaccctgcaccagagaacccacaccgaggagagacccttcaagtgcaactactgcggcaagagcttcagacagagacccagcctggtgatccacctgagaatccacaccggcgagaagccctacaagtgcacccactgcagcaagagcttcagacagagagccggcctgatcatgcaccaggtgacccacttcagaggcctgatctag

SEQ ID NO: 106061 - DNA, 384 bp, synthetic construct
  misc_feature 1..384: note = Description of Artificial Sequence: Synthetic coding sequence
  source 1..384: mol_type = other DNA
atggccgtggccctgggctgcgccatccaggccagcctgaaccagggcagcgtgttccaggagtacgacaccgactgcgaggtgttcagacagagattcagacagttccagtacagagaggccgccggcccccacgaggccttcaacaagctgtgggagctgtgctgccagtggctgaagcccaagatgagaagcaaggagcagatcctggagctgctggtgctggagcagttcctgaccatcctgcccaccgagatcgagacctgggtgagagagcactgccccgagaacagagagagagtggtgagcctgatcgaggacctgcagagagagctggagatccccgagcagcagaccttcgccgccgagtacagccactactag

SEQ ID NO: 106062 - DNA, 495 bp, synthetic construct
  misc_feature 1..495: note = Description of Artificial Sequence: Synthetic coding sequence
  source 1..495: mol_type = other DNA
atggccgtggccctgggctgcgccatccaggccagcctgaaccagggcagcgtgttccaggagtacgacaccgactgcgaggtgttcagacagagattcagacagttccagtacagagaggccgccggcccccacgaggccttcaacaagctgtgggagctgtgctgccagtggctgaagcccaagatgagaagcaaggagcagatcctggagctgctggtgctggagcagttcctgaccatcctgcccaccgagatcgagacctgggtgagagagcactgccccgagaacagagagagagtggtgagcctgatcgaggacctgcagagagagctggagatccccgagcagcaggtgagaaaggagtgcggcatcttcgtgatcggccccaaggaggtggccgaggccgccggcaccagaccccacatctgcctgtacgtgatcccccagccccaggacttcagcagagtgctgttcctgttcctgttctgctag

SEQ ID NO: 106063 - DNA, 2049 bp, synthetic construct
  misc_feature 1..2049: note = Description of Artificial Sequence: Synthetic coding sequence
  source 1..2049: mol_type = other DNA
atgaccaagagcaaggaggccgtgaccttcaaggacgtggccgtggtgttcagcgaggaggagctgcagctgctggacctggcccagagaaagctgtacagagacgtgatgctggagaacttcagaaacgtggtgagcgtgggccaccagagcacccccgacggcctgccccagctggagagagaggagaagctgtggatgatgaagatggccacccagagagacaacagcagcggcgccaagaacctgaaggagatggagaccctgcaggaggtgggcctgagatacctgccccacgaggagctgttctgcagccagatctggcagcagatcaccagagagctgatcaagtaccaggacagcgtggtgaacatccagagaaccggctgccagctggagaagagagacgacctgcactacaaggacgagggcttcagcaaccagagcagccacctgcaggtgcacagagtgcacaccggcgagaagccctacaagggcgagcactgcgtgaagagcttcagctggagcagccacctgcagatcaaccagagagcccacgccggcgagaagccctacaagtgcgagaagtgcgacaacgccttcagaagattcagcagcctgcaggcccaccagagagtgcacagcagagccaagagctacaccaacgacgccagctacagaagcttcagccagagaagccacctgccccaccaccagagagtgcccaccggcgagaacccctacaagtacgaggagtgcggcagaaacgtgggcaagagcagccactgccaggcccccctgatcgtgcacaccggcgagaagccctacaagtgcgaggagtgcggcgtgggcttcagccagagaagctacctgcaggtgcacctgaaggtgcacaccggcaagaagccctacaagtgcgaggagtgcggcaagagcttcagctggagaagcagactgcaggcccacgagagaatccacaccggcgagaagccctacaagtgcaacgcctgcggcaagagcttcagctacagcagccacctgaacatccactgcagaatccacaccggcgagaagccctacaagtgcgaggagtgcggcaagggcttcagcgtgggcagccacctgcaggcccaccagatcagccacaccggcgagaagccctacaagtgcgaggagtgcggcaagggcttctgcagagccagcaacctgctggaccaccagagaggccacaccggcgagaagccctaccagtgcgacgcctgcggcaagggcttcagcagaagcagcgacttcaacatccacttcagagtgcacaccggcgagaagccctacaagtgcgaggagtgcggcaagggcttcagccaggccagcaacctgctggcccaccagagaggccacaccggcgagaagccctacaagtgcggcacctgcggcaagggcttcagcagaagcagcgacctgaacgtgcactgcagaatccacaccggcgagaagccctacaagtgcgagagatgcggcaaggccttcagccagttcagcagcctgcaggtgcaccagagagtgcacaccggcgagaagccctaccagtgcgccgagtgcggcaagggcttcagcgtgggcagccagctgcaggcccaccagagatgccacaccggcgagaagccctaccagtgcgaggagtgcggcaagggcttctgcagagccagcaacttcctggcccacagaggcgtgcacaccggcgagaagccctacagatgcgacgtgtgcggcaagagattcagacagagaagctacctgcaggcccaccagagagtgcacaccggcgagagaccctacaagtgcgaggagtgcggcaaggtgttcagctggagcagctacctgcaggcccaccagagagtgcacaccggcgagaagccctacaagtgcgaggagtgcggcaagggcttcagctggagcagcagcctgatcatccaccagagagtgcacgccgacgacgagggcgacaaggacttccccagcagcgaggacagccacagaaagaccagatag

SEQ ID NO: 106064 - DNA, 1617 bp, synthetic construct
  misc_feature 1..1617: note = Description of Artificial Sequence: Synthetic coding sequence
  source 1..1617: mol_type = other DNA
atgaccaagagcaaggaggccgtgaccttcaaggacgtggccgtggtgttcagcgaggaggagctgcagctgctggacctggcccagagaaagctgtacagagacgtgatgctggagaacttcagaaacgtggtgagcgtgggccaccagagcacccccgacggcctgccccagctggagagagaggagaagctgtggatgatgaagatggccacccagagagacaacagcagcggcgccaagaacctgaaggagatggagaccctgcaggaggtgggcctgagatacctgccccacgaggagctgttctgcagccagatctggcagcagatcaccagagagctgatcaagtaccaggacagcgtggtgaacatccagagaaccggctgccagctggagaagagagacgacctgcactacaaggacgagggcttcagcaaccagagcagccacctgcaggtgcacagagtgcacaccggcgagaagccctacaagggcgagcactgcgtgaagagcttcagctggagcagccacctgcagatcaaccagagagcccacgccggcgagaagccctacaagtgcgagaagtgcgacaacgccttcagaagattcagcagcctgcaggcccaccagagagtgcacagcagagccaagagctacaccaacgacgccagctacagaagcttcagccagagaagccacctgccccaccaccagagagtgcccaccggcgagaacccctacaagtacgaggagtgcggcagaaacgtgggcaagagcagccactgccaggcccccctgatcgtgcacaccggcgagaagccctacaagtgcgaggagtgcggcgtgggcttcagccagagaagctacctgcaggtgcacctgaaggtgcacaccggcaagaagccctacaagtgcgaggagtgcggcaagagcttcagctggagaagcagactgcaggcccacgagagaatccacaccggcgagaagccctacaagtgcaacgcctgcggcaagagcttcagctacagcagccacctgaacatccactgcagaatccacaccggcgagaagccctacaagtgcgaggagtgcggcaagggcttcagcgtgggcagccacctgcaggcccaccagatcagccacaccggcgagaagccctacaagtgcgaggagtgcggcaagggcttctgcagagccagcaacctgctggaccaccagagaggccacaccggcgagaagccctaccagtgcgacgcctgcggcaagggcttcagcagaagcagcgacttcaacatccacttcagagtgcacaccggcaagaaccccatcaacgtgagaagcgtggccagagccagcgccagaccccagatcttctggcccatcaaggaggccaccctggagagaaaccccaccaacgtggtgcacgtgggcagagccagcgtgggcgcccagatcctgatgtacaccgtggagagcacccaggagagaaaccccatcaacgccagaggcgtggtgagacccagcgtgagcagccccgccttcagatgcatcagagagttcaccctggagagaaaccacatcagcgtgcagagcgtgggcagagccagcgtgtag

SEQ ID NO: 106065 - DNA, 1689 bp, synthetic construct
  misc_feature 1..1689: note = Description of Artificial Sequence: Synthetic coding sequence
  source 1..1689: mol_type = other DNA
atggccgccgcctggatggcccccgcccaggagagcgtgaccttcgaggacgtggccgtgaccttcacccaggaggagtggggccagctggacgtgacccagagagccctgtacgtggaggtgatgctggagacctgcggcctgctggtggccctgggcgacagcaccaagcccgagaccgtggagcccatccccagccacctggccctgcccgaggaggtgagcctgcaggagcagctggcccagggcgtgcccagatacagctacctgggccaggccatggaccaggacggccccagcgagatgcaggagtacttcctgagacccggcaccgacccccagagcgagaagctgcacggcaagatgagcctggagcacgagggcctggccaccgccgacggcatctgcagcatgatgatccagaaccaggtgagccccgaggacgccctgtacggcttcgacagctacggccccgtgaccgacagcctgatccacgagggcgagaacagctacaagttcgaggagatgttcaacgagaactgcttcctggtgcagcacgagcagatcctgcccagagtgaagccctacgactgccccgagtgcggcaaggccttcggcaagagcaagcacctgctgcagcaccacatcatccacaccggcgagaagccctacaagtgcctggagtgcggcaaggacttcaacagaagaagccacctgaccagacaccagagaacccacaacggcgacaagcccttcgtgtgcagcgagtgcggcagaaccttcaacagaggcagccacctgaccagacaccagagagtgcacagcggcgagaagcccttcgtgtgcaacgagtgcggcaaggccttcacctacagaagcaacttcgtgctgcacaacaagagccacaacgagaagaagcccttcgcctgcagcgagtgcggcaagggcttctacgagagcaccgccctgatccagcacttcatcatccacaccggcgagagacccttcaagtgcctggagtgcggcaaggccttcaactgcagaagccacctgaagcagcacgagagaatccacaccggcgagaagcccttcgtgtgcagccagtgcggcaaggccttcacccactacagcacctacgtgctgcacgagagagcccacaccggcgagaagcccttcgagtgcaaggagtgcggcaaggccttcagcatcagaaaggacctgatcagacacttcaacatccacaccggcgagaagccctacgagtgcctgcagtgcggcaaggccttcaccagaatgagcggcctgaccagacaccagtggatccacaccggcgagaagccctacgtgtgcatccagtgcggcaaggccttctgcagaaccaccaacctgatcagacacttcagcatccacaccggcgagaagccctacgagtgcgtggagtgcggcaaggccttcaacagaagaagccccctgaccagacaccagagaatccacaccgccgagaagagccacgagcccatccagagcggcaacgtgagctgcgagagcaccgacctgatccagcacagcatcatccacaccgagagcagccccgtgagcgccgtgaacatggagacccccagcatcgccgcccacagcagcagcctggacatcaacggcttcatcgtggaggagaccctgcccctgtag

SEQ ID NO: 106066 - DNA, 1566 bp, synthetic construct
  misc_feature 1..1566: note = Description of Artificial Sequence: Synthetic coding sequence
  source 1..1566: mol_type = other DNA
atgctggagacctgcggcctgctggtggccctgggcgacagcaccaagcccgagaccgtggagcccatccccagccacctggccctgcccgaggaggtgagcctgcaggagcagctggcccagggcgtgcccagatacagctacctgggccaggccatggaccaggacggccccagcgagatgcaggagtacttcctgagacccggcaccgacccccagagcgagaagctgcacggcaagatgagcctggagcacgagggcctggccaccgccgacggcatctgcagcatgatgatccagaaccaggtgagccccgaggacgccctgtacggcttcgacagctacggccccgtgaccgacagcctgatccacgagggcgagaacagctacaagttcgaggagatgttcaacgagaactgcttcctggtgcagcacgagcagatcctgcccagagtgaagccctacgactgccccgagtgcggcaaggccttcggcaagagcaagcacctgctgcagcaccacatcatccacaccggcgagaagccctacaagtgcctggagtgcggcaaggacttcaacagaagaagccacctgaccagacaccagagaacccacaacggcgacaagcccttcgtgtgcagcgagtgcggcagaaccttcaacagaggcagccacctgaccagacaccagagagtgcacagcggcgagaagcccttcgtgtgcaacgagtgcggcaaggccttcacctacagaagcaacttcgtgctgcacaacaagagccacaacgagaagaagcccttcgcctgcagcgagtgcggcaagggcttctacgagagcaccgccctgatccagcacttcatcatccacaccggcgagagacccttcaagtgcctggagtgcggcaaggccttcaactgcagaagccacctgaagcagcacgagagaatccacaccggcgagaagcccttcgtgtgcagccagtgcggcaaggccttcacccactacagcacctacgtgctgcacgagagagcccacaccggcgagaagcccttcgagtgcaaggagtgcggcaaggccttcagcatcagaaaggacctgatcagacacttcaacatccacaccggcgagaagccctacgagtgcctgcagtgcggcaaggccttcaccagaatgagcggcctgaccagacaccagtggatccacaccggcgagaagccctacgtgtgcatccagtgcggcaaggccttctgcagaaccaccaacctgatcagacacttcagcatccacaccggcgagaagccctacgagtgcgtggagtgcggcaaggccttcaacagaagaagccccctgaccagacaccagagaatccacaccgccgagaagagccacgagcccatccagagcggcaacgtgagctgcgagagcaccgacctgatccagcacagcatcatccacaccgagagcagccccgtgagcgccgtgaacatggagacccccagcatcgccgcccacagcagcagcctggacatcaacggcttcatcgtggaggagaccctgcccctgtag

SEQ ID NO: 106067 - DNA, 1623 bp, synthetic construct
  misc_feature 1..1623: note = Description of Artificial Sequence: Synthetic coding sequence
  source 1..1623: mol_type = other DNA
atggcccacgagctggtgatgttcagagacgtggccatcgacgtgagccaggaggagtgggagtgcctgaaccccgcccagagaaacctgtacaaggaggtgatgctggagaactacagcaacctggtgagcctgggcctgagcgtgagcaagcccgccgtgatcagcagcctggagcagggcaaggagccctggatggtggtgagagaggagaccggcagatggtgccccgacctggccagcagagacgagccccagaagctgagccccaagagagacatctacgagaccgagctgagccagtgggtgaacatggaggagttcaagagccacagccccgagagaagcatcttcagcgccatctgggagggcaactgccacttcgagcagcaccagggccaggaggagggctacttcagacagctgatgatcaaccacgagaacatgcccatcttcagccagcacaccctgctgacccaggagttctacgacagagagaagatcagcgagtgcaagaagtgcagaaagatcttcagctaccacctgttcttcagccaccacaagagaacccacagcaaggagctgagcgagtgcaaggagtgcaccgagatcgtgaacaccccctgcctgttcaagcagcagaccatccagaacggcgacaagtgcaacgagtgcaaggagtgctggaaggccttcgtgcactgcagccagctgaagcacctgagaatccacaacggcgagaagagatacgagtgcaacgagtgcggcaaggccttcaactacggcagcgagctgaccctgcaccagagaatccacaccggcgagaagccctacgagtgcaaggagtgcggcaaggccttcagacagagaagccagctgacccagcaccagagactgcacaccggcgagaagccctacgagtgcaagcagtgcggcaaggccttcatcagaggcttccagctgaccgagcacctgagactgcacaccggcgagaagccctacgagtgcaaggagtgcggcaagaccttcagacacagaagccacctgaccatccaccagagaatccacaccggcgagaagccctacgagtgcagagagtgcggcaaggccttcagctaccacagcagcttcagccaccaccagaagatccacagcggcaagaagccctacgagtgccacgagtgcggcaaggccttctgcgacggcctgcagctgaccctgcaccagagaatccacaccggcgagaagccctacgagtgcaaggagtgcggcaagaccttcagacagtgcagccacctgaagagacaccagagaatccacaccggcgagaagccccacgagtgcatgatctgcggcaaggccttcagactgcacagccacctgatccagcaccagagaatccacaccggcgagaagccctacgagtgcaaggagtgcggcaaggccttcagctaccacagcagcttcagccaccaccagagaatccacagcggcaagaagccctaccagtgcggcaaggccttcaaccacagactgcagctgaacctgcaccagaccctgcacaccggcgagaagcccgtgagattccccctgctgcccccccaccccagcctggccagctag

SEQ ID NO: 106068 - DNA, 741 bp, synthetic construct
  misc_feature 1..741: note = Description of Artificial Sequence: Synthetic coding sequence
  source 1..741: mol_type = other DNA
atggtggtgagagaggagaccggcagatggtgccccggcacctggaagacctggggcttccacaacaacttcctggacaacaacgaggccaccgacatcaacgccgacctggccagcagagacgagccccagaagctgagccccaagagagacatctacgagaccgagctgagccagtgggtgaacatggaggagttcaagagccacagccccgagagaagcatcttcagcgccatctgggagggcaactgccacttcgagcagcaccagggccaggaggagggctacttcagacagctgatgatcaaccacgagaacatgcccatcttcagccagcacaccctgctgacccaggagttctacgacagagagaagatcagcgagtgcaagaagtgcagaaagatcttcagctaccacctgttcttcagccaccacaagtgcagccacctgaagagacaccagagaatccacaccggcgagaagccccacgagtgcatgatctgcggcaaggccttcagactgcacagccacctgatccagcaccagagaatccacaccggcgagaagccctacgagtgcaaggagtgcggcaaggccttcagctaccacagcagcttcagccaccaccagagaatccacagcggcaagaagccctaccagtgcggcaaggccttcaaccacagactgcagctgaacctgcaccagaccctgcacaccggcgagaagcccgtgagattctag

SEQ ID NO: 106069 - DNA, 1692 bp, synthetic construct
  misc_feature 1..1692: note = Description of Artificial Sequence: Synthetic coding sequence
  source 1..1692: mol_type = other DNA
atggcccacgagctggtgatgttcagagacgtggccatcgacgtgagccaggaggagtgggagtgcctgaaccccgcccagagaaacctgtacaaggaggtgatgctggagaactacagcaacctggtgagcctgggcctgagcgtgagcaagcccgccgtgatcagcagcctggagcagggcaaggagccctggatggtggtgagagaggagaccggcagatggtgccccggcacctggaagacctggggcttccacaacaacttcctggacaacaacgaggccaccgacatcaacgccgacctggccagcagagacgagccccagaagctgagccccaagagagacatctacgagaccgagctgagccagtgggtgaacatggaggagttcaagagccacagccccgagagaagcatcttcagcgccatctgggagggcaactgccacttcgagcagcaccagggccaggaggagggctacttcagacagctgatgatcaaccacgagaacatgcccatcttcagccagcacaccctgctgacccaggagttctacgacagagagaagatcagcgagtgcaagaagtgcagaaagatcttcagctaccacctgttcttcagccaccacaagagaacccacagcaaggagctgagcgagtgcaaggagtgcaccgagatcgtgaacaccccctgcctgttcaagcagcagaccatccagaacggcgacaagtgcaacgagtgcaaggagtgctggaaggccttcgtgcactgcagccagctgaagcacctgagaatccacaacggcgagaagagatacgagtgcaacgagtgcggcaaggccttcaactacggcagcgagctgaccctgcaccagagaatccacaccggcgagaagccctacgagtgcaaggagtgcggcaaggccttcagacagagaagccagctgacccagcaccagagactgcacaccggcgagaagccctacgagtgcaagcagtgcggcaaggccttcatcagaggcttccagctgaccgagcacctgagactgcacaccggcgagaagccctacgagtgcaaggagtgcggcaagaccttcagacacagaagccacctgaccatccaccagagaatccacaccggcgagaagccctacgagtgcagagagtgcggcaaggccttcagctaccacagcagcttcagccaccaccagaagatccacagcggcaagaagccctacgagtgccacgagtgcggcaaggccttctgcgacggcctgcagctgaccctgcaccagagaatccacaccggcgagaagccctacgagtgcaaggagtgcggcaagaccttcagacagtgcagccacctgaagagacaccagagaatccacaccggcgagaagccccacgagtgcatgatctgcggcaaggccttcagactgcacagccacctgatccagcaccagagaatccacaccggcgagaagccctacgagtgcaaggagtgcggcaaggccttcagctaccacagcagcttcagccaccaccagagaatccacagcggcaagaagccctaccagtgcggcaaggccttcaaccacagactgcagctgaacctgcaccagaccctgcacaccggcgagaagcccgtgagattccccctgctgcccccccaccccagcctggccagctag

SEQ ID NO: 106070 - DNA, 777 bp, synthetic construct
  misc_feature 1..777: note = Description of Artificial Sequence: Synthetic coding sequence
  source 1..777: mol_type = other DNA
gagaagagatacgagtgcaacgagtgcggcaaggccttcaactacggcagcgagctgaccctgcaccagagaatccacaccggcgagaagccctacgagtgcaaggagtgcggcaaggccttcagacagagaagccagctgacccagcaccagagactgcacaccggcgagaagccctacgagtgcaagcagtgcggcaaggccttcatcagaggcttccagctgaccgagcacctgagactgcacaccggcgagaagccctacgagtgcaaggagtgcggcaagaccttcagacacagaagccacctgaccatccaccagagaatccacaccggcgagaagccctacgagtgcagagagtgcggcaaggccttcagctaccacagcagcttcagccaccaccagaagatccacagcggcaagaagccctacgagtgccacgagtgcggcaaggccttctgcgacggcctgcagctgaccctgcaccagagaatccacaccggcgagaagccctacgagtgcaaggagtgcggcaagaccttcagacagtgcagccacctgaagagacaccagagaatccacaccggcgagaagccccacgagtgcatgatctgcggcaaggccttcagactgcacagccacctgatccagcaccagagaatccacaccggcgagaagccctacgagtgcaaggagtgcggcaaggccttcagctaccacagcagcttcagccaccaccagagaatccacagcgacgccaccaccgccatcagctag

SEQ ID NO: 106071 - DNA, 1311 bp, synthetic construct
  misc_feature 1..1311: note = Description of Artificial Sequence: Synthetic coding sequence
  source 1..1311: mol_type = other DNA
atggaggagttcaagagccacagccccgagagaagcatcttcagcgccatctgggagggcaactgccacttcgagcagcaccagggccaggaggagggctacttcagacagctgatgatcaaccacgagaacatgcccatcttcagccagcacaccctgctgacccaggagttctacgacagagagaagatcagcgagtgcaagaagtgcagaaagatcttcagctaccacctgttcttcagccaccacaagagaacccacagcaaggagctgagcgagtgcaaggagtgcaccgagatcgtgaacaccccctgcctgttcaagcagcagaccatccagaacggcgacaagtgcaacgagtgcaaggagtgctggaaggccttcgtgcactgcagccagctgaagcacctgagaatccacaacggcgagaagagatacgagtgcaacgagtgcggcaaggccttcaactacggcagcgagctgaccctgcaccagagaatccacaccggcgagaagccctacgagtgcaaggagtgcggcaaggccttcagacagagaagccagctgacccagcaccagagactgcacaccggcgagaagccctacgagtgcaagcagtgcggcaaggccttcatcagaggcttccagctgaccgagcacctgagactgcacaccggcgagaagccctacgagtgcaaggagtgcggcaagaccttcagacacagaagccacctgaccatccaccagagaatccacaccggcgagaagccctacgagtgcagagagtgcggcaaggccttcagctaccacagcagcttcagccaccaccagaagatccacagcggcaagaagccctacgagtgccacgagtgcggcaaggccttctgcgacggcctgcagctgaccctgcaccagagaatccacaccggcgagaagccctacgagtgcaaggagtgcggcaagaccttcagacagtgcagccacctgaagagacaccagagaatccacaccggcgagaagccccacgagtgcatgatctgcggcaaggccttcagactgcacagccacctgatccagcaccagagaatccacaccggcgagaagccctacgagtgcaaggagtgcggcaaggccttcagctaccacagcagcttcagccaccaccagagaatccacagcggcaagaagccctaccagtgcggcaaggccttcaaccacagactgcagctgaacctgcaccagaccctgcacaccggcgagaagcccgtgagattccccctgctgcccccccaccccagcctggccagctag

SEQ ID NO: 106072 - DNA, 1692 bp, synthetic construct; identical to SEQ ID NO: 106069
  misc_feature 1..1692: note = Description of Artificial Sequence: Synthetic coding sequence
  source 1..1692: mol_type = other DNA

SEQ ID NO: 106073 - DNA, 1788 bp, synthetic construct
  misc_feature 1..1788: note = Description of Artificial Sequence: Synthetic coding sequence
  source 1..1788: mol_type = other DNA
atgagagagaccctggaggccctgagcagcctgggcttcagcgtgggccagcccgagatggccccccagagcgagcccagagagggcagccacaacgcccaggagcagatgagcagcagcagagaggagagagccctgggcgtgtgcagcggccacgaggcccccacccccgaggagggcgcccacaccgagcaggccgaggccccctgcagaggccaggcctgcagcgcccagaaggcccagcccgtgggcacctgccccggcgaggagtggatgatcagaaaggtgaaggtggaggacgaggaccaggaggccgaggaggaggtggagtggccccagcacctgagcctgctgcccagccccttccccgcccccgacctgggccacctggccgccgcctacaagctggagcccggcgcccccggcgccctgagcggcctggccctgagcggctggggccccatgcccgagaagccctacggctgcggcgagtgcgagagaagattcagagaccagctgaccctgagactgcaccagagactgcacagaggcgagggcccctgcgcctgccccgactgcggcagaagcttcacccagagagcccacatgctgctgcaccagagaagccacagaggcgagagacccttcccctgcagcgagtgcgacaagagattcagcaagaaggcccacctgaccagacacctgagaacccacaccggcgagagaccctacccctgcgccgagtgcggcaagagattcagccagaagatccacctgggcagccaccagaagacccacaccggcgagagacccttcccctgcaccgagtgcgagaagagattcagaaagaagacccacctgatcagacaccagagaatccacaccggcgagagaccctaccagtgcgcccagtgcgccagaagcttcacccacaagcagcacctggtgagacaccagagagtgcaccagaccgccggccccgccagacccagccccgacagcagcgccagcccccacagcaccgcccccagccccacccccagcttccccggccccaagcccttcgcctgcagcgactgcggcctgagcttcggctggaagaagaacctggccacccaccagtgcctgcacagaagcgagggcagacccttcggctgcgacgagtgcgccctgggcgccaccgtggacgcccccgccgccaagcccctggccagcgcccccggcggccccggctgcggccccggcagcgaccccgtggtgccccagagagcccccagcggcgagagaagcttcttctgccccgactgcggcagaggcttcagccacggccagcacctggccagacaccccagagtgcacaccggcgagagacccttcgcctgcacccagtgcgacagaagattcggcagcagacccaacctggtggcccacagcagagcccacagcggcgccagacccttcgcctgcgcccagtgcggcagaagattcagcagaaagagccacctgggcagacaccaggccgtgcacaccggcagcagaccccacgcctgcgccgtgtgcgccagaagcttcagcagcaagaccaacctggtgagacaccaggccatccacaccggcagcagacccttcagctgcccccagtgcggcaagagcttcagcagaaagacccacctggtgagacaccagctgatccacggcgaggccgcccacgccgcccccgacgccgccctggccgcccccgcctggagcgccccccccgaggtggcccccccccccctgttcttctag

SEQ ID NO: 106074 - DNA, 11778 bp, synthetic construct
  misc_feature 1..11778: note = Description of Artificial Sequence: Synthetic coding sequence
  source 1..11778: mol_type = other DNA
atgcccggcgagagacccagaggcgcccccccccccaccatgaccggcgacctgcagcccagacaggtggccagcagccccggccaccccagccagccccccctggaggacaacacccccgccaccagaaccaccaagggcgccagagaggccggcggccaggcccaggccatggagctgcccgaggcccagcccagacaggccagagacggcgagctgaagccccccagcctgagaggccaggcccccagcagcacccccggcaagagaggcagcccccagaccccccccggcagaagccccctgcaggcccccagcagactggccggcagagccgagggcagccccccccagagatacatcctgggcatcgccagcagcagaaccaagcccaccctggacgagacccccgagaacccccagctggaggccgcccagctgcccgaggtggacaccccccagggccccggcaccggcgcccccctgagacccggcctgcccagaaccgaggcccagcccgccgccgaggagctgggcttccacagatgcttccaggagccccccagcagcttcaccagcaccaactacaccagccccagcgccacccccagaccccccgcccccggccccccccagagcagaggcaccagccccctgcagcccggcagctaccccgagtaccaggccagcggcgccgacagctggccccccgccgccgagaacagcttccccggcgccaacttcggcgtgccccccgccgagcccgagcccatccccaagggcagcagacccggcggcagccccagaggcgtgagcttccagttccccttccccgccctgcacggcgccagcaccaagcccttccccgccgacgtggccggccacgccttcaccaacggccccctggtgttcgccttccaccagccccagggcgcctggcccgaggaggccgtgggcaccggccccgcctaccccctgcccacccagcccgcccccagccccctgccctgctaccagggccagcccggcggcctgaacagacacagcgacctgagcggcgccctgagcagccccggcgccgcccacagcgcccccagacccttcagcgacagcctgcacaagagcctgaccaagatcctgcccgagagaccccccagcgcccaggacggcctgggcagcaccagaggcccccccagcagcctgccccagagacacttccccggccaggcctacagagccagcggcgtggacaccagccccggcccccccgacaccgagctggccgcccccggccccccccccgccagactgccccagctgtgggaccccaccgccgccccctaccccaccccccccggcggccccctggccgccaccagaagcatgttcttcaacggccagcccagccccggccagagactgtgcctgccccagagcgcccccctgccctggccccaggtgctgcccaccgccagacccagcccccacggcatggagatgctgagcagactgcccttccccgccggcggccccgagtggcagggcggcagccagggcgccctgggcaccgccggcaagacccccggccccagagagaagctgcccgccgtgagaagcagccagggcggcagccccgccctgttcacctacaacggcatgaccgaccccggcgcccagcccctgttcttcggcgtggcccagccccaggtgagcccccacggcacccccagcctgcccccccccagagtggtgggcgccagccccagcgagagccccctgcccagccccgccaccaacaccgccggcagcacctgcagcagcctgagccccatgagcagcagccccgccaaccccagcagcgaggagagccagctgcccggccccctgggccccagcgccttcttccacccccccacccacccccaggagaccggcagccccttccccagccccgagcccccccacagcctgcccacccactaccagcccgagcccgccaaggccttccccttccccgccgacggcctgggcgccgagggcgccttccagtgcctggaggagacccccttcccccacgagggccccgaggtgggcagaggcggcctgcagggcttccccagagccccccccccctaccccacccaccacttcagcctgagcagcgccagcctggaccagctggacgtgctgctgacctgcagacagtgcgacagaaactacagcagcctggccgccttcctggcccacagacagttctgcggcctgctgctggccagagccaaggacggccaccagagaagccccggcccccccggcctgcccagcccccccgccgcccccagagtgcccgccgacgcccacgccggcctgctgagccacgccaagaccttcctgctggccggcgacgcccaggccgagggcaaggacgaccccctgagaaccggcttcctgcccagcctggccgccacccccttccccctgcccgccagcgacctggacatggaggacgacgccaagctggacagcctgatcaccgaggccctgaacggcatggagtaccagagcgacaaccccgagatcgacagcagcttcatcgacgtgttcgccgacgaggagcccagcggccccagaggccccagcagcggccaccccctgaagagcaaggccggcgtgacccccgagagcaaggcccccccccccctgcccgccgccacccccgacccccagacccccagacccggcgacagaggctgccccgccagaggcagacccaagaccagaagcctgggcctggcccccaccgaggccgacgcccccagccagggcagacagcagagaagaggcaagcagctgaagctgttcagaaaggacctggacagcggcggcgccgccgagggcagcggcagcggcggcggcggcagagccagcggcctgagacccagaagaaacgacggcctgggcgagagacccccccccagacccagaagacccagaacccaggcccccggcagcagagccgaccccgcccccagagtgcccagagccgccgccctgcccgaggagaccagaagcagcagaagaagaagactgccccccagaaaggaccccagaaagagaaaggccagaggcggcgcctggggcaaggagctgatcctgaagatcgtgcagcagaagaacagactgagagagtacgacttcgccagcgagagcgaggaggacgagcagcccccccccagaggccccggcttcagaggcagaagaggcagaggcgagaagagaaaggaggtggagctgacccagggccccagagaggacgagccccagaagcccagaaaggccgccagacaggaggccggcggcgacggcgcccccgccaaccccgaggagcccggcggcagcagacccggccccggcagaagcccccaggccagaggccccagcagaagcctggagaccggcgccgccgccagagagggcggccccaagtgcgccgacagacccagcgtggcccccaaggaccccctgcaggtgcccaccaacaccgagaccagcgaggagaccagacccagcctggacttcccccaggaggccaaggagcccgagaccgccgaggagagcgcccccgacagcaccgagttcaccgaggccctgagaagcccccccgccgcctgcgccggcgagatgggcgccagccccggcctgctgatccccgagcagcccccccccagcagacacgacaccggcacccccaagcccagcggcagcctggccaacaccgccccccacggcagcagccccacccccggcgtgggcagcctgctgggcggccccggcggcacccaggcccccgtgagccacaacagcaaggacccccccgccagacagcccggcgagttcctggcccccgtggccaaccccagcagcaccgcctgccccaagcccagcgtgctgagcagcaagatcagcagcttcggctgcgaccccgccggcttcaacagagaccccctgggcgtgcccgtggccaagaagggcccccagccctacagcagcccccacagcgagctgttcctgggccccaaggacctggccggctgcttcctggaggagctgcaccccaagcccagcgccagagacgccccccccgccagcagcagctgcctgtgccaggacggcgaggacgccggcagcctggagccccagctgcccagaagcccccccggcaccgccgagaccgagcccggcagagccgccagcccccccaccctggagagcagcagcctgttccccgacctgcccgtggacagattcgacccccccctgtacggcagcctgagcgccaacagagacagcggcctgcccttcgcctgcgccgaccccccccagaagaccgtgcccagcgaccccccctaccccagcttcctgctgctggaggaggtgagccccatgctgcccagccacttccccgacctgagcggcggcaaggtgctgagcaagacctgcccccccgagagaaccgtggtgcccggcgccgcccccagcctgcccggcaagggcagcggctgcagcgtggccctgatgagccacctgagcgaggacgagctggagatccagaagctggtgaccgagctggagagccagctgcagagaagcaaggacaccagaggcgcccccagagagctggccgaggccgagagcgtgggcagagtggagctgggcaccggcaccgagccccccagccagagaagaacctgccaggccaccgtgccccacgaggacaccttcagcgccgccgacctgaccagagtgggcgagagcaccgcccacagagagggcgccgagagcgccgtggccaccgtggaggccgtgcagggcagacccggcggcacctggccctgccccgccagcttccaccccggccacgccgccctgctgccctgcgcccaggaggacctggtgagcggcgcccccttcagccccagaggcgccaacttccacttccagcccgtgcagaaggccggcgccagcaagaccggcctgtgccaggccgagggcgacagcagacccccccaggacgtgtgcctgcccgagcccagcaagcagcccggcccccagctggacgccggcagcctggccaagtgcagccccgaccaggagctgagcttccccaagaacaaggaggccgccagcagccaggagagcgaggacagcctgagactgctgccctgcgagcagagaggcggcttcctgcccgagcccggcaccgccgaccagccccacagaggcgcccccgcccccgaggccttcggcagccccgccgtgcacctggcccccgacctggccttccagggcgacggcgccccccccctggacgccacctggcccttcggcgccagccccagccacgccgcccagggccacagcgccggcagagccggcggccacctgcaccccaccgccggcagacccggcttcgagggcaacgagttcgcccccgccggcgccagcagcctgaccgcccccagaggcagagaggcctggctggtgcccgtgcccagccccgcctgcgtgagcaacacccaccccagcagaagaagccaggaccccgccctgagcccccccatcagacagctgcagctgcccggccccggcgtggccaagagcaaggacggcatcctgggcctgcaggagctgacccccgccgcccagagcccccccagagtgaaccccagcggcctggagggcggcaccgtggagggcggcaaggtggcctgcggccccgcccagggcagccccggcggcgtgcaggtgaccaccctgcccgccgtggccggccaccagctgggcctggaggccgacggccactggggcctgctgggccaggccgagaagacccagggccagggcaccgccaaccagctgcagcccgagaacggcgtgagccccggcggcaccgacaaccacgccagcgtgaacgccagccccaagaccgccctgaccggccccaccgagggcgccgtgctgctggagaagtgcaagggcagcagagccgccatgagcctgcaggaggaggccgagcccacccccagcccccccagccccaacagagagagcctggccctggccctgaccgccgcccacagcagaagcggcagcgagggcagaacccccgagagagccagcagccccggcctgaacaagcccctgctggccaccggcgacagccccgcccccagcgtgggcgacctggccgcctgcgcccccagccccaccagcgccgcccacatgccctgcagcctgggccccctgcccagagaggaccccctgaccagccccagcagagcccagggcggcctgggcggccagctgcccgccagccccagctgcagagacccccccggcccccagcagctgctggcctgcagccccgcctgggcccccctggaggaggccgacggcgtgcaggccaccaccgacaccggcgccgaggacagccccgtggccccccccagcctgaccaccagcccctgcgaccccaaggaggccctggccggctgcctgctgcagggcgagggcagccccctggaggaccccagcagctggccccccggcagcgtgagcgccgtgacctgcacccacagcggcgacacccccaaggacagcaccctgagaatccccgaggacagcagaaaggagaagctgtgggagagccccggcagagccaccagcccccccctggccggcgccgtgagccccagcgtggccgtgagagccaccggcctgagcagcacccccaccggcgacgaggcccaggccggcagaggcctgcccggccccgacccccagagcagaggcgcccccccccacaccaaccccgacagaatgcccagaggccacagcagctacagccccagcaacaccgccagactgggccacagagagggccaggccgtgaccgccgtgcccaccgagccccccaccctgcagggcgccggccccgacagccccgcctgcctggagggcgagatgggcaccagcagcaaggagcccgaggaccccggcacccccgagaccggcagaagcggcgccaccaagatgcccagagtgacctgccccagcaccggcctgggcctgggcagaaccaccgcccccagcagcaccgccagcgacttccagagcgacagcccccagagccacagaaacgccagccaccagaccccccagggcgaccccctgggcccccaggacctgaagcagagaagcagaggctacaagaagaagcccgccagcaccgagaacggccagtggaagggccaggccccccacggccccgtgacctgcgaggtgtgcgccgccagcttcagaagcggccccggcctgagcagacacaaggccagaaagcacagaccccaccccggcgcccccgccgagcccagccccgccgccctgcccgcccagcagcccctggagcccctggcccagaagtgccagccccccagaaagaagagccacagagtgagcggcaaggagagacccaaccacagcagaggcgaccccagccacgtgacccagcccccccccgcccagggcagcaaggaggtgctgagagcccccggcagcccccacagccagcagctgcacccccccagccccaccgagcacgaggtggacgtgaagacccccgccagcaagcccagacccgaccaggccagagaggacgagctgcaccccaagcaggccgagaagagagagggcagaagatggagaagagagcccaccgtggacagccccagccacagcgagggcaagagcaacaagaagagaggcaagctgagaggcagaagactgagagaggagagcatcctgcccgtgagcgccgacgtgatcagcgacggcagaggcagcagacccagccccgccatggccagctacgccgccagccccagccactgcctgagcgtggagggcggccccgaggccgacggcgagcagccccccagactggccaccctgggccccggcgtgatggagggcgccgccgagaccgaccaggaggccctgtgcgccggcgagaccggcgcccagaagccccccggcgacagaatgctgtgccccggcagaatggacggcgccgccctgggcgagcagcccaccggccagaagggcgccagcgccagaggcttctggggccccagagagaccaaggccctgggcgtgtgcaaggagagcggcagcgagcccgccgaggacagcagcagagcccacagcagaagcgaggagggcgtgtgggaggagaacaccccccccctgggccccctgggcttccccgagaccagcagcagccccgccgacagcaccaccagcagctgcctgcagggcctgcccgacaaccccgacacccagggcggcgtgcagggccccgagggccccacccccgacgccagcggcagcagcgccaaggacccccccagcctgttcgacgacgaggtgagcttcagccagctgttcccccccggcggcagactgaccagaaagagaaacccccacgtgtacggcaagagatgcgagaagcccgtgctgcccctgcccacccagcccagcttcgaggagggcggcgaccccaccctgggccccgccagactgcccaccgacctgagcgacagcagcagcctgtgcctgtgccacgaggacccctgggaggacgaggaccccgccggcctgcccgagagcttcctgctggacggcttcctgaacagcagagtgcccggcatcgacccctgggcccccggcctgagcctgtgggccctggagcccagcagagaggccggcgccgagaagctgcccagccactgccccgaggacgacagacccgaggccatccccgagctgcacatggtgcccgccgcctggagaggcctggagatgcccgcccccgccgacgacagcagcagcagcctgggcgacgtgagccccgagccccccagcctggagagagagagatgcgacggcggcctgcccggcaacacccacctgctgcccctgagagccaccgacttcgaggtgctgagcaccaagttcgagatgcaggacctgtgcttcctgggccccttcgaggaccccgtgggcctgcccggccccagcttcctggacttcgagggcaccgccagcagccagggcccccagagcagaagaaccgaggaggccgccggcgccggcagagcccagggcagaggcagacccgccaagggcagaagagccagctacaagtgcaaggtgtgcttccagagattcagaagcctgggcgagctggacctgcacaagctggcccacacccccgcccccccccccacctgctacatgtgcgtggagagaagattcggcagcagagagctgctgagaggccacctgcaggagagacacgcccagagcaaggccggcccctgggcctgcggcatgtgcctgaaggaggtggccgacgtgtggatgtacaacgagcacctgagagagcacgccgtgagattcgccagaagaggccaggccagaagaagcctgggcgacctgcccggcggcctggagggcagcagcgccgtggcccacctgctgaacagcatcaccgagcccgcccccaagcaccacagaggcaagagaagcgccggcaaggccgccggcagccccggcgacccctggggccaggagggcgaggccaagaaggacagccccggcgagagagccaagcccagagccagaagcacccccagcaaccccgacggcgccgccacccccgacagcgccagcgccaccgccctggccgacgccggcagccccggcccccccagaaccacccccagccccagccccgacccctgggccggcggcgagcccctgctgcaggccacccccgtgcacgaggcctgcaaggaccccagcagagactgccaccactgcggcaagagattccccaagcccttcaagctgcagagacacctggccgtgcacagcccccagagagtgtacctgtgccccagatgccccagagtgtaccccgagcacggcgagctgctggcccacctgggcggcgcccacggcctgctggagagacccgagctgcagcacacccccctgtacgcctgcgagctgtgcgccaccgtgatgagaatcatcaagaagagcttcgcctgcagcagctgcaactacaccttcgccaagaaggagcagttcgacagacacatgaacaagcacctgagaggcggcagacagcccttcgccttcagaggcgtgagaagacccggcgcccccggccagaaggccagagccctggagggcaccctgcccagcaagagaagaagagtggccatgcccggcagcgcccccggccccggcgaggacagacccccccccagaggcagcagccccatcctgagcgagggcagcctgcccgccctgctgcacctgtgcagcgaggtggcccccagcaccaccaagggctggcccgagaccctggagagacccgtggaccccgtgacccaccccatcagaggctgcgagctgcccagcaaccaccaggagtgccccccccccagcctgagccccttccccgccgccctggccgacggcagaggcgactgcgccctggacggcgccctggagagacccgagaacgaggccagccccggcagccccggccccctgctgcagcaggccctgcccctgggcgccagcctgcccagacccggcgccagaggccaggacgccgagggcaagagagcccccctggtgttcagcggcaagagaagagcccccggcgccagaggcagatgcgcccccgaccacttccaggaggaccacctgctgcagaaggagaaggaggtgagcagcagccacatggtgagcgagggcggccccagaggcaccttccacaagggcagcgccaccaagcccgccggctgccagagcagcagcaaggacagaagcgccgccagcacccccagcaaggccctgaagttccccgtgcaccccagaaaggccgtgggcagcctggcccccggcgagctggccagaggcaccgagaacggcatgaagcccgccacccccaaggccaagcccggccccagcagccagggcagcggcagccccagacccggcaccaagaccggcggcggcagccagccccagcccgccagcggccagctgcagagcgagaccgccaccacccccgccaagcccagcttccccagcagaagccccgcccccgagagactgcccgccagagcccaggccaagagctgcaccaagggccccagagaggccggcgagcagggcccccacggcagcctgggccccaaggagaagggcgagagcagcaccaagagaaagaagggccaggtgcccggccccgccagaagcgagagcgtgggcagcttcggcagagcccccagcgcccccgacaagccccccagaacccccagaaagcaggccacccccagcagagtgctgcccaccaagcccaagcccaacagccagaacaagcccagacccccccccagcgagcagagaaaggccgagcccggccacacccagagaaaggacagactgggcaaggccttcccccagggcagacccctgctgagaccccccaagagaggcaccgccgtgcacggcgccgagcccgccgagccccacacccacagaaccgccgaggcccagagcgacctgctgagccagctgttcggccagagactgaccggcttcaagatccccctgaagaaggacgccagcgagtag

SEQ ID NO: 106075 - DNA, 1479 bp, synthetic construct
  misc_feature 1..1479: note = Description of Artificial Sequence: Synthetic coding sequence
  source 1..1479: mol_type = other DNA
atgctgtgcgacgagaaggcccagaagagaagaaagagaaaggccaaggagagcggcatggccctgccccagggccacctgaccttcagagacgtggccatcgagttcagccaggccgagtggaagtgcctggaccccgcccagagagccctgtacaaggacgtgatgctggagaactacagaaacctggtgagcctgggcagcagctacgccctgggcagcaacgccgaggacaagcccatcaagaagcagctgggcgtgagcttccacctgcacctgagcgagctggagctgttccccgacgagagagtgatcaacggctgcaaccaggtggagaacttcatcaaccacagcagcagcgtgagctgcctgcaggagatgagcagcagcgtgaagacccccatcttcaacagaaacgacttcgacgacagcagcttcctgccccaggagcagaaggtgcacctgagagagaagccctacgagtgcaacgagcacagcaaggtgttcagagtgagcagcagcctgaccaagcaccaggtgatccacaccgtggagaagccctacaagtgcaacagctgcggcaaggtgttcagcagaaacagccacctggccgagcactgcagaatccacaccggcgagaagccctacaagtgcaacgtgtgcggcaaggtgttcagctacaacagcaacttcgccagacaccagagaatccacaccagagagaagccctacgagtgcaacgagtgcggcaaggtgttcagcaacaacagctacctggccagacaccagagaatccacgccgaggagaagccctacaagtgcaacgagtgcggcaagggcttcagccacaagagcagcctggccaaccactggagaatctacaccggcgagaagccctacaagtgcgacgagtgcggcaaggccttctacagaatcgccctgctggtgagacaccagaagatccacaccggcgagaagccctacaagtgcaacgagtgcggcaaggtgttcatccagaacagccacctggcccagcactggagaatccacaccggcgagaagccctacaagtgcaacgagtgcggcaaggtgttcaaccagctgagcaacctggccagacacagaagaatccacaccggcgagaagccctacaagtgcaacgagtgcggcaaggccttcagcgagtacagcggcctgagcgcccacctggtgatccacaccggcgagaagccctacaagtgcagcgagtgcggcaaggccttcagacacaagctgagcctgaccaaccaccagagaatccacaccggcgagagaccctacaagtgcaacgagtgcggcaaggtgttcaacagaatcgcccacctggccagacacagaaagatccacaccggcgagaagccctacaagtgcaacgagtgcggcaaggccttcagcagaatcagctacctggcccagcactggaccatccacatgggctag

SEQ ID NO: 106076 - DNA, 1377 bp, synthetic construct
  misc_feature 1..1377: note = Description of Artificial Sequence: Synthetic coding sequence
  source 1..1377: mol_type = other DNA
atgctggagcagagaagagagccctggagcggcgagagcgaggtgaagatcgccaagaacagcgacggcagagagtgcatcaagggcgtgaacaccggcagcagctacgccctgggcagcaacgccgaggacaagcccatcaagaagcagctgggcgtgagcttccacctgcacctgagcgagctggagctgttccccgacgagagagtgatcaacggctgcaaccaggtggagaacttcatcaaccacagcagcagcgtgagctgcctgcaggagatgagcagcagcgtgaagacccccatcttcaacagaaacgacttcgacgacagcagcttcctgccccaggagcagaaggtgcacctgagagagaagccctacgagtgcaacgagcacagcaaggtgttcagagtgagcagcagcctgaccaagcaccaggtgatccacaccgtggagaagccctacaagtgcaacagctgcggcaaggtgttcagcagaaacagccacctggccgagcactgcagaatccacaccggcgagaagccctacaagtgcaacgtgtgcggcaaggtgttcagctacaacagcaacttcgccagacaccagagaatccacaccagagagaagccctacgagtgcaacgagtgcggcaaggtgttcagcaacaacagctacctggccagacaccagagaatccacgccgaggagaagccctacaagtgcaacgagtgcggcaagggcttcagccacaagagcagcctggccaaccactggagaatctacaccggcgagaagccctacaagtgcgacgagtgcggcaaggccttctacagaatcgccctgctggtgagacaccagaagatccacaccggcgagaagccctacaagtgcaacgagtgcggcaaggtgttcatccagaacagccacctggcccagcactggagaatccacaccggcgagaagccctacaagtgcaacgagtgcggcaaggtgttcaaccagctgagcaacctggccagacacagaagaatccacaccggcgagaagccctacaagtgcaacgagtgcggcaaggccttcagcgagtacagcggcctgagcgcccacctggtgatccacaccggcgagaagccctacaagtgcagcgagtgcggcaaggccttcagacacaagctgagcctgaccaaccaccagagaatccacaccggcgagagaccctacaagtgcaacgagtgcggcaaggtgttcaacagaatcgcccacctggccagacacagaaagatccacaccggcgagaagccctacaagtgcaacgagtgcggcaaggccttcagcagaatcagctacctggcccagcactggaccatccacatgggctag

SEQ ID NO: 106077 - DNA, 537 bp, synthetic construct
  misc_feature 1..537: note = Description of Artificial Sequence: Synthetic coding sequence
  source 1..537: mol_type = other DNA
ttcccccagaccagaaagagaatcgcctggagcgagggccacgccgccgccagactgaccagcaaggagagctgctgcgagaaggcccagaagagaagaaagagaaaggccaaggagagcggcatggccctgccccagggccacctgaccttcagagacgtggccatcgagttcagccaggccgagtggaagtgcctggaccccgcccagagagccctgtacaaggacgtgatgctggagaactacagaaacctggtgagcctgggcatcagcctgcccgacctgaacatcaacagcatgctggagcagagaagagagccctggagcggcgagagcgaggtgaagatcgccaagaacagcgacggcagagagtgcatcaagggcgtgaacaccggcagcagctacgccctgggcagcaacgccgaggacaagcccatcaagaagcagctgggcgtgagcttccacctgcacctgagcgagctggagctgttccccgacgagagagtgatcaacggctgcaaccaggtggagaactag

SEQ ID NO: 106078 - DNA, 1608 bp, synthetic construct
  misc_feature 1..1608: note = Description of Artificial Sequence: Synthetic coding sequence
  source 1..1608: mol_type = other DNA
atgctgtgcgacgagaaggcccagaagagaagaaagagaaaggccaaggagagcggcatggccctgccccagggccacctgaccttcagagacgtggccatcgagttcagccaggccgagtggaagtgcctggaccccgcccagagagccctgtacaaggacgtgatgctggagaactacagaaacctggtgagcctgggcatcagcctgcccgacctgaacatcaacagcatgctggagcagagaagagagccctggagcggcgagagcgaggtgaagatcgccaagaacagcgacggcagagagtgcatcaagggcgtgaacaccggcagcagctacgccctgggcagcaacgccgaggacaagcccatcaagaagcagctgggcgtgagcttccacctgcacctgagcgagctggagctgttccccgacgagagagtgatcaacggctgcaaccaggtggagaacttcatcaaccacagcagcagcgtgagctgcctgcaggagatgagcagcagcgtgaagacccccatcttcaacagaaacgacttcgacgacagcagcttcctgccccaggagcagaaggtgcacctgagagagaagccctacgagtgcaacgagcacagcaaggtgttcagagtgagcagcagcctgaccaagcaccaggtgatccacaccgtggagaagccctacaagtgcaacagctgcggcaaggtgttcagcagaaacagccacctggccgagcactgcagaatccacaccggcgagaagccctacaagtgcaacgtgtgcggcaaggtgttcagctacaacagcaacttcgccagacaccagagaatccacaccagagagaagccctacgagtgcaacgagtgcggcaaggtgttcagcaacaacagctacctggccagacaccagagaatccacgccgaggagaagccctacaagtgcaacgagtgcggcaagggcttcagccacaagagcagcctggccaaccactggagaatctacaccggcgagaagccctacaagtgcgacgagtgcggcaaggccttctacagaatcgccctgctggtgagacaccagaagatccacaccggcgagaagccctacaagtgcaacgagtgcggcaaggtgttcatccagaacagccacctggcccagcactggagaatccacaccggcgagaagccctacaagtgcaacgagtgcggcaaggtgttcaaccagctgagcaacctggccagacacagaagaatccacaccggcgagaagccctacaagtgcaacgagtgcggcaaggccttcagcgagtacagcggcctgagcgcccacctggtgatccacaccggcgagaagccctacaagtgcagcgagtgcggcaaggccttcagacacaagctgagcctgaccaaccaccagagaatccacaccggcgagagaccctacaagtgcaacgagtgcggcaaggtgttcaacagaatcgcccacctggccagacacagaaagatccacaccggcgagaagccctacaagtgcaacgagtgcggcaaggccttcagcagaatcagctacctggcccagcactggaccatccacatgggctag

SEQ ID NO: 106079 - DNA, 1608 bp, synthetic construct; identical to SEQ ID NO: 106078
  misc_feature 1..1608: note = Description of Artificial Sequence: Synthetic coding sequence
  source 1..1608: mol_type = other DNA

SEQ ID NO: 106080 - DNA, 1764 bp, synthetic construct
  misc_feature 1..1764: note = Description of Artificial Sequence: Synthetic coding sequence
  source 1..1764: mol_type = other DNA
atgcccaccgccctgtgccccagagtgctggcccccaaggagagcgaggagcccagaaagatgagaagcccccccggcgagaaccccagcccccagggcgagctgcccagccccgagagcagcagaagactgttcagaagattcagataccaggaggccgccggccccagagaggccctgcagagactgtgggacctgtgcggcggctggctgagacccgagagacacaccaaggagcagatcctggagctgctggtgctggagcagttcctggccatcctgcccagagagatccagagctgggtgagagcccaggagcccgagagcggcgagcaggccgtggccgccgtggaggccctggagagagagcccggcagaccctggcagtggctgaagcactgcgaggaccccgtggtgatcgacgacggcgacagccccctggaccaggagcaggagcagctgcccgtggagccccacagcgacctggccaagaaccaggacgcccagcccatcaccctggcccagtgcctgggcctgcccagcagaccccccagccagctgagcggcgaccccgtgctgcaggacgccttcctgctgcaggaggagaacgtgagagacacccagcaggtgaccaccctgcagctgccccccagcagagtgagccccttcaaggacatgatcctgtgcttcagcgaggaggactggagcctgctggaccccgcccagaccggcttctacggcgagttcatcatcggcgaggactacggcgtgagcatgccccccaacgacctggccgcccagcccgacctgagccagggcgaggagaacgagcccagagtgcccgagctgcaggacctgcagggcaaggaggtgccccaggtgagctacctggacagccccagcctgcagcccttccaggtggaggagagaagaaagagagaggagctgcaggtgcccgagttccaggcctgcccccagaccgtggtgccccagaacacctaccccgccggcggcaaccccagaagcctggagaacagcctggacgaggaggtgaccatcgagatcgtgctgagcagcagcggcgacgaggacagccagcacggcccctactgcaccgaggagctgggcagccccaccgagaagcagagaagcctgcccgccagccacagaagcagcaccgaggccggcggcgaggtgcagaccagcaagaagagctacgtgtgccccaactgcggcaagatcttcagatggagagtgaacttcatcagacacctgagaagcagaagagagcaggagaagccccacgagtgcagcgtgtgcggcgagctgttcagcgacagcgaggacctggacggccacctggagagccacgaggcccagaagccctacagatgcggcgcctgcggcaagagcttcagactgaacagccacctgctgagccacagaagaatccacctgcagcccgacagactgcagcccgtggagaagagagagcaggccgccagcgaggacgccgacaagggccccaaggagcccctggagaacggcaaggccaagctgagcttccagtgctgcgagtgcggcaaggccttccagagacacgaccacctggccagacacagaagccacttccacctgaaggacaaggccagacccttccagtgcagatactgcgtgaagagcttcacccagaactacgacctgctgagacacgagagactgcacatgaagagaagaagcaagcaggccctgaacagctactag

SEQ ID NO: 106081 - DNA, 1872 bp, synthetic construct
  misc_feature 1..1872: note = Description of Artificial Sequence: Synthetic coding sequence
  source 1..1872: mol_type = other DNA
atgcccaccgccctgtgccccagagtgctggcccccaaggagagcgaggagcccagaaagatgagaagcccccccggcgagaaccccagcccccagggcgagctgcccagccccgagagcagcagaagactgttcagaagattcagataccaggaggccgccggccccagagaggccctgcagagactgtgggacctgtgcggcggctggctgagacccgagagacacaccaaggagcagatcctggagctgctggtgctggagcagttcctggccatcctgcccagagagatccagagctgggtgagagcccaggagcccgagagcggcgagcaggccgtggccgccgtggaggccctggagagagagcccggcagaccctggcagtggctgaagcactgcgaggaccccgtggtgatcgacgacggcgacagccccctggaccaggagcaggagcagctgcccgtggagccccacagcgacctggccaagaaccaggacgcccagcccatcaccctggcccagtgcctgggcctgcccagcagaccccccagccagctgagcggcgaccccgtgctgcaggacgccttcctgctgcaggaggagaacgtgagagacacccagcaggtgaccaccctgcagctgccccccagaatcttccagttcaacaaccacagaagcaacggctacatcctggagatgctgggcagcggcggcaagaaggcccagatcatcagcgtgctgagccagatctacgtgagcagagtgagccccttcaaggacatgatcctgtgcttcagcgaggaggactggagcctgctggaccccgcccagaccggcttctacggcgagttcatcatcggcgaggactacggcgtgagcatgccccccaacgacctggccgcccagcccgacctgagccagggcgaggagaacgagcccagagtgcccgagctgcaggacctgcagggcaaggaggtgccccaggtgagctacctggacagccccagcctgcagcccttccaggtggaggagagaagaaagagagaggagctgcaggtgcccgagttccaggcctgcccccagaccgtggtgccccagaacacctaccccgccggcggcaaccccagaagcctggagaacagcctggacgaggaggtgaccatcgagatcgtgctgagcagcagcggcgacgaggacagccagcacggcccctactgcaccgaggagctgggcagccccaccgagaagcagagaagcctgcccgccagccacagaagcagcaccgaggccggcggcgaggtgcagaccagcaagaagagctacgtgtgccccaactgcggcaagatcttcagatggagagtgaacttcatcagacacctgagaagcagaagagagcaggagaagccccacgagtgcagcgtgtgcggcgagctgttcagcgacagcgaggacctggacggccacctggagagccacgaggcccagaagccctacagatgcggcgcctgcggcaagagcttcagactgaacagccacctgctgagccacagaagaatccacctgcagcccgacagactgcagcccgtggagaagagagagcaggccgccagcgaggacgccgacaagggccccaaggagcccctggagaacggcaaggccaagctgagcttccagtgctgcgagtgcggcaaggccttccagagacacgaccacctggccagacacagaagccacttccacctgaaggacaaggccagacccttccagtgcagatactgcgtgaagagcttcacccagaactacgacctgctgagacacgagagactgcacatgaagagaagaagcaagcaggccctgaacagctactag

SEQ ID NO: 106082 - DNA, 1830 bp, synthetic construct
  misc_feature 1..1830: note = Description of Artificial Sequence: Synthetic coding sequence
  source 1..1830: mol_type = other DNA
atgagcaccgcccccagcctgagcgccctgagaagcagcaagcacagcggcggcggcggcggcggcggcggcggcggcggcgccgaccccgcctggaccagcgccctgagcggcaacagcagcggccccggccccggcagcagccccgccggcagcaccaagcccttcgtgcacgccgtgccccccagcgaccccctgagacaggccaacagactgcccatcaaggtgctgaagatgctgaccgccagaaccggccacatcctgcaccccgagtacctgcagcccctgcccagcacccccgtgagccccatcgagctggacgccaagaagagccccctggccctgctggcccagacctgcagccagatcggcaagcccgaccccagccccagcagcaagctgagcagcgtggccagcaacggcggcggcgccggcggcgccggcggcggcgccgccggcgacaaggacaccaagagcggccccctgaagctgagcgacatcggcgtggaggacaagagcagcttcaagccctacagcaagcccggcagcgacaagaaggagcccggcggcggcggcggcggcggcggcggcggcggcggcggcggcggcggcgtgagcagcgagaagagcggcttcagagtgcccagcgccacctgccagcccttcacccccagaaccggcagccccagcagcagcgccagcgccgagggcggccccaccggcctggcccacggcagaatcagctgcggcggcggcatcaacgtggacgtgaaccagcaccccgacggcggccccggcggcaaggccctgggcagcgactgcggcggcagcagcggcagcagcagcggcagcggccccagcgcccccaccagcagcagcgtgctgggcagcggcctggtggcccccgtgagcccctacaagcccggccagaccgtgttccccctgccccccgccggcatgacctaccccggcagcctggccggcgcctacgccggctaccccccccagttcctgccccacggcgtggccctggaccccaccaagcccggcagcctggtgggcgcccagctggccgccgccgccgccggcagcctgggctgcagcaagcccgccggcagcagccccctggccggcgccagcccccccagcgtgatgaccgccagcctgtgcagagacccctactgcctgagctaccactgcgccagccacctggccggcgccgccgccgccagcgccagctgcgcccacgaccccgccgccgccgccgccgccctgaagagcggctaccccctggtgtaccccacccaccccctgcacggcgtgcacagcagcctgaccgccgccgccgccgccggcgccaccccccccagcctggccggccaccccctgtacccctacggcttcatgctgcccaacgaccccctgccccacatctgcaactgggtgagcgccaacggcccctgcgacaagagattcgccaccagcgaggagctgctgagccacctgagaacccacaccgccttccccggcaccgacaagctgctgagcggctaccccagcagcagcagcctggccagcgccgccgccgccgccatggcctgccacatgcacatccccaccagcggcgcccccggcagccccggcaccctggccctgagaagcccccaccacgccctgggcctgagcagcagataccacccctacagcaagagccccctgcccacccccggcgcccccgtgcccgtgcccgccgccaccggcccctactacagcccctacgccctgtacggccagagactgaccaccgccagcgccctgggctaccagtag

SEQ ID NO: 106083 - DNA, 1941 bp, synthetic construct
  misc_feature 1..1941: note = Description of Artificial Sequence: Synthetic coding sequence
  source 1..1941: mol_type = other DNA
atgagcaccgcccccagcctgagcgccctgagaagcagcaagcacagcggcggcggcggcggcggcggcggcggcggcggcgccgaccccgcctggaccagcgccctgagcggcaacagcagcggccccggccccggcagcagccccgccggcagcaccaagcccttcgtgcacgccgtgccccccagcgaccccctgagacaggccaacagactgcccatcaaggtgctgaagatgctgaccgccagaaccggccacatcctgcaccccgagtacctgcagcccctgcccagcacccccgtgagccccatcgagctggacgccaagaagagccccctggccctgctggcccagacctgcagccagatcggcaagcccgaccccagccccagcagcaagctgagcagcgtggccagcaacggcggcggcgccggcggcgccggcggcggcgccgccggcgacaaggacaccaagagcggccccctgaagctgagcgacatcggcgtggaggacaagagcagcttcaagccctacagcaagcccggcagcgacaagaaggagcccggcggcggcggcggcggcggcggcggcggcggcggcggcggcggcggcgtgagcagcgagaagagcggcttcagagtgcccagcgccacctgccagcccttcacccccagaaccggcagccccagcagcagcgccagcgcctgcagccccggcggcatgctgagcagcgccggcggcgcccccgagggcaaggacgacaagaaggacaccgacgtgggcggcggcggcaagggcaccggcggcgccagcgccgagggcggccccaccggcctggcccacggcagaatcagctgcggcggcggcatcaacgtggacgtgaaccagcaccccgacggcggccccggcggcaaggccctgggcagcgactgcggcggcagcagcggcagcagcagcggcagcggccccagcgcccccaccagcagcagcgtgctgggcagcggcctggtggcccccgtgagcccctacaagcccggccagaccgtgttccccctgccccccgccggcatgacctaccccggcagcctggccggcgcctacgccggctaccccccccagttcctgccccacggcgtggccctggaccccaccaagcccggcagcctggtgggcgcccagctggccgccgccgccgccggcagcctgggctgcagcaagcccgccggcagcagccccctggccggcgccagcccccccagcgtgatgaccgccagcctgtgcagagacccctactgcctgagctaccactgcgccagccacctggccggcgccgccgccgccagcgccagctgcgcccacgaccccgccgccgccgccgccgccctgaagagcggctaccccctggtgtaccccacccaccccctgcacggcgtgcacagcagcctgaccgccgccgccgccgccggcgccaccccccccagcctggccggccaccccctgtacccctacggcttcatgctgcccaacgaccccctgccccacatctgcaactgggtgagcgccaacggcccctgcgacaagagattcgccaccagcgaggagctgctgagccacctgagaacccacaccgccttccccggcaccgacaagctgctgagcggctaccccagcagcagcagcctggccagcgccgccgccgccgccatggcctgccacatgcacatccccaccagcggcgcccccggcagccccggcaccctggccctgagaagcccccaccacgccctgggcctgagcagcagataccacccctacagcaagagccccctgcccacccccggcgcccccgtgcccgtgcccgccgccaccggcccctactacagcccctacgccctgtacggccagagactgaccaccgccagcgccctgggctaccagtag

SEQ ID NO: 106084 - DNA, 1941 bp, synthetic construct; identical to SEQ ID NO: 106083
  misc_feature 1..1941: note = Description of Artificial Sequence: Synthetic coding sequence
  source 1..1941: mol_type = other DNA

SEQ ID NO: 106085 - DNA, 1626 bp, synthetic construct
  misc_feature 1..1626: note = Description of Artificial Sequence: Synthetic coding sequence
  source 1..1626: mol_type = other DNA
atgcccagaagaaagcagagccacccccagcccgtgaagtgcgagggcgtgaaggtggacaccgaggacagcctggacgagggccccggcgccctggtgctggagagcgacctgctgctgggccaggacctggagttcgaggaggaggaggaggaggaggagggcgacggcaacagcgaccagctgatgggcttcgagagagacagcgagggcgacagcctgggcgccagacccggcctgccctacggcctgagcgacgacgagagcggcggcggcagagccctgagcgccgagagcgaggtggaggagcccgccagaggccccggcgaggccagaggcgagagacccggccccgcctgccagctgtgcggcggccccaccggcgagggcccctgctgcggcgccggcggccccggcggcggccccctgctgccccccagactgctgtacagctgcagactgtgcaccttcgtgagccactacagcagccacctgaagagacacatgcagacccacagcggcgagaagcccttcagatgcggcagatgcccctacgccagcgcccagctggtgaacctgaccagacacaccagaacccacaccggcgagaagccctacagatgcccccactgccccttcgcctgcagcagcctgggcaacctgagaagacaccagagaacccacgccggcccccccacccccccctgccccacctgcggcttcagatgctgcacccccagacccgccagaccccccagccccaccgagcaggagggcgccgtgcccagaagacccgaggacgccctgctgctgcccgacctgagcctgcacgtgccccccggcggcgccagcttcctgcccgactgcggccagctgagaggcgagggcgagggcctgtgcggcaccggcagcgagcccctgcccgagctgctgttcccctggacctgcagaggctgcggccaggagctggaggagggcgagggcagcagactgggcgccgccatgtgcggcagatgcatgagaggcgaggccggcggcggcgccagcggcggcccccagggccccagcgacaagggcttcgcctgcagcctgtgccccttcgccacccactaccccaaccacctggccagacacatgaagacccacagcggcgagaagcccttcagatgcgccagatgcccctacgccagcgcccacctggacaacctgaagagacaccagagagtgcacaccggcgagaagccctacaagtgccccctgtgcccctacgcctgcggcaacctggccaacctgaagagacacggcagaatccacagcggcgacaagcccttcagatgcagcctgtgcaactacagctgcaaccagagcatgaacctgaagagacacatgctgagacacaccggcgagaagcccttcagatgcgccacctgcgcctacaccaccggccactgggacaactacaagagacaccagaaggtgcacggccacggcggcgccggcggccccggcctgagcgccagcgagggctgggcccccccccacagcccccccagcgtgctgagcagcagaggcccccccgccctgggcaccgccggcagcagagccgtgcacaccgacagcagctag

SEQ ID NO: 106086 - DNA, 1440 bp, synthetic construct
  misc_feature 1..1440: note = Description of Artificial Sequence: Synthetic coding sequence
  source 1..1440: mol_type = other DNA
atgggcttcgagagagacagcgagggcgacagcctgggcgccagacccggcctgccctacggcctgagcgacgacgagagcggcggcggcagagccctgagcgccgagagcgaggtggaggagcccgccagaggccccggcgaggccagaggcgagagacccggccccgcctgccagctgtgcggcggccccaccggcgagggcccctgctgcggcgccggcggccccggcggcggccccctgctgccccccagactgctgtacagctgcagactgtgcaccttcgtgagccactacagcagccacctgaagagacacatgcagacccacagcggcgagaagcccttcagatgcggcagatgcccctacgccagcgcccagctggtgaacctgaccagacacaccagaacccacaccggcgagaagccctacagatgcccccactgccccttcgcctgcagcagcctgggcaacctgagaagacaccagagaacccacgccggcccccccacccccccctgccccacctgcggcttcagatgctgcacccccagacccgccagaccccccagccccaccgagcaggagggcgccgtgcccagaagacccgaggacgccctgctgctgcccgacctgagcctgcacgtgccccccggcggcgccagcttcctgcccgactgcggccagctgagaggcgagggcgagggcctgtgcggcaccggcagcgagcccctgcccgagctgctgttcccctggacctgcagaggctgcggccaggagctggaggagggcgagggcagcagactgggcgccgccatgtgcggcagatgcatgagaggcgaggccggcggcggcgccagcggcggcccccagggccccagcgacaagggcttcgcctgcagcctgtgccccttcgccacccactaccccaaccacctggccagacacatgaagacccacagcggcgagaagcccttcagatgcgccagatgcccctacgccagcgcccacctggacaacctgaagagacaccagagagtgcacaccggcgagaagccctacaagtgccccctgtgcccctacgcctgcggcaacctggccaacctgaagagacacggcagaatccacagcggcgacaagcccttcagatgcagcctgtgcaactacagctgcaaccagagcatgaacctgaagagacacatgctgagacacaccggcgagaagcccttcagatgcgccacctgcgcctacaccaccggccactgggacaactacaagagacaccagaaggtgcacggccacggcggcgccggcggccccggcctgagcgccagcgagggctgggcccccccccacagcccccccagcgtgctgagcagcagaggcccccccgccctgggcaccgccggcagcagagccgtgcacaccgacagcagctag

SEQ ID NO: 106087 - DNA, 3936 bp, synthetic construct
  misc_feature 1..3936: note = Description of Artificial Sequence: Synthetic coding sequence
  source 1..3936: mol_type = other DNA
atgagcagaagaaagcaggccaagcccagaagcctgaaggaccccaactgcaagctggaggacaagaccgaggacggcgaggccctggactgcaagaagagacccgaggacggcgaggagctggaggacgaggccgtgcacagctgcgacagctgcctgcaggtgttcgagagcctgagcgacatcaccgagcacaagatcaaccagtgccagctgaccgacggcgtggacgtggaggacgaccccacctgcagctggcccgccagcagccccagcagcaaggaccagaccagccccagccacggcgagggctgcgacttcggcgaggaggagggcggccccggcctgccctacccctgccagttctgcgacaagagcttcagcagactgagctacctgaagcaccacgagcagagccacagcgacaagctgcccttcaagtgcacctactgcagcagactgttcaagcacaagagaagcagagacagacacatcaagctgcacaccggcgacaagaagtaccactgcagcgagtgcgacgccgccttcagcagaagcgaccacctgaagatccacctgaagacccacaccagcaacaagccctacaagtgcgccatctgcagaagaggcttcctgagcagcagcagcctgcacggccacatgcaggtgcacgagagaaacaaggacggcagccagagcggcagcagaatggaggactggaagatgaaggacacccagaagtgcagccagtgcgaggagggcttcgacttccccgaggacctgcagaagcacatcgccgagtgccaccccgagtgcagccccaacgaggacagagccgccctgcagtgcgtgtactgccacgagctgttcgtggaggagaccagcctgatgaaccacatggagcaggtgcacagcggcgagaagaagaacagctgcagcatctgcagcgagagcttccacaccgtggaggagctgtacagccacatggacagccaccagcagcccgagagctgcaaccacagcaacagccccagcctggtgaccgtgggctacaccagcgtgagcagcaccacccccgacagcaacctgagcgtggacagcagcaccatggtggaggccgccccccccatccccaagagcagaggcagaaagagagccgcccagcagacccccgacatgaccggccccagcagcaagcaggccaaggtgacctacagctgcatctactgcaacaagcagctgttcagcagcctggccgtgctgcagatccacctgaagaccatgcacctggacaagcccgagcaggcccacatctgccagtactgcctggaggtgctgcccagcctgtacaacctgaacgagcacctgaagcaggtgcacgaggcccaggaccccggcctgatcgtgagcgccatgcccgccatcgtgtaccagtgcaacttctgcagcgaggtggtgaacgacctgaacaccctgcaggagcacatcagatgcagccacggcttcgccaaccccgccgccaaggacagcaacgccttcttctgcccccactgctacatgggcttcctgaccgacagcagcctggaggagcacatcagacaggtgcactgcgacctgagcggcagcagattcggcagccccgtgctgggcacccccaaggagcccgtggtggaggtgtacagctgcagctactgcaccaacagccccatcttcaacagcgtgctgaagctgaacaagcacatcaaggagaaccacaagaacatccccctggccctgaactacatccacaacggcaagaagagcagagccctgagccccctgagccccgtggccatcgagcagaccagcctgaagatgatgcaggccgtgggcggcgcccccgccagacccaccggcgagtacatctgcaaccagtgcggcgccaagtacaccagcctggacagcttccagacccacctgaagacccacctggacaccgtgctgcccaagctgacctgcccccagtgcaacaaggagttccccaaccaggagagcctgctgaagcacgtgaccatccacttcatgatcaccagcacctactacatctgcgagagctgcgacaagcagttcaccagcgtggacgacctgcagaagcacctgctggacatgcacaccttcgtgttcttcagatgcaccctgtgccaggaggtgttcgacagcaaggtgagcatccagctgcacctggccgtgaagcacagcaacgagaagaaggtgtacagatgcaccagctgcaactgggacttcagaaacgagaccgacctgcagctgcacgtgaagcacaaccacctggagaaccagggcaaggtgcacaagtgcatcttctgcggcgagagcttcggcaccgaggtggagctgcagtgccacatcaccacccacagcaagaagtacaactgcaagttctgcagcaaggccttccacgccatcatcctgctggagaagcacctgagagagaagcactgcgtgttcgagaccaagacccccaactgcggcaccaacggcgccagcgagcaggtgcagaaggaggaggtggagctgcagaccctgctgaccaacagccaggagagccacaacagccacgacggcagcgaggaggacgtggacaccagcgagcccatgtacggctgcgacatctgcggcgccgcctacaccatggagaccctgctgcagaaccaccagctgagagaccacaacatcagacccggcgagagcgccatcgtgaagaagaaggccgagctgatcaagggcaactacaagtgcaacgtgtgcagcagaaccttcttcagcgagaacggcctgagagagcacatgcagacccacctgggccccgtgaagcactacatgtgccccatctgcggcgagagattccccagcctgctgaccctgaccgagcacaaggtgacccacagcaagagcctggacaccggcaactgcagaatctgcaagatgcccctgcagagcgaggaggagttcctggagcactgccagatgcaccccgacctgagaaacagcctgaccggcttcagatgcgtggtgtgcatgcagaccgtgaccagcaccctggagctgaagatccacggcaccttccacatgcagaagaccggcaacggcagcgccgtgcagaccaccggcagaggccagcacgtgcagaagctgtacaagtgcgccagctgcctgaaggagttcagaagcaagcaggacctggtgaagctggacatcaacggcctgccctacggcctgtgcgccggctgcgtgaacctgagcaagagcgccagccccggcatcaacgtgccccccggcaccaacagacccggcctgggccagaacgagaacctgagcgccatcgagggcaagggcaaggtgggcggcctgaagaccagatgcagcagctgcaacgtgaagttcgagagcgagagcgagctgcagaaccacatccagaccatccacagagagctggtgcccgacagcaacagcacccagctgaagaccccccaggtgagccccatgcccagaatcagccccagccagagcgacgagaagaagacctaccagtgcatcaagtgccagatggtgttctacaacgagtgggacatccaggtgcacgtggccaaccacatgatcgacgagggcctgaaccacgagtgcaagctgtgcagccagaccttcgacagccccgccaagctgcagtgccacctgatcgagcacagcttcgagggcatgggcggcaccttcaagtgccccgtgtgcttcaccgtgttcgtgcaggccaacaagctgcagcagcacatcttcagcgcccacggccaggaggacaagatctacgactgcacccagtgcccccagaagttcttcttccagaccgagctgcagaaccacaccatgacccagcacagcagctag

SEQ ID NO: 106088 - DNA, 3936 bp, synthetic construct
  misc_feature 1..3936: note = Description of Artificial Sequence: Synthetic coding sequence
  source 1..3936: mol_type = other DNA
atcagcagagcccagaaggcccagaccagaagactgaacgaccccaactgcaagctggaggacaagaccgaggacggcgaggccctggactgcaagaagagacccgaggacggcgaggagctggaggacgaggccgtgcacagctgcgacagctgcctgcaggtgttcgagagcctgagcgacatcaccgagcacaagatcaaccagtgccagctgaccgacggcgtggacgtggaggacgaccccacctgcagctggcccgccagcagccccagcagcaaggaccagaccagccccagccacggcgagggctgcgacttcggcgaggaggagggcggccccggcctgccctacccctgccagttctgcgacaagagcttcagcagactgagctacctgaagcaccacgagcagagccacagcgacaagctgcccttcaagtgcacctactgcagcagactgttcaagcacaagagaagcagagacagacacatcaagctgcacaccggcgacaagaagtaccactgcagcgagtgcgacgccgccttcagcagaagcgaccacctgaagatccacctgaagacccacaccagcaacaagccctacaagtgcgccatctgcagaagaggcttcctgagcagcagcagcctgcacggccacatgcaggtgcacgagagaaacaaggacggcagccagagcggcagcagaatggaggactggaagatgaaggacacccagaagtgcagccagtgcgaggagggcttcgacttccccgaggacctgcagaagcacatcgccgagtgccaccccgagtgcagccccaacgaggacagagccgccctgcagtgcgtgtactgccacgagctgttcgtggaggagaccagcctgatgaaccacatggagcaggtgcacagcggcgagaagaagaacagctgcagcatctgcagcgagagcttccacaccgtggaggagctgtacagccacatggacagccaccagcagcccgagagctgcaaccacagcaacagccccagcctggtgaccgtgggctacaccagcgtgagcagcaccacccccgacagcaacctgagcgtggacagcagcaccatggtggaggccgccccccccatccccaagagcagaggcagaaagagagccgcccagcagacccccgacatgaccggccccagcagcaagcaggccaaggtgacctacagctgcatctactgcaacaagcagctgttcagcagcctggccgtgctgcagatccacctgaagaccatgcacctggacaagcccgagcaggcccacatctgccagtactgcctggaggtgctgcccagcctgtacaacctgaacgagcacctgaagcaggtgcacgaggcccaggaccccggcctgatcgtgagcgccatgcccgccatcgtgtaccagtgcaacttctgcagcgaggtggtgaacgacctgaacaccctgcaggagcacatcagatgcagccacggcttcgccaaccccgccgccaaggacagcaacgccttcttctgcccccactgctacatgggcttcctgaccgacagcagcctggaggagcacatcagacaggtgcactgcgacctgagcggcagcagattcggcagccccgtgctgggcacccccaaggagcccgtggtggaggtgtacagctgcagctactgcaccaacagccccatcttcaacagcgtgctgaagctgaacaagcacatcaaggagaaccacaagaacatccccctggccctgaactacatccacaacggcaagaagagcagagccctgagccccctgagccccgtggccatcgagcagaccagcctgaagatgatgcaggccgtgggcggcgcccccgccagacccaccggcgagtacatctgcaaccagtgcggcgccaagtacaccagcctggacagcttccagacccacctgaagacccacctggacaccgtgctgcccaagctgacctgcccccagtgcaacaaggagttccccaaccaggagagcctgctgaagcacgtgaccatccacttcatgatcaccagcacctactacatctgcgagagctgcgacaagcagttcaccagcgtggacgacctgcagaagcacctgctggacatgcacaccttcgtgttcttcagatgcaccctgtgccaggaggtgttcgacagcaaggtgagcatccagctgcacctggccgtgaagcacagcaacgagaagaaggtgtacagatgcaccagctgcaactgggacttcagaaacgagaccgacctgcagctgcacgtgaagcacaaccacctggagaaccagggcaaggtgcacaagtgcatcttctgcggcgagagcttcggcaccgaggtggagctgcagtgccacatcaccacccacagcaagaagtacaactgcaagttctgcagcaaggccttccacgccatcatcctgctggagaagcacctgagagagaagcactgcgtgttcgagaccaagacccccaactgcggcaccaacggcgccagcgagcaggtgcagaaggaggaggtggagctgcagaccctgctgaccaacagccaggagagccacaacagccacgacggcagcgaggaggacgtggacaccagcgagcccatgtacggctgcgacatctgcggcgccgcctacaccatggagaccctgctgcagaaccaccagctgagagaccacaacatcagacccggcgagagcgccatcgtgaagaagaaggccgagctgatcaagggcaactacaagtgcaacgtgtgcagcagaaccttcttcagcgagaacggcctgagagagcacatgcagacccacctgggccccgtgaagcactacatgtgccccatctgcggcgagagattccccagcctgctgaccctgaccgagcacaaggtgacccacagcaagagcctggacaccggcaactgcagaatctgcaagatgcccctgcagagcgaggaggagttcctggagcactgccagatgcaccccgacctgagaaacagcctgaccggcttcagatgcgtggtgtgcatgcagaccgtgaccagcaccctggagctgaagatccacggcaccttccacatgcagaagaccggcaacggcagcgccgtgcagaccaccggcagaggccagcacgtgcagaagctgtacaagtgcgccagctgcctgaaggagttcagaagcaagcaggacctggtgaagctggacatcaacggcctgccctacggcctgtgcgccggctgcgtgaacctgagcaagagcgccagccccggcatcaacgtgccccccggcaccaacagacccggcctgggccagaacgagaacctgagcgccatcgagggcaagggcaaggtgggcggcctgaagaccagatgcagcagctgcaacgtgaagttcgagagcgagagcgagctgcagaaccacatccagaccatccacagagagctggtgcccgacagcaacagcacccagctgaagaccccccaggtgagccccatgcccagaatcagccccagccagagcgacgagaagaagacctaccagtgcatcaagtgccagatggtgttctacaacgagtgggacatccaggtgcacgtggccaaccacatgatcgacgagggcctgaaccacgagtgcaagctgtgcagccagaccttcgacagccccgccaagctgcagtgccacctgatcgagcacagcttcgagggcatgggcggcaccttcaagtgccccgtgtgcttcaccgtgttcgtgcaggccaacaagctgcagcagcacatcttcagcgcccacggccaggaggacaagatctacgactgcacccagtgcccccagaagttcttcttccagaccgagctgcaggtgcacaccgccacccccagacagagctag

SEQ ID NO: 106089 - DNA, 4038 bp, synthetic construct
  misc_feature 1..4038: note = Description of Artificial Sequence: Synthetic coding sequence
  source 1..4038: mol_type = other DNA
ttcctgagcgactacgtgcagagcgagagcctgagagtgagaggccccctgtggagccaccccgacggcttcggcggcctggccagcatcttccactactacgtggactacagaagcgacagcgccgtgcaggacctggccgaccccaactgcaagctggaggacaagaccgaggacggcgaggccctggactgcaagaagagacccgaggacggcgaggagctggaggacgaggccgtgcacagctgcgacagctgcctgcaggtgttcgagagcctgagcgacatcaccgagcacaagatcaaccagtgccagctgaccgacggcgtggacgtggaggacgaccccacctgcagctggcccgccagcagccccagcagcaaggaccagaccagccccagccacggcgagggctgcgacttcggcgaggaggagggcggccccggcctgccctacccctgccagttctgcgacaagagcttcagcagactgagctacctgaagcaccacgagcagagccacagcgacaagctgcccttcaagtgcacctactgcagcagactgttcaagcacaagagaagcagagacagacacatcaagctgcacaccggcgacaagaagtaccactgcagcgagtgcgacgccgccttcagcagaagcgaccacctgaagatccacctgaagacccacaccagcaacaagccctacaagtgcgccatctgcagaagaggcttcctgagcagcagcagcctgcacggccacatgcaggtgcacgagagaaacaaggacggcagccagagcggcagcagaatggaggactggaagatgaaggacacccagaagtgcagccagtgcgaggagggcttcgacttccccgaggacctgcagaagcacatcgccgagtgccaccccgagtgcagccccaacgaggacagagccgccctgcagtgcgtgtactgccacgagctgttcgtggaggagaccagcctgatgaaccacatggagcaggtgcacagcggcgagaagaagaacagctgcagcatctgcagcgagagcttccacaccgtggaggagctgtacagccacatggacagccaccagcagcccgagagctgcaaccacagcaacagccccagcctggtgaccgtgggctacaccagcgtgagcagcaccacccccgacagcaacctgagcgtggacagcagcaccatggtggaggccgccccccccatccccaagagcagaggcagaaagagagccgcccagcagacccccgacatgaccggccccagcagcaagcaggccaaggtgacctacagctgcatctactgcaacaagcagctgttcagcagcctggccgtgctgcagatccacctgaagaccatgcacctggacaagcccgagcaggcccacatctgccagtactgcctggaggtgctgcccagcctgtacaacctgaacgagcacctgaagcaggtgcacgaggcccaggaccccggcctgatcgtgagcgccatgcccgccatcgtgtaccagtgcaacttctgcagcgaggtggtgaacgacctgaacaccctgcaggagcacatcagatgcagccacggcttcgccaaccccgccgccaaggacagcaacgccttcttctgcccccactgctacatgggcttcctgaccgacagcagcctggaggagcacatcagacaggtgcactgcgacctgagcggcagcagattcggcagccccgtgctgggcacccccaaggagcccgtggtggaggtgtacagctgcagctactgcaccaacagccccatcttcaacagcgtgctgaagctgaacaagcacatcaaggagaaccacaagaacatccccctggccctgaactacatccacaacggcaagaagagcagagccctgagccccctgagccccgtggccatcgagcagaccagcctgaagatgatgcaggccgtgggcggcgcccccgccagacccaccggcgagtacatctgcaaccagtgcggcgccaagtacaccagcctggacagcttccagacccacctgaagacccacctggacaccgtgctgcccaagctgacctgcccccagtgcaacaaggagttccccaaccaggagagcctgctgaagcacgtgaccatccacttcatgatcaccagcacctactacatctgcgagagctgcgacaagcagttcaccagcgtggacgacctgcagaagcacctgctggacatgcacaccttcgtgttcttcagatgcaccctgtgccaggaggtgttcgacagcaaggtgagcatccagctgcacctggccgtgaagcacagcaacgagaagaaggtgtacagatgcaccagctgcaactgggacttcagaaacgagaccgacctgcagctgcacgtgaagcacaaccacctggagaaccagggcaaggtgcacaagtgcatcttctgcggcgagagcttcggcaccgaggtggagctgcagtgccacatcaccacccacagcaagaagtacaactgcaagttctgcagcaaggccttccacgccatcatcctgctggagaagcacctgagagagaagcactgcgtgttcgagaccaagacccccaactgcggcaccaacggcgccagcgagcaggtgcagaaggaggaggtggagctgcagaccctgctgaccaacagccaggagagccacaacagccacgacggcagcgaggaggacgtggacaccagcgagcccatgtacggctgcgacatctgcggcgccgcctacaccatggagaccctgctgcagaaccaccagctgagagaccacaacatcagacccggcgagagcgccatcgtgaagaagaaggccgagctgatcaagggcaactacaagtgcaacgtgtgcagcagaaccttcttcagcgagaacggcctgagagagcacatgcagacccacctgggccccgtgaagcactacatgtgccccatctgcggcgagagattccccagcctgctgaccctgaccgagcacaaggtgacccacagcaagagcctggacaccggcaactgcagaatctgcaagatgcccctgcagagcgaggaggagttcctggagcactgccagatgcaccccgacctgagaaacagcctgaccggcttcagatgcgtggtgtgcatgcagaccgtgaccagcaccctggagctgaagatccacggcaccttccacatgcagaagaccggcaacggcagcgccgtgcagaccaccggcagaggccagcacgtgcagaagctgtacaagtgcgccagctgcctgaaggagttcagaagcaagcaggacctggtgaagctggacatcaacggcctgccctacggcctgtgcgccggctgcgtgaacctgagcaagagcgccagccccggcatcaacgtgccccccggcaccaacagacccggcctgggccagaacgagaacctgagcgccatcgagggcaagggcaaggtgggcggcctgaagaccagatgcagcagctgcaacgtgaagttcgagagcgagagcgagctgcagaaccacatccagaccatccacagagagctggtgcccgacagcaacagcacccagctgaagaccccccaggtgagccccatgcccagaatcagccccagccagagcgacgagaagaagacctaccagtgcatcaagtgccagatggtgttctacaacgagtgggacatccaggtgcacgtggccaaccacatgatcgacgagggcctgaaccacgagtgcaagctgtgcagccagaccttcgacagccccgccaagctgcagtgccacctgatcgagcacagcttcgagggcatgggcggcaccttcaagtgccccgtgtgcttcaccgtgttcgtgcaggccaacaagctgcagcagcacatcttcagcgcccacggccaggaggacaagatctacgactgcacccagtgcccccagaagttcttcttccagaccgagctgcaggtgcacaccgccacccccagacagagctag

SEQ ID NO: 106090 - DNA, 2013 bp, synthetic construct
  misc_feature 1..2013: note = Description of Artificial Sequence: Synthetic coding sequence
  source 1..2013: mol_type = other DNA
atggccgaggtggtggccgaggtggccgagatgcccacccagatgagccccggcgccgtggagatgagcacccccatgagcgccgagatgatggagatgagcaccgaggtgaccgagatgacccccggcgaggccctggccagcagcctgttcttccagcaccaccagttcatgtgcagcgagtgcggcagcctgtacaacaccctggaggaggtgctgagccaccaggagcagcacatgctggccgtgagcgaggaggaggccctgaccacccagaacgtgggcctggagcccgagctggtgcccggcgccgagggccccttccagtgcggcgagtgcagccagctgatcctgagccccggcgagctgctggcccaccaggacgcccacctgagagagagcgccaaccagatccagtaccagtgctgggactgccaggagctgttccccagccccgagctgtgggtggcccacagaaaggcccagcacctgagcgccaccgtggccgagccccccgtgcccccccccctgcccccccccacccccctgcccccccccagcccccccagcgaggtgaagatggagccctacgagtgccccgagtgcagcaccctgtgcgccacccccgaggagttcctggagcaccagggcacccacttcgacagcctggagaaggaggagagaaacggcctggaggaggaggaggaggacgacgaggaggacgaggaggacgacgaggagatggaggacgaggaggccatggccgaggtgggcgacgacgccgtgggcggcgacgagagcaccgccggctgggcccagggctgcggcgactgcccccagcaccagcccagcgccggcgccagaagacagcacagaagaaccgcccacagccccgccagcgccacccaccccttccactgcagccagtgccagagaagcttcagcagcgccaacagactgcaggcccacggcagagcccacgtgggcggcacccacgagtgcaccacctgcagcaaggtgttcaagaaggccgccagcctggagcagcacctgagactgcacagaggcgaggccagatacctgtgcgtggactgcggcagaggcttcggcaccgagctgaccctggtggcccacagaagagcccacaccgccaaccccctgcacagatgcagatgcggcaagaccttcagcaacatgaccaagttcctgtaccacagaagaacccacgccggcaagagcggcgccccccccaccggcgccaccgccccccccgcccccgccgagcccaccccccccccccccccccccgccccccccgcccagctgccctgcccccagtgcagcaagagcttcgccagcgccagcagactgagcagacacagaagagccgtgcacggcccccccgagagaagacacagatgcggcgtgtgcggcaagggcttcaagaagctgatccacgtgagaaaccacctgagaacccacaccggcgagagacccttccagtgccacagctgcggcaagaccttcgccagcctggccaacctgagcagacaccagctgacccacaccggcgccagaccctaccagtgcctggactgcggcaagagattcacccagagcagcaacctgcagcagcacagaagactgcacctgagacccgtggccttcgccagagcccccagactgcccatcaccggcctgtacaacaagagcccctactactgcggcacctgcggcagatggttcagagccatggccggcctgagactgcaccagagagtgcacgccagagccagaaccctgaccctgcagccccccagaagccccagccccgcccccccccccccccccgagccccagcagaccatcatgtgcaccgagctgggcgagaccatcgccatcatcgagaccagccagcccctggccctggaggacaccctgcagctgtgccaggccgccctgggcgccagcgaggccggcggcctgctgcagctggacaccgccttcgtgtag

SEQ ID NO: 106091 - DNA, 1581 bp, synthetic construct
  misc_feature 1..1581: note = Description of Artificial Sequence: Synthetic coding sequence
  source 1..1581: mol_type = other DNA
atggccgaggtggtggccgaggtggccgagatgcccacccagatgagccccggcgccgtggagatgagcacccccatgagcgccgagatgatggagatgagcaccgaggtgaccgagatgacccccagcccccccagcgaggtgaagatggagccctacgagtgccccgagtgcagcaccctgtgcgccacccccgaggagttcctggagcaccagggcacccacttcgacagcctggagaaggaggagagaaacggcctggaggaggaggaggaggacgacgaggaggacgaggaggacgacgaggagatggaggacgaggaggccatggccgaggtgggcgacgacgccgtgggcggcgacgagagcaccgccggctgggcccagggctgcggcgactgcccccagcaccagcccagcgccggcgccagaagacagcacagaagaaccgcccacagccccgccagcgccacccaccccttccactgcagccagtgccagagaagcttcagcagcgccaacagactgcaggcccacggcagagcccacgtgggcggcacccacgagtgcaccacctgcagcaaggtgttcaagaaggccgccagcctggagcagcacctgagactgcacagaggcgaggccagatacctgtgcgtggactgcggcagaggcttcggcaccgagctgaccctggtggcccacagaagagcccacaccgccaaccccctgcacagatgcagatgcggcaagaccttcagcaacatgaccaagttcctgtaccacagaagaacccacgccggcaagagcggcgccccccccaccggcgccaccgccccccccgcccccgccgagcccaccccccccccccccccccccgccccccccgcccagctgccctgcccccagtgcagcaagagcttcgccagcgccagcagactgagcagacacagaagagccgtgcacggcccccccgagagaagacacagatgcggcgtgtgcggcaagggcttcaagaagctgatccacgtgagaaaccacctgagaacccacaccggcgagagacccttccagtgccacagctgcggcaagaccttcgccagcctggccaacctgagcagacaccagctgacccacaccggcgccagaccctaccagtgcctggactgcggcaagagattcacccagagcagcaacctgcagcagcacagaagactgcacctgagacccgtggccttcgccagagcccccagactgcccatcaccggcctgtacaacaagagcccctactactgcggcacctgcggcagatggttcagagccatggccggcctgagactgcaccagagagtgcacgccagagccagaaccctgaccctgcagccccccagaagccccagccccgcccccccccccccccccgagccccagcagaccatcatgtgcaccgagctgggcgagaccatcgccatcatcgagaccagccagcccctggccctggaggacaccctgcagctgtgccaggccgccctgggcgccagcgaggccggcggcctgctgcagctggacaccgccttcgtgtag

SEQ ID NO: 106092 - DNA, 1983 bp, synthetic construct
  misc_feature 1..1983: note = Description of Artificial Sequence: Synthetic coding sequence
  source 1..1983: mol_type = other DNA
atggcccacgccctggtgaccttcagagacgtggccatcgacttcagccagaaggagtgggagtgcctggacaccacccagagaaagctgtacagagacgtgatgctggagaactacaacaacctggtgagcctgggctacagcggcagcaagcccgacgtgatcaccctgctggagcagggcaaggagccctgcgtggtggccagagacgtgaccggcagacagtgccccggcctgctgagcagacacaagaccaagaagctgagcagcgagaaggacatccacgagatcagcctgagcaaggagagcatcatcgagaagagcaagaccctgagactgaagggcagcatcttcagaaacgagtggcagaacaagagcgagttcgagggccagcagggcctgaaggagagaagcatcagccagaagaagatcgtgagcaagaagatgagcaccgacagaaagagacccagcttcaccctgaaccagagaatccacaacagcgagaagagctgcgacagccacctggtgcagcacggcaagatcgacagcgacgtgaagcacgactgcaaggagtgcggcagcaccttcaacaacgtgtaccagctgaccctgcaccagaagatccacaccggcgagaagagctgcaagtgcgagaagtgcggcaaggtgttcagccacagctaccagctgaccctgcaccagagattccacaccggcgagaagccctacgagtgccaggagtgcggcaagaccttcaccctgtacccccagctgaacagacaccagaagatccacaccggcaagaagccctacatgtgcaagaagtgcgacaagggcttcttcagcagactggagctgacccagcacaagagaatccacaccggcaagaagagctacgagtgcaaggagtgcggcaaggtgttccagctgatcttctacttcaaggagcacgagagaatccacaccggcaagaagccctacgagtgcaaggagtgcggcaaggccttcagcgtgtgcggccagctgaccagacaccagaagatccacaccggcgtgaagccctacgagtgcaaggagtgcggcaagaccttcagactgagcttctacctgaccgagcacagaagaacccacgccggcaagaagccctacgagtgcaaggagtgcggcaagagcttcaacgtgagaggccagctgaacagacacaagaccatccacaccggcatcaagcccttcgcctgcaaggtgtgcgagaaggccttcagctacagcggcgacctgagagtgcacagcagaatccacaccggcgagaagccctacgagtgcaaggagtgcggcaaggccttcatgctgagaagcgtgctgaccgagcaccagagactgcacaccggcgtgaagccctacgagtgcaaggagtgcggcaagaccttcagagtgagaagccagatcagcctgcacaagaagatccacaccgacgtgaagccctacaagtgcgtgagatgcggcaagaccttcagattcggcttctacctgaccgagcaccagagaatccacaccggcgagaagccctacaagtgcaaggagtgcggcaaggccttcatcagaagaggcaacctgaaggagcacctgaagatccacagcggcctgaagccctacgactgcaaggagtgcggcaagagcttcagcagaagaggccagttcaccgagcaccagaagatccacaccggcgtgaagccctacaagtgcaaggagtgcggcaaggccttcagcagaagcgtggacctgagaatccaccagagaatccacaccggcgagaagccctacgagtgcaagcagtgcggcaaggccttcagactgaacagccacctgaccgagcaccagagaatccacaccggcgagaagccctacgagtgcaaggtgtgcagaaaggccttcagacagtacagccacctgtaccagcaccagaagacccacaacgtgatctag

SEQ ID NO: 106093 - DNA, 1887 bp, synthetic construct
  misc_feature 1..1887: note = Description of Artificial Sequence: Synthetic coding sequence
  source 1..1887: mol_type = other DNA
atggcccacgccctggtgaccttcagagacgtggccatcgacttcagccagaaggagtgggagtgcctggacaccacccagagaaagctgtacagagacgtgatgctggagaactacaacaacctggtgagcctgggcctgctgagcagacacaagaccaagaagctgagcagcgagaaggacatccacgagatcagcctgagcaaggagagcatcatcgagaagagcaagaccctgagactgaagggcagcatcttcagaaacgagtggcagaacaagagcgagttcgagggccagcagggcctgaaggagagaagcatcagccagaagaagatcgtgagcaagaagatgagcaccgacagaaagagacccagcttcaccctgaaccagagaatccacaacagcgagaagagctgcgacagccacctggtgcagcacggcaagatcgacagcgacgtgaagcacgactgcaaggagtgcggcagcaccttcaacaacgtgtaccagctgaccctgcaccagaagatccacaccggcgagaagagctgcaagtgcgagaagtgcggcaaggtgttcagccacagctaccagctgaccctgcaccagagattccacaccggcgagaagccctacgagtgccaggagtgcggcaagaccttcaccctgtacccccagctgaacagacaccagaagatccacaccggcaagaagccctacatgtgcaagaagtgcgacaagggcttcttcagcagactggagctgacccagcacaagagaatccacaccggcaagaagagctacgagtgcaaggagtgcggcaaggtgttccagctgatcttctacttcaaggagcacgagagaatccacaccggcaagaagccctacgagtgcaaggagtgcggcaaggccttcagcgtgtgcggccagctgaccagacaccagaagatccacaccggcgtgaagccctacgagtgcaaggagtgcggcaagaccttcagactgagcttctacctgaccgagcacagaagaacccacgccggcaagaagccctacgagtgcaaggagtgcggcaagagcttcaacgtgagaggccagctgaacagacacaagaccatccacaccggcatcaagcccttcgcctgcaaggtgtgcgagaaggccttcagctacagcggcgacctgagagtgcacagcagaatccacaccggcgagaagccctacgagtgcaaggagtgcggcaaggccttcatgctgagaagcgtgctgaccgagcaccagagactgcacaccggcgtgaagccctacgagtgcaaggagtgcggcaagaccttcagagtgagaagccagatcagcctgcacaagaagatccacaccgacgtgaagccctacaagtgcgtgagatgcggcaagaccttcagattcggcttctacctgaccgagcaccagagaatccacaccggcgagaagccctacaagtgcaaggagtgcggcaaggccttcatcagaagaggcaacctgaaggagcacctgaagatccacagcggcctgaagccctacgactgcaaggagtgcggcaagagcttcagcagaagaggccagttcaccgagcaccagaagatccacaccggcgtgaagccctacaagtgcaaggagtgcggcaaggccttcagcagaagcgtggacctgagaatccaccagagaatccacaccggcgagaagccctacgagtgcaagcagtgcggcaaggccttcagactgaacagccacctgaccgagcaccagagaatccacaccggcgagaagccctacgagtgcaaggtgtgcagaaaggccttcagacagtacagccacctgtaccagcaccagaagacccacaacgtgatctag

SEQ ID NO: 106094 - DNA, 1887 bp, synthetic construct; identical to SEQ ID NO: 106093
  misc_feature 1..1887: note = Description of Artificial Sequence: Synthetic coding sequence
  source 1..1887: mol_type = other DNA

SEQ ID NO: 106095 - DNA, 1983 bp, synthetic construct; identical to SEQ ID NO: 106092
  misc_feature 1..1983: note = Description of Artificial Sequence: Synthetic coding sequence
  source 1..1983: mol_type = other DNA

SEQ ID NO: 106096 - DNA, 1500 bp, synthetic construct
  misc_feature 1..1500: note = Description of Artificial Sequence: Synthetic coding sequence
  source 1..1500: mol_type = other DNA
atggcccagggcctggtgaccttcagagacgtggccatcgagttcagcctggaggagtggaagtgcctggagcccgcccagagagacctgtacagagaggtgaccctggagaacttcggccacctggccagcctgggcctgagcatcagcaagcccgacgtggtgagcctgctggagcagggcaaggagccctggatgatcgccaacgacgtgaccggcccctggtgccccgacctggagagcagatgcgagaagttcctgcagaaggacatcttcgagatcggcgccttcaactgggagatcatggagagcctgaagtgcagcgacctggagggcagcgacttcagagccgactgggagtgcgagggccagttcgagagacaggtgaacgaggagtgctacttcaagcaggtgaacgtgacctacggccacatgcccgtgttccagcaccacaccagccacaccgtgagacagagcagagagaccggcgagaagctgatggagtgccacgagtgcggcaaggccttcagcagaggcagccacctgatccagcaccagaagatccacaccggcgagaagcccttcggctgcaaggagtgcggcaaggccttcagcagagccagccacctggtgcagcaccagagaatccacaccggcgagaagccctacgactgcaaggactgcggcaaggccttcggcagaaccagcgagctgatcctgcaccagagactgcacaccggcgtgaagccctacgagtgcaaggagtgcggcaagaccttcagacagcacagccagctgatcctgcaccagagaacccacaccggcgagaagccctacgtgtgcaaggactgcggcaaggccttcatcagaggcagccagctgaccgtgcacagaagaatccacaccggcgccagaccctacgagtgcaaggagtgcggcaaggccttcagacagcacagccagctgaccgtgcaccagagaatccacaccggcgagaagccctacgagtgcaaggagtgcggcaagggcttcatccacagcagcgaggtgaccagacaccagagaatccacagcggcgagaagccctacgagtgcaaggagtgcggcaaggccttcagacagcacgcccagctgaccagacaccagagagtgcacaccggcgacagaccctacgagtgcaaggactgcggcaaggccttcagcagaagcagctacctgatccagcaccagagaatccacaccggcgacaagccctacgagtgcaaggagtgcggcaaggccttcatcagagtgagccagctgacccaccaccagagaatccacacctgcgagaagccctacgagtgcagagagtgcggcatggccttcatcagaagcagccagctgaccgagcaccagagaatccaccccggcatcaagccctacgagtgcagagagtgcggccaggccttcatcctgggcagccagctgatcgagcactacagaatccacaccggctag

SEQ ID NO: 106097 - DNA, 1620 bp, synthetic construct
  misc_feature 1..1620: note = Description of Artificial Sequence: Synthetic coding sequence
  source 1..1620: mol_type = other DNA
atgagaagaggcccctgggagagatggagcctggccagccacagactggacgccggcctgtgcacctgccccagagaggagagcagagagatcagagccggccagatcgtgctgaaggccatggcccagggcctggtgaccttcagagacgtggccatcgagttcagcctggaggagtggaagtgcctggagcccgcccagagagacctgtacagagaggtgaccctggagaacttcggccacctggccagcctgggcctgagcatcagcaagcccgacgtggtgagcctgctggagcagggcaaggagccctggatgatcgccaacgacgtgaccggcccctggtgccccgacctggagagcagatgcgagaagttcctgcagaaggacatcttcgagatcggcgccttcaactgggagatcatggagagcctgaagtgcagcgacctggagggcagcgacttcagagccgactgggagtgcgagggccagttcgagagacaggtgaacgaggagtgctacttcaagcaggtgaacgtgacctacggccacatgcccgtgttccagcaccacaccagccacaccgtgagacagagcagagagaccggcgagaagctgatggagtgccacgagtgcggcaaggccttcagcagaggcagccacctgatccagcaccagaagatccacaccggcgagaagcccttcggctgcaaggagtgcggcaaggccttcagcagagccagccacctggtgcagcaccagagaatccacaccggcgagaagccctacgactgcaaggactgcggcaaggccttcggcagaaccagcgagctgatcctgcaccagagactgcacaccggcgtgaagccctacgagtgcaaggagtgcggcaagaccttcagacagcacagccagctgatcctgcaccagagaacccacaccggcgagaagccctacgtgtgcaaggactgcggcaaggccttcatcagaggcagccagctgaccgtgcacagaagaatccacaccggcgccagaccctacgagtgcaaggagtgcggcaaggccttcagacagcacagccagctgaccgtgcaccagagaatccacaccggcgagaagccctacgagtgcaaggagtgcggcaagggcttcatccacagcagcgaggtgaccagacaccagagaatccacagcggcgagaagccctacgagtgcaaggagtgcggcaaggccttcagacagcacgcccagctgaccagacaccagagagtgcacaccggcgacagaccctacgagtgcaaggactgcggcaaggccttcagcagaagcagctacctgatccagcaccagagaatccacaccggcgacaagccctacgagtgcaaggagtgcggcaaggccttcatcagagtgagccagctgacccaccaccagagaatccacacctgcgagaagccctacgagtgcagagagtgcggcatggccttcatcagaagcagccagctgaccgagcaccagagaatccaccccggcatcaagccctacgagtgcagagagtgcggccaggccttcatcctgggcagccagctgatcgagcactacagaatccacaccggctag

SEQ ID NO: 106098 - DNA, 1500 bp, synthetic construct; identical to SEQ ID NO: 106096
  misc_feature 1..1500: note = Description of Artificial Sequence: Synthetic coding sequence
  source 1..1500: mol_type = other DNA

SEQ ID NO: 106099 - DNA, 2061 bp, synthetic construct
  misc_feature 1..2061: note = Description of Artificial Sequence: Synthetic coding sequence
  source 1..2061: mol_type = other DNA
atgaccgagagccagggcaccgtgaccttcaaggacgtggccatcgacttcacccaggaggagtggaagagactggaccccgcccagagaaagctgtacagaaacgtgatgctggagaactacaacaacctgatcaccgtgggctaccccttcaccaagcccgacgtgatcttcaagctggagcaggaggaggagccctgggtgatggaggaggaggtgctgagaagacactggcagggcgagatctggggcgtggacgagcaccagaagaaccaggacagactgctgagacaggtggaggtgaagttccagaagaccctgaccgaggagaagggcaacgagtgccagaagaagttcgccaacgtgttccccctgaacagcgacttcttccccagcagacacaacctgtacgagtacgacctgttcggcaagtgcctggagcacaacttcgactgccacaacaacgtgaagtgcctgatgagaaaggagcactgcgagtacaacgagcccgtgaagagctacggcaacagcagcagccacttcgtgatcacccccttcaagtgcaaccactgcggcaagggcttcaaccagaccctggacctgatcagacacctgagaatccacaccggcgagaagccctacgagtgcagcaactgcagaaaggccttcagccacaaggagaagctgatcaagcactacaagatccacagcagagagcagagctacaagtgcaacgagtgcggcaaggccttcatcaagatgagcaacctgatcagacaccagagaatccacaccggcgagaagccctacgcctgcaaggagtgcgagaagagcttcagccagaagagcaacctgatcgaccacgagaagatccacaccggcgagaagccctacgagtgcaacgagtgcggcaaggccttcagccagaagcagagcctgatcgcccaccagaaggtgcacaccggcgagaagccctacgcctgcaacgagtgcggcaaggccttccccagaatcgccagcctggccctgcacatgagaagccacaccggcgagaagccctacaagtgcgacaagtgcggcaaggccttcagccagttcagcatgctgatcatccacgtgagaatccacaccggcgagaagccctacgagtgcaacgagtgcggcaaggccttcagccagagcagcgccctgaccgtgcacatgagaagccacaccggcgagaagccctacgagtgcaaggagtgcagaaaggccttcagccacaagaagaacttcatcacccaccagaagatccacaccagagagaagccctacgagtgcaacgagtgcggcaaggccttcatccagatgagcaacctggtgagacaccagagaatccacaccggcgagaagccctacatctgcaaggagtgcggcaaggccttcagccagaagagcaacctgatcgcccacgagaagatccacagcggcgagaagccctacgagtgcaacgagtgcggcaaggccttcagccagaagcagaacttcatcacccaccagaaggtgcacaccggcgagaagccctacgactgcaacgagtgcggcaaggccttcagccagatcgccagcctgaccctgcacctgagaagccacaccggcgagaagccctacgagtgcgacaagtgcggcaaggccttcagccagtgcagcctgctgaacctgcacatgagaagccacaccggcgagaagccctacgtgtgcaacgagtgcggcaaggccttcagccagagaaccagcctgatcgtgcacatgagaggccacaccggcgagaagccctacgagtgcaacaagtgcggcaaggccttcagccagagcagcagcctgaccatccacatcagaggccacaccggcgagaagcccttcgactgcagcaagtgcggcaaggccttcagccagatcagcagcctgaccctgcacatgagaaagcacaccggcgagaagccctaccactgcatcgagtgcggcaaggccttcagccagaagagccacctggtgagacaccagagaatccacacccactag

SEQ ID NO: 106100 - DNA, 1029 bp, synthetic construct
  misc_feature 1..1029: note = Description of Artificial Sequence: Synthetic coding sequence
  source 1..1029: mol_type = other DNA
atgagaagccacaccggcgagaagccctacaagtgcgacaagtgcggcaaggccttcagccagttcagcatgctgatcatccacgtgagaatccacaccggcgagaagccctacgagtgcaacgagtgcggcaaggccttcagccagagcagcgccctgaccgtgcacatgagaagccacaccggcgagaagccctacgagtgcaaggagtgcagaaaggccttcagccacaagaagaacttcatcacccaccagaagatccacaccagagagaagccctacgagtgcaacgagtgcggcaaggccttcatccagatgagcaacctggtgagacaccagagaatccacaccggcgagaagccctacatctgcaaggagtgcggcaaggccttcagccagaagagcaacctgatcgcccacgagaagatccacagcggcgagaagccctacgagtgcaacgagtgcggcaaggccttcagccagaagcagaacttcatcacccaccagaaggtgcacaccggcgagaagccctacgactgcaacgagtgcggcaaggccttcagccagatcgccagcctgaccctgcacctgagaagccacaccggcgagaagccctacgagtgcgacaagtgcggcaaggccttcagccagtgcagcctgctgaacctgcacatgagaagccacaccggcgagaagccctacgtgtgcaacgagtgcggcaaggccttcagccagagaaccagcctgatcgtgcacatgagaggccacaccggcgagaagccctacgagtgcaacaagtgcggcaaggccttcagccagagcagcagcctgaccatccacatcagaggccacaccggcgagaagcccttcgactgcagcaagtgcggcaaggccttcagccagatcagcagcctgaccctgcacatgagaaagcacaccggcgagaagccctaccactgcatcgagtgcggcaaggccttcagccagaagagccacctggtgagacaccagagaatccacacccactag

SEQ ID NO: 106101 - DNA, 1584 bp, synthetic construct
  misc_feature 1..1584: note = Description of Artificial Sequence: Synthetic coding sequence
  source 1..1584: mol_type = other DNA
atgagaaaggagcactgcgagtacaacgagcccgtgaagagctacggcaacagcagcagccacttcgtgatcacccccttcaagtgcaaccactgcggcaagggcttcaaccagaccctggacctgatcagacacctgagaatccacaccggcgagaagccctacgagtgcagcaactgcagaaaggccttcagccacaaggagaagctgatcaagcactacaagatccacagcagagagcagagctacaagtgcaacgagtgcggcaaggccttcatcaagatgagcaacctgatcagacaccagagaatccacaccggcgagaagccctacgcctgcaaggagtgcgagaagagcttcagccagaagagcaacctgatcgaccacgagaagatccacaccggcgagaagccctacgagtgcaacgagtgcggcaaggccttcagccagaagcagagcctgatcgcccaccagaaggtgcacaccggcgagaagccctacgcctgcaacgagtgcggcaaggccttccccagaatcgccagcctggccctgcacatgagaagccacaccggcgagaagccctacaagtgcgacaagtgcggcaaggccttcagccagttcagcatgctgatcatccacgtgagaatccacaccggcgagaagccctacgagtgcaacgagtgcggcaaggccttcagccagagcagcgccctgaccgtgcacatgagaagccacaccggcgagaagccctacgagtgcaaggagtgcagaaaggccttcagccacaagaagaacttcatcacccaccagaagatccacaccagagagaagccctacgagtgcaacgagtgcggcaaggccttcatccagatgagcaacctggtgagacaccagagaatccacaccggcgagaagccctacatctgcaaggagtgcggcaaggccttcagccagaagagcaacctgatcgcccacgagaagatccacagcggcgagaagccctacgagtgcaacgagtgcggcaaggccttcagccagaagcagaacttcatcacccaccagaaggtgcacaccggcgagaagccctacgactgcaacgagtgcggcaaggccttcagccagatcgccagcctgaccctgcacctgagaagccacaccggcgagaagccctacgagtgcgacaagtgcggcaaggccttcagccagtgcagcctgctgaacctgcacatgagaagccacaccggcgagaagccctacgtgtgcaacgagtgcggcaaggccttcagccagagaaccagcctgatcgtgcacatgagaggccacaccggcgagaagccctacgagtgcaacaagtgcggcaaggccttcagccagagcagcagcctgaccatccacatcagaggccacaccggcgagaagcccttcgactgcagcaagtgcggcaaggccttcagccagatcagcagcctgaccctgcacatgagaaagcacaccggcgagaagccctaccactgcatcgagtgcggcaaggccttcagccagaagagccacctggtgagacaccagagaatccacacccactag

SEQ ID NO: 106102 - DNA, 1551 bp, synthetic construct
  misc_feature 1..1551: note = Description of Artificial Sequence: Synthetic coding sequence
  source 1..1551: mol_type = other DNA
atgttcgagcagctgaagcccatcgagcccagagactgctggagagaggccagagtgaagaagaagcccgtgaccttcgaggacgtggccgtgaacttcacccaggaggagtgggactgcctggacgccagccagagagtgctgtaccaggacgtgatgagcgagaccttcaagaacctgaccagcgtggccagaatcttcctgcacaagcccgagctgatcaccaagctggagcaggaggaggagcagtggagagagttcgtgcacctgcccaacaccgagggcctgagcgagggcaagaagaaggagctgagagagcagcaccccagcctgagagacgagggcaccagcgacgacaaggtgttcctggcctgcagaggcgccggccagtgccccctgagcgcccccgccggcaccatggacagaaccagagtgctgcaggccagccaggccggcccccccttcttctgctacacctgcggcaagtgcttcagcagaagaagctacctgtacagccaccagttcgtgcacaaccccaagctgaccaacagctgcagccagtgcggcaagctgttcagaagccccaagagcctgagctaccacagaagaatgcacctgggcgagagacccttctgctgcaccctgtgcgacaagacctactgcgacgccagcggcctgagcagacacagaagagtgcacctgggctacagaccccacagctgcagcgtgtgcggcaagagcttcagagaccagagcgagctgaagagacaccagaagatccaccagaaccaggagcccgtggacggcaaccaggagtgcaccctgagaatccccggcacccaggccgagttccagacccccatcgccagaagccagagaagcatccagggcctgctggacgtgaaccacgcccccgtggccagaagccaggagcccatcttcagaaccgagggccccatggcccagaaccaggccagcgtgctgaagaaccaggcccccgtgaccagaacccaggcccccatcaccggcaccctgtgccaggacgccagaagcaacagccaccccgtgaagcccagcagactgaacgtgttctgctgcccccactgcagcctgaccttcagcaagaagagctacctgagcagacaccagaaggcccacctgaccgagccccccaactactgcttccactgcagcaagagcttcagcagcttcagcagactggtgagacaccagcagacccactggaagcagaagagctacctgtgccccatctgcgacctgagcttcggcgagaaggagggcctgatggaccactggagaggctacaagggcaaggacctgtgccagagcagccaccacaagtgcagagtgatcctgggccagtggctgggcttcagccacgacgtgcccaccatggccggcgaggagtggaagcacggcggcgaccagagcccccccagaatccacacccccagaagaagaggcctgagagagaaggcctgcaagggcgacaagaccaaggaggccgtgagcatcctgaagcacaagtag

SEQ ID NO: 106103 - DNA, 1551 bp, synthetic construct; identical to SEQ ID NO: 106102
  misc_feature 1..1551: note = Description of Artificial Sequence: Synthetic coding sequence
  source 1..1551: mol_type = other DNA

SEQ ID NO: 106104 - DNA, 1551 bp, synthetic construct; identical to SEQ ID NO: 106102
  misc_feature 1..1551: note = Description of Artificial Sequence: Synthetic coding sequence
  source 1..1551: mol_type = other DNA

SEQ ID NO: 106105 - DNA, 1551 bp, synthetic construct; identical to SEQ ID NO: 106102
  misc_feature 1..1551: note = Description of Artificial Sequence: Synthetic coding sequence
  source 1..1551: mol_type = other DNA

SEQ ID NO: 106106 - DNA, 636 bp, synthetic construct
  misc_feature 1..636: note = Description of Artificial Sequence: Synthetic coding sequence
  source 1..636: mol_type = other DNA
tgagccagaagccaggagcccatcttcagaaccgagggccccatggcccagaaccaggccagcgtgctgaagaaccaggcccccgtgaccagaacccaggcccccatcaccggcaccctgtgccaggacgccagaagcaacagccaccccgtgaagcccagcagactgaacgtgttctgctgcccccactgcagcctgaccttcagcaagaagagctacctgagcagacaccagaaggcccacctgaccgagccccccaactactgcttccactgcagcaagagcttcagcagcttcagcagactggtgagacaccagcagacccactggaagcagaagagctacctgtgccccatctgcgacctgagcttcggcgagaaggagggcctgatggaccactggagaggctacaagggcaaggacctgtgccagagcagccaccacaagtgcagagtgatcctgggccagtggctgggcttcagccacgacgtgcccaccatggccggcgaggagtggaagcacggcggcgaccagagcccccccagaatccacacccccagaagaagaggcctgagagagaaggcctgcaagggcgacaagaccaaggaggccgtgagcatcctgaagcacaagtag

SEQ ID NO: 106107 - DNA, 1551 bp, synthetic construct; identical to SEQ ID NO: 106102
  misc_feature 1..1551: note = Description of Artificial Sequence: Synthetic coding sequence
  source 1..1551: mol_type = other DNA

SEQ ID NO: 106108 - DNA, 1551 bp, synthetic construct; identical to SEQ ID NO: 106102
  misc_feature 1..1551: note = Description of Artificial Sequence: Synthetic coding sequence
  source 1..1551: mol_type = other DNA

SEQ ID NO: 106109 - DNA, 1551 bp, synthetic construct; identical to SEQ ID NO: 106102
  misc_feature 1..1551: note = Description of Artificial Sequence: Synthetic coding sequence
  source 1..1551: mol_type = other DNA

SEQ ID NO: 106110 - DNA, 1551 bp, synthetic construct; identical to SEQ ID NO: 106102
  misc_feature 1..1551: note = Description of Artificial Sequence: Synthetic coding sequence
  source 1..1551: mol_type = other DNA

SEQ ID NO: 106111 - DNA, 1611 bp, synthetic construct
  misc_feature 1..1611: note = Description of Artificial Sequence: Synthetic coding sequence
  source 1..1611: mol_type = other DNA
atgttcgagcagctgaagcccatcgagcccgtgcagaagaccctgccctgggtgggcgaggtggccgccaccctgcaggaggccatgaagagagactgctggagagaggccagagtgaagaagaagcccgtgaccttcgaggacgtggccgtgaacttcacccaggaggagtgggactgcctggacgccagccagagagtgctgtaccaggacgtgatgagcgagaccttcaagaacctgaccagcgtggccagaatcttcctgcacaagcccgagctgatcaccaagctggagcaggaggaggagcagtggagagagttcgtgcacctgcccaacaccgagggcctgagcgagggcaagaagaaggagctgagagagcagcaccccagcctgagagacgagggcaccagcgacgacaaggtgttcctggcctgcagaggcgccggccagtgccccctgagcgcccccgccggcaccatggacagaaccagagtgctgcaggccagccaggccggcccccccttcttctgctacacctgcggcaagtgcttcagcagaagaagctacctgtacagccaccagttcgtgcacaaccccaagctgaccaacagctgcagccagtgcggcaagctgttcagaagccccaagagcctgagctaccacagaagaatgcacctgggcgagagacccttctgctgcaccctgtgcgacaagacctactgcgacgccagcggcctgagcagacacagaagagtgcacctgggctacagaccccacagctgcagcgtgtgcggcaagagcttcagagaccagagcgagctgaagagacaccagaagatccaccagaaccaggagcccgtggacggcaaccaggagtgcaccctgagaatccccggcacccaggccgagttccagacccccatcgccagaagccagagaagcatccagggcctgctggacgtgaaccacgcccccgtggccagaagccaggagcccatcttcagaaccgagggccccatggcccagaaccaggccagcgtgctgaagaaccaggcccccgtgaccagaacccaggcccccatcaccggcaccctgtgccaggacgccagaagcaacagccaccccgtgaagcccagcagactgaacgtgttctgctgcccccactgcagcctgaccttcagcaagaagagctacctgagcagacaccagaaggcccacctgaccgagccccccaactactgcttccactgcagcaagagcttcagcagcttcagcagactggtgagacaccagcagacccactggaagcagaagagctacctgtgccccatctgcgacctgagcttcggcgagaaggagggcctgatggaccactggagaggctacaagggcaaggacctgtgccagagcagccaccacaagtgcagagtgatcctgggccagtggctgggcttcagccacgacgtgcccaccatggccggcgaggagtggaagcacggcggcgaccagagcccccccagaatccacacccccagaagaagaggcctgagagagaaggcctgcaagggcgacaagaccaaggaggccgtgagcatcctgaagcacaagtag

SEQ ID NO: 106112 - DNA, 1551 bp, synthetic construct; identical to SEQ ID NO: 106102
  misc_feature 1..1551: note = Description of Artificial Sequence: Synthetic coding sequence
  source 1..1551: mol_type = other DNA

SEQ ID NO: 106113 - DNA, 1356 bp, synthetic construct
  misc_feature 1..1356: note = Description of Artificial Sequence: Synthetic coding sequence
  source 1..1356: mol_type = other DNA
gccggcggcagccccgagagcctgctgttcttccagaagcccgtgaccttcgaggacgtggccgtgaacttcacccaggaggagtgggactgcctggacgccagccagagagtgctgtaccaggacgtgatgagcgagaccttcaagaacctgaccagcgtggccagaatcttcctgcacaagcccgagctgatcaccaagctggagcaggaggaggagcagtggagagagaccagagtgctgcaggccagccaggccggcccccccttcttctgctacacctgcggcaagtgcttcagcagaagaagctacctgtacagccaccagttcgtgcacaaccccaagctgaccaacagctgcagccagtgcggcaagctgttcagaagccccaagagcctgagctaccacagaagaatgcacctgggcgagagacccttctgctgcaccctgtgcgacaagacctactgcgacgccagcggcctgagcagacacagaagagtgcacctgggctacagaccccacagctgcagcgtgtgcggcaagagcttcagagaccagagcgagctgaagagacaccagaagatccaccagaaccaggagcccgtggacggcaaccaggagtgcaccctgagaatccccggcacccaggccgagttccagacccccatcgccagaagccagagaagcatccagggcctgctggacgtgaaccacgcccccgtggccagaagccaggagcccatcttcagaaccgagggccccatggcccagaaccaggccagcgtgctgaagaaccaggcccccgtgaccagaacccaggcccccatcaccggcaccctgtgccaggacgccagaagcaacagccaccccgtgaagcccagcagactgaacgtgttctgctgcccccactgcagcctgaccttcagcaagaagagctacctgagcagacaccagaaggcccacctgaccgagccccccaactactgcttccactgcagcaagagcttcagcagcttcagcagactggtgagacaccagcagacccactggaagcagaagagctacctgtgccccatctgcgacctgagcttcggcgagaaggagggcctgatggaccactggagaggctacaagggcaaggacctgtgccagagcagccaccacaagtgcagagtgatcctgggccagtggctgggcttcagccacgacgtgcccaccatggccggcgaggagtggaagcacggcggcgaccagagcccccccagaatccacacccccagaagaagaggcctgagagagaaggcctgcaagggcgacaagaccaaggaggccgtgagcatcctgaagcacaagtag

SEQ ID NO: 106114 - DNA, 1551 bp, synthetic construct; identical to SEQ ID NO: 106102
  misc_feature 1..1551: note = Description of Artificial Sequence: Synthetic coding sequence
  source 1..1551: mol_type = other DNA

SEQ ID NO: 106115 - DNA, 1611 bp, synthetic construct; identical to SEQ ID NO: 106111
  misc_feature 1..1611: note = Description of Artificial Sequence: Synthetic coding sequence
  source 1..1611: mol_type = other DNA

SEQ ID NO: 106116 - DNA, 1611 bp, synthetic construct; identical to SEQ ID NO: 106111
  misc_feature 1..1611: note = Description of Artificial Sequence: Synthetic coding sequence
  source 1..1611: mol_type = other DNA

SEQ ID NO: 106117 - DNA, 1611 bp, synthetic construct; identical to SEQ ID NO: 106111
  misc_feature 1..1611: note = Description of Artificial Sequence: Synthetic coding sequence
  source 1..1611: mol_type = other DNA

SEQ ID NO: 106118 - DNA, 1611 bp, synthetic construct; identical to SEQ ID NO: 106111
  misc_feature 1..1611: note = Description of Artificial Sequence: Synthetic coding sequence
  source 1..1611: mol_type = other DNA

SEQ ID NO: 106119 - DNA, 1551 bp, synthetic construct; identical to SEQ ID NO: 106102
  misc_feature 1..1551: note = Description of Artificial Sequence: Synthetic coding sequence
  source 1..1551: mol_type = other DNA

SEQ ID NO: 106120 - DNA, 1551 bp, synthetic construct; identical to SEQ ID NO: 106102
  misc_feature 1..1551: note = Description of Artificial Sequence: Synthetic coding sequence
  source 1..1551: mol_type = other DNA

SEQ ID NO: 106121 - DNA, 1611 bp, synthetic construct; identical to SEQ ID NO: 106111
  misc_feature 1..1611: note = Description of Artificial Sequence: Synthetic coding sequence
  source 1..1611: mol_type = other DNA

SEQ ID NO: 106122 - DNA, 1551 bp, synthetic construct; identical to SEQ ID NO: 106102
  misc_feature 1..1551: note = Description of Artificial Sequence: Synthetic coding sequence
  source 1..1551: mol_type = other DNA

SEQ ID NO: 106123 - DNA, 1551 bp, synthetic construct; identical to SEQ ID NO: 106102
  misc_feature 1..1551: note = Description of Artificial Sequence: Synthetic coding sequence
  source 1..1551: mol_type = other DNA

SEQ ID NO: 106124 - DNA, 1611 bp, synthetic construct; identical to SEQ ID NO: 106111
  misc_feature 1..1611: note = Description of Artificial Sequence: Synthetic coding sequence
  source 1..1611: mol_type = other DNA

SEQ ID NO: 106125 - DNA, 1725 bp, synthetic construct
  misc_feature 1..1725: note = Description of Artificial Sequence: Synthetic coding sequence
  source 1..1725: mol_type = other DNA
atggccgccgccgtgcccagaagacccacccagggcaccgtgaccttcgaggacgtggccgtgaacttcagccaggaggagtggtgcctgctgagcgaggcccagagatgcctgtacagagacgtgatgctggagaacctggccctgatcagcagcctgggctgctggtgcggcagcaaggacgaggaggccccctgcaagcagagaatcagcgtgcagagagagagccagagcagaacccccagagccggcgtgagccccaagaaggcccacccctgcgagatgtgcggcctgatcctggaggacgtgttccacttcgccgaccaccaggagacccaccacaagcagaagctgaacagaagcggcgcctgcggcaagaacctggacgacaccgcctacctgcaccagcaccagaagcagcacatcggcgagaagttctacagaaagagcgtgagagaggccagcttcgtgaagaagagaaagctgagagtgagccaggagcccttcgtgttcagagagttcggcaaggacgtgctgcccagcagcggcctgtgccaggaggaggccgccgtggagaagaccgacagcgagaccatgcacggcccccccttccaggagggcaagaccaactacagctgcggcaagagaaccaaggccttcagcaccaagcacagcgtgatcccccaccagaagctgttcaccagagacggctgctacgtgtgcagcgactgcggcaagagcttcagcagatacgtgagcttcagcaaccaccagagagaccacaccgccaagggcccctacgactgcggcgagtgcggcaagagctacagcagaaagagcagcctgatccagcaccagagagtgcacaccggccagaccgcctacccctgcgaggagtgcggcaagagcttcagccagaagggcagcctgatcagccaccagctggtgcacaccggcgagggcccctacgagtgcagagagtgcggcaagagcttcggccagaagggcaacctgatccagcaccagcagggccacaccggcgagagagcctaccactgcggcgagtgcggcaagagcttcagacagaagttctgcttcatcaaccaccagagagtgcacaccggcgagagaccctacaagtgcggcgagtgcggcaagagcttcggccagaagggcaacctggtgcaccaccagagaggccacaccggcgagagaccctacgagtgcaaggagtgcggcaagagcttcagatacagaagccacctgaccgagcaccagagactgcacaccggcgagagaccctacaactgcagagagtgcggcaagctgttcaacagaaagtaccacctgctggtgcacgagagagtgcacaccggcgagagaccctacgcctgcgaggtgtgcggcaagctgttcggcaacaagcacagcgtgaccatccaccagagaatccacaccggcgagagaccctacgagtgcagcgagtgcggcaagagcttcctgagcagcagcgccctgcacgtgcacaagagagtgcacagcggccagaagccctacaagtgcagcgagtgcggcaagagcttcagcgagtgcagcagcctgatcaagcacagaagaatccacaccggcgagagaccctacgagtgcaccaagtgcggcaagaccttccagagaagcagcaccctgctgcaccaccagagcagccacagaagaaaggccctgtag

SEQ ID NO: 106126 - DNA, 3804 bp, synthetic construct
  misc_feature 1..3804: note = Description of Artificial Sequence: Synthetic coding sequence
  source 1..3804: mol_type = other DNA
atgggcgacatgaagacccccgacttcgacgacctgctggccgccttcgacatccccgaccccaccagcctggacgccaaggaggccatccagacccccagcgaggagaacgagagccccctgaagccccccggcatctgcatggacgagagcgtgagcctgagccacagcggcagcgcccccgacgtgcccgccgtgagcgtgatcgtgaagaacaccagcagacaggagagcttcgaggccgagaaggaccacatcacccccagcctgctgcacaacggcttcagaggcagcgacctgccccccgacccccacaactgcggcaagttcgacagcaccttcatgaacggcgacagcgccagaagcttccccggcaagctggagccccccaagagcgagcccctgcccaccttcaaccagttcagccccatcagcagccccgagcccgaggaccccatcaaggacaacggcttcggcatcaagcccaagcacagcgacagctacttccccccccccctgggctgcggcgccgtgggcggccccgtgctggaggccctggccaagttccccgtgcccgagctgcacatgttcgaccacttctgcaagaaggagcccaagcccgagcccctgcccctgggcagccagcaggagcacgagcagagcggccagaacaccgtggagccccacaaggaccccgacgccaccagattcttcggcgaggccctggagttcaacagccaccccagcaacagcatcggcgagagcaagggcctggccagagagctgggcacctgcagcagcgtgccccccagacagagactgaagcccgcccacagcaagctgagcagctgcgtggccgccctggtggccctgcaggccaagagagtggccagcgtgaccaaggaggaccagcccggccacaccaaggacctgagcggccccaccaaggagagcagcaagggcagccccaagatgcccaagagccccaagagccccagaagccccctggaggccaccagaaagagcatcaagcccagcgacagccccagaagcatctgcagcgacagcagcagcaagggcagccccagcgtggccgccagcagcccccccgccatccccaaggtgagaatcaagaccatcaagaccagcagcggcgagatcaagagaaccgtgaccagaatcctgcccgaccccgacgaccccagcaagagccccgtgggcagccccctgggcagcgccatcgccgaggcccccagcgagatgcccggcgacgaggtgcccgtggaggagcacttccccgaggccggcaccaacagcggcagcccccagggcgccagaaagggcgacgagagcatgaccaaggccagcgacagcagcagccccagctgcagcagcggccccagagtgcccaagggcgccgcccccggcagccagaccggcaagaagcagcagagcaccgccctgcaggccagcaccctggcccccgccaacctgctgcccaaggccgtgcacctggccaacctgaacctggtgccccacagcgtggccgccagcgtgaccgccaagagcagcgtgcagagaagaagccagccccagctgacccagatgagcgtgcccctggtgcaccaggtgaagaaggccgcccccctgatcgtggaggtgttcaacaaggtgctgcacagcagcaaccccgtgcccctgtacgcccccaacctgagcccccccgccgacagcagaatccacgtgcccgccagcggctactgctgcctggagtgcggcgacgccttcgccctggagaagagcctgagccagcactacggcagaagaagcgtgcacatcgaggtgctgtgcaccctgtgcagcaagaccctgctgttcttcaacaagtgcagcctgctgagacacgccagagaccacaagagcaagggcctggtgatgcagtgcagccagctgctggtgaagcccatcagcgccgaccagatgttcgtgagcgcccccgtgaacagcaccgcccccgccgcccccgcccccagcagcagccccaagcacggcctgaccagcggcagcgccagcccccccccccccgccctgcccctgtaccccgaccccgtgagactgatcagatacagcatcaagtgcctggagtgccacaagcagatgagagactacatggtgctggccgcccacttccagagaaccaccgaggagaccgagggcctgacctgccaggtgtgccagatgctgctgcccaaccagtgcagcttctgcgcccaccagagaatccacgcccacaagagcccctactgctgccccgagtgcggcgtgctgtgcagaagcgcctacttccagacccacgtgaaggagaactgcctgcactacgccagaaaggtgggctacagatgcatccactgcggcgtggtgcacctgaccctggccctgctgaagagccacatccaggagagacactgccaggtgttccacaagtgcgccttctgccccatggccttcaagaccgccagcagcaccgccgaccacagcgccacccagcaccccacccagccccacagacccagccagctgatctacaagtgcagctgcgagatggtgttcaacaagaagagacacatccagcagcacttctaccagaacgtgagcaagacccaggtgggcgtgttcaagtgccccgagtgccccctgctgttcgtgcagaagcccgagctgatgcagcacgtgaagagcacccacggcgtgcccagaaacgtggacgagctgagcagcctgcagagcagcgccgacaccagcagcagcagacccggcagcagagtgcccaccgagccccccgccaccagcgtggccgccagaagcagcagcctgcccagcggcagatggggcagacccgaggcccacagaagagtggaggccagacccagactgagaaacaccggctggacctgccaggagtgccaggagtgggtgcccgacagagagagctacgtgagccacatgaagaagagccacggcagaaccctgaagagatacccctgcagacagtgcgagcagagcttccacacccccaacagcctgagaaagcacatcagaaacaaccacgacaccgtgaagaagttctacacctgcggctactgcaccgaggacagccccagcttccccagacccagcctgctggagagccacatcagcctgatgcacggcatcagaaaccccgacctgagccagaccagcaaggtgaagccccccggcggccacagcccccaggtgaaccacctgaagagacccgtgagcggcgtgggcgacgcccccggcaccagcaacggcgccaccgtgagcagcaccaagagacacaagagcctgttccagtgcgccaagtgcagcttcgccaccgacagcggcctggagttccagagccacatcccccagcaccaggtggacagcagcaccgcccagtgcctgctgtgcggcctgtgctacaccagcgccagcagcctgagcagacacctgttcatcgtgcacaaggtgagagaccaggaggaggaggaggaggaggaggccgccgccgccgagatggccgtggaggtggccgagcccgaggagggcagcggcgaggaggtgcccatggagaccagagagaacggcctggaggagtgcgccggcgagcccctgagcgccgaccccgaggccagaagactgctgggccccgcccccgaggacgacggcggccacaacgaccacagccagccccaggccagccaggaccaggacagccacaccctgagcccccaggtgtag

SEQ ID NO: 106127 - DNA, 3804 bp, synthetic construct; identical to SEQ ID NO: 106126
  misc_feature 1..3804: note = Description of Artificial Sequence: Synthetic coding sequence
  source 1..3804: mol_type = other DNA

SEQ ID NO: 106128 - DNA, 2379 bp, synthetic construct
  misc_feature 1..2379: note = Description of Artificial Sequence: Synthetic coding sequence
  source 1..2379: mol_type = other DNA
atggccgccatcaacccctgggccagctggggcgccctgaccgaccagagctggggcatgaccgccgtggacccctgggccagctgggccctgtgcccccagtaccccgcctggcacgtggagggcagcctggaggagggcagaagagccaccggcctgcccgccgcccaggtgcaggagcccgtgaccttcaaggacgtggccgtggacttcacccaggaggagtggggccagctggacctggtgcagagaaccctgtacagagacgtgatgctggagacctacggccacctgctgagcgtgggcaaccagatcgccaagcccgaggtgatcagcctgctggagcagggcgaggagccctggagcgtggagcaggcctgcccccagagaacctgccccgagtgggtgagaaacctggagagcaaggccctgatccccgcccagagcatcttcgaggaggagcagagccacggcatgaagctggagagatacatctgggacgacccctggttcagcagactggaggtgctgggctgcaaggaccagctggagatgtaccacatgaaccagagcaccgccatgagacagatggtgttcatgcagaagcaggtgctgagccagagaagcagcgagttctgcggcctgggcgccgagttcagccagaacctgaacttcgtgcccagccagagagtgagccagatcgagcacttctacaagcccgacacccacgcccagagctggagatgcgacagcgccatcatgtacgccgacaaggtgacctgcgagaacaacgactacgacaagaccgtgtaccagagcatccagcccatctaccccgccagaatccagaccggcgacaacctgttcaagtgcaccgacgccgtgaagagcttcaaccacatcatccacttcggcgaccacaagggcatccacaccggcgagaagctgtacgagtacaaggagtgccaccagatcttcaaccagagccccagcttcaacgagcaccccagactgcacgtgggcgagaaccagtacaactacaaggagtacgagaacatcttctacttcagcagcttcatggagcaccagaagatcggcaccgtggagaaggcctacaagtacaacgagtgggagaaggtgttcggctacgacagcttcctgacccagcacaccagcacctacaccgccgagaagccctacgactacaacgagtgcggcaccagcttcatctggagcagctacctgatccagcacaagaagacccacaccggcgagaagccctacgagtgcgacaagtgcggcaaggtgttcagaaacagaagcgccctgaccaagcacgagagaacccacaccggcatcaagccctacgagtgcaacaagtgcggcaaggccttcagctggaacagccacctgatcgtgcacaagagaatccacaccggcgagaagccctacgtgtgcaacgagtgcggcaagagcttcaactggaacagccacctgatcggccaccagagaacccacaccggcgagaagcccttcgagtgcaccgagtgcggcaagagcttcagctggagcagccacctgatcgcccacatgagaatgcacaccggcgagaagcccttcaagtgcgacgagtgcgagaaggccttcagagactacagcgccctgagcaagcacgagagaacccacagcggcgccaagccctacaagtgcaccgagtgcggcaagagcttcagctggagcagccacctgatcgcccaccagagaacccacaccggcgagaagccctacaactgccaggagtgcggcaaggccttcagagagagaagcgccctgaccaagcacgagatcatccacagcggcatcaagccctacgagtgcaacaagtgcggcaagagctgcagccagatggcccacctggtgagacaccagagaacccacaccggcgagaagccctacgagtgcaacaagtgcggcaagagcttcagccagagctgccacctggtggcccacagaagaatccacaccggcgagaagccctacaagtgcaaccagtgcgagagaagcttcaactgcagcagccacctgatcgcccacagaagaacccacaccggcgagaagccctacagatgcaacgagtgcggcaaggccttcaacgagagcagcagcctgatcgtgcacctgagaaaccacaccggcgagaagccctacaagtgcaaccactgcgagaaggccttctgcaagaacagcagcctgatcatccaccagagaatgcacagcggcgagaagagattcatctgcagcgagtgcggcaaggccttcagcggccacagcgccctgctgcagcaccagagaaaccacagcgaggagaagctgaactag

SEQ ID NO: 106129 - DNA, 2109 bp, synthetic construct
  misc_feature 1..2109: note = Description of Artificial Sequence: Synthetic coding sequence
  source 1..2109: mol_type = other DNA
atgctggagacctacggccacctgctgagcgtgggcaaccagatcgccaagcccgaggtgatcagcctgctggagcagggcgaggagccctggagcgtggagcaggcctgcccccagagaacctgccccgagtgggtgagaaacctggagagcaaggccctgatccccgcccagagcatcttcgaggaggagcagagccacggcatgaagctggagagatacatctgggacgacccctggttcagcagactggaggtgctgggctgcaaggaccagctggagatgtaccacatgaaccagagcaccgccatgagacagatggtgttcatgcagaagcaggtgctgagccagagaagcagcgagttctgcggcctgggcgccgagttcagccagaacctgaacttcgtgcccagccagagagtgagccagatcgagcacttctacaagcccgacacccacgcccagagctggagatgcgacagcgccatcatgtacgccgacaaggtgacctgcgagaacaacgactacgacaagaccgtgtaccagagcatccagcccatctaccccgccagaatccagaccggcgacaacctgttcaagtgcaccgacgccgtgaagagcttcaaccacatcatccacttcggcgaccacaagggcatccacaccggcgagaagctgtacgagtacaaggagtgccaccagatcttcaaccagagccccagcttcaacgagcaccccagactgcacgtgggcgagaaccagtacaactacaaggagtacgagaacatcttctacttcagcagcttcatggagcaccagaagatcggcaccgtggagaaggcctacaagtacaacgagtgggagaaggtgttcggctacgacagcttcctgacccagcacaccagcacctacaccgccgagaagccctacgactacaacgagtgcggcaccagcttcatctggagcagctacctgatccagcacaagaagacccacaccggcgagaagccctacgagtgcgacaagtgcggcaaggtgttcagaaacagaagcgccctgaccaagcacgagagaacccacaccggcatcaagccctacgagtgcaacaagtgcggcaaggccttcagctggaacagccacctgatcgtgcacaagagaatccacaccggcgagaagccctacgtgtgcaacgagtgcggcaagagcttcaactggaacagccacctgatcggccaccagagaacccacaccggcgagaagcccttcgagtgcaccgagtgcggcaagagcttcagctggagcagccacctgatcgcccacatgagaatgcacaccggcgagaagcccttcaagtgcgacgagtgcgagaaggccttcagagactacagcgccctgagcaagcacgagagaacccacagcggcgccaagccctacaagtgcaccgagtgcggcaagagcttcagctggagcagccacctgatcgcccaccagagaacccacaccggcgagaagccctacaactgccaggagtgcggcaaggccttcagagagagaagcgccctgaccaagcacgagatcatccacagcggcatcaagccctacgagtgcaacaagtgcggcaagagctgcagccagatggcccacctggtgagacaccagagaacccacaccggcgagaagccctacgagtgcaacaagtgcggcaagagcttcagccagagctgccacctggtggcccacagaagaatccacaccggcgagaagccctacaagtgcaaccagtgcgagagaagcttcaactgcagcagccacctgatcgcccacagaagaacccacaccggcgagaagccctacagatgcaacgagtgcggcaaggccttcaacgagagcagcagcctgatcgtgcacctgagaaaccacaccggcgagaagccctacaagtgcaaccactgcgagaaggccttctgcaagaacagcagcctgatcatccaccagagaatgcacagcggcgagaagagattcatctgcagcgagtgcggcaaggccttcagcggccacagcgccctgctgcagcaccagagaaaccacagcgaggagaagctgaactag

SEQ ID NO: 106130 - DNA, 1527 bp, synthetic construct
  misc_feature 1..1527: note = Description of Artificial Sequence: Synthetic coding sequence
  source 1..1527: mol_type = other DNA
atggccgccatcaacccctgggccagctggggcgccctgaccgaccagagctggggcatgaccgccgtggacccctgggccagctgggccctgtgcccccagtaccccgcctggcacgtggagggcagcctggaggagggcagaagagccaccggcctgcccgccgcccaggtgcaggagcccgtgaccttcaaggacgtggccgtggacttcacccaggaggagtggggccagctggacctggtgcagagaaccctgtacagagacgtgatgctggagacctacggccacctgctgagcgtgggcaaccagatcgccaagcccgaggtgatcagcctgctggagcagggcgaggagccctggagcgtggagcaggcctgcccccagagaacctgccccgagtgggtgagaaacctggagagcaaggccctgatccccgcccagagcatcttcgaggaggagcagagccacggcatgaagctggagagatacatctgggacgacccctggttcagcagactggaggtgctgggctgcaaggaccagctggagatgtaccacatgaaccagagcaccgccatgagacagatggtgttcatgcagaagcaggtgctgagccagagaagcagcgagttctgcggcctgggcgccgagttcagccagaacctgaacttcgtgcccagccagagagtgagccagatcgagcacttctacaagcccgacacccacgcccagagctggagatgcgacagcgccatcatgtacgccgacaaggtgacctgcgagaacaacgactacgacaagaccgtgtaccagagcatccagcccatctaccccgccagaatccagaccggcgacaacctgttcaagtgcaccgacgccgtgaagagcttcaaccacatcatccacttcggcgaccacaagggcatccacaccggcgagaagctgtacgagtacaaggagtgccaccagatcttcaaccagagccccagcttcaacgagcaccccagactgcacgtgggcgagaaccagtacaactacaaggagtacgagaacatcttctacttcagcagcttcatggagcaccagaagatcggcaccgtggagaaggcctacaagtacaacgagtgggagaaggtgttcggctacgacagcttcctgacccagcacaccagcacctacaccgccgagaagccctacgactacaacgagtgcggcaccagcttcatctggagcagctacctgatccagcacaagaagacccacaccggcgagaagccctacgagtgcgacaagtgcggcaaggtgttcagaaacagaagcgccctgaccaagcacgagagaacccacaccggcatcaagccctacgagtgcaacaagtgcggcaaggccttcagctggaacagccacctgatcgtgcacaagagaatccacaccggcgagaagccctacgtgtgcaacgagtgcggcaagagcttcaactggaacagccacctgatcggccaccagagaacccacaccggctag

SEQ ID NO: 106131 - DNA, 2523 bp, synthetic construct
  misc_feature 1..2523: note = Description of Artificial Sequence: Synthetic coding sequence
  source 1..2523: mol_type = other DNA
atgaaggaggacaagagcagcatcagagaggccatcagcaaggccaagagcaccgccaacatcaagaccgagcaggagggcgaggccagcgagaagagcctgcacctgagcccccagcacatcacccaccagaccatgcccatcggccagagaggcagcgagcagggcaagagagtggagaacatcaacggcaccagctaccccagcctgcagcagaagaccaacgccgtgaagaagctgcacaagtgcgacgagtgcggcaagagcttcaagtacaacagcagactggtgcagcacaagatcatgcacaccggcgagaagagatacgagtgcgacgactgcggcggcaccttcagaagcagcagcagcctgagagtgcacaagagaatccacaccggcgagaagccctacaagtgcgaggagtgcggcaaggcctacatgagctacagcagcctgatcaaccacaagagcacccacagcggcgagaagaactgcaagtgcgacgagtgcggcaagagcttcaactacagcagcgtgctggaccagcacaagagaatccacaccggcgagaagccctacgagtgcggcgagtgcggcaaggccttcagaaacagcagcggcctgagagtgcacaagagaatccacaccggcgagaagccctacgagtgcgacatctgcggcaagaccttcagcaacagcagcggcctgagagtgcacaagagaatccacaccggcgagaagccctacgagtgcgacgagtgcggcaaggccttcatcacctgcagaaccctgctgaaccacaagagcatccacttcggcgacaagccctacaagtgcgacgagtgcgagaagagcttcaactacagcagcctgctgatccagcacaaggtgatccacaccggcgagaagccctacgagtgcgacgagtgcggcaaggccttcagaaacagcagcggcctgatcgtgcacaagagaatccacaccggcgagaagccctacaagtgcgacgtgtgcggcaaggccttcagctacagcagcggcctggccgtgcacaagagcatccaccccggcaagaaggcccacgagtgcaaggagtgcggcaagagcttcagctacaacagcctgctgctgcagcacagaaccatccacaccggcgagagaccctacgtgtgcgacgtgtgcggcaagaccttcagaaacaacgccggcctgaaggtgcacagaagactgcacaccggcgagaagccctacaagtgcgacgtgtgcggcaaggcctacatcagcagaagcagcctgaagaaccacaagggcatccacctgggcgagaagccctacaagtgcagctactgcgagaagagcttcaactacagcagcgccctggagcagcacaagagaatccacaccagagagaagcccttcggctgcgacgagtgcggcaaggccttcagaaacaacagcggcctgaaggtgcacaagagaatccacaccggcgagagaccctacaagtgcgaggagtgcggcaaggcctacatcagcctgagcagcctgatcaaccacaagagcgtgcaccccggcgagaagcccttcaagtgcgacgagtgcgagaaggccttcatcacctacagaaccctgaccaaccacaagaaggtgcacctgggcgagaagccctacaagtgcgacgtgtgcgagaagagcttcaactacaccagcctgctgagccagcacagaagagtgcacaccagagagaagccctacgagtgcgacagatgcgagaaggtgttcagaaacaacagcagcctgaaggtgcacaagagaatccacaccggcgagagaccctacgagtgcgacgtgtgcggcaaggcctacatcagccacagcagcctgatcaaccacaagagcacccaccccggcagaaccccccacacctgcgacgagtgcggcaaggccttcttcagcagcagaaccctgatcagccacaagagagtgcacctgggcgagaagcccttcaagtgcgtggagtgcggcaagagcttcagctacagcagcctgctgagccagcacaagagaatccacaccggcgagaagccctacgtgtgcgacagatgcggcaaggccttcagaaacagcagcggcctgaccgtgcacaagagaatccacaccggcgagaagccctacgagtgcgacgagtgcggcaaggcctacatcagccacagcagcctgatcaaccacaagagcgtgcaccagggcaagcagccctacaactgcgagtgcggcaagagcttcaactacagaagcgtgctggaccagcacaagagaatccacaccggcaagaagccctacagatgcaacgagtgcggcaaggccttcaacatcagaagcaacctgaccaagcacaagagaacccacaccggcgaggagagcctgaacgtgatctacgtgggcagctacagcggcaccagccagaagagaacctacgagggcggcaacgccctggacggcggcagaatgagaatgcccctgtag

SEQ ID NO: 106132 - DNA, 1497 bp, synthetic construct
  misc_feature 1..1497: note = Description of Artificial Sequence: Synthetic coding sequence
  source 1..1497: mol_type = other DNA
atgagctacagcagcctgatcaaccacaagagcacccacagcggcgagaagaactgcaagtgcgacgagtgcggcaagagcttcaactacagcagcgtgctggaccagcacaagagaatccacaccggcgagaagccctacgagtgcggcgagtgcggcaaggccttcagaaacagcagcggcctgagagtgcacaagagaatccacaccggcgagaagccctacgagtgcgacatctgcggcaagaccttcagcaacagcagcggcctgagagtgcacaagagaatccacaccggcgagaagccctacgagtgcgacgagtgcggcaaggccttcatcacctgcagaaccctgctgaaccacaagagcatccacttcggcgacaagccctacaagtgcgacgagtgcggcaaggccttcagaaacaacagcggcctgaaggtgcacaagagaatccacaccggcgagagaccctacaagtgcgaggagtgcggcaaggcctacatcagcctgagcagcctgatcaaccacaagagcgtgcaccccggcgagaagcccttcaagtgcgacgagtgcgagaaggccttcatcacctacagaaccctgaccaaccacaagaaggtgcacctgggcgagaagccctacaagtgcgacgtgtgcgagaagagcttcaactacaccagcctgctgagccagcacagaagagtgcacaccagagagaagccctacgagtgcgacagatgcgagaaggtgttcagaaacaacagcagcctgaaggtgcacaagagaatccacaccggcgagagaccctacgagtgcgacgtgtgcggcaaggcctacatcagccacagcagcctgatcaaccacaagagcacccaccccggcagaaccccccacacctgcgacgagtgcggcaaggccttcttcagcagcagaaccctgatcagccacaagagagtgcacctgggcgagaagcccttcaagtgcgtggagtgcggcaagagcttcagctacagcagcctgctgagccagcacaagagaatccacaccggcgagaagccctacgtgtgcgacagatgcggcaaggccttcagaaacagcagcggcctgaccgtgcacaagagaatccacaccggcgagaagccctacgagtgcgacgagtgcggcaaggcctacatcagccacagcagcctgatcaaccacaagagcgtgcaccagggcaagcagccctacaactgcgagtgcggcaagagcttcaactacagaagcgtgctggaccagcacaagagaatccacaccggcaagaagccctacagatgcaacgagtgcggcaaggccttcaacatcagaagcaacctgaccaagcacaagagaacccacaccggcgaggagagcctgaacgtgatctacgtgggcagctacagcggcaccagccagaagagaacctacgagggcggcaacgccctggacggcggcagaatgagaatgcccctgtag

SEQ ID NO: 106133 - DNA, 2703 bp, synthetic construct
  misc_feature 1..2703: note = Description of Artificial Sequence: Synthetic coding sequence
  source 1..2703: mol_type = other DNA
atgagccacctgaagaccagcaccgaggacgaggagcccaccgaggagtacgagaacgtgggcaacgccgccagcaagtggcccaaggtggaggaccccatgcccgagagcaaggtgggcgacacctgcgtgtgggacagcaaggtggagaaccagcagaagaagcccgtggagaacagaatgaaggaggacaagagcagcatcagagaggccatcagcaaggccaagagcaccgccaacatcaagaccgagcaggagggcgaggccagcgagaagagcctgcacctgagcccccagcacatcacccaccagaccatgcccatcggccagagaggcagcgagcagggcaagagagtggagaacatcaacggcaccagctaccccagcctgcagcagaagaccaacgccgtgaagaagctgcacaagtgcgacgagtgcggcaagagcttcaagtacaacagcagactggtgcagcacaagatcatgcacaccggcgagaagagatacgagtgcgacgactgcggcggcaccttcagaagcagcagcagcctgagagtgcacaagagaatccacaccggcgagaagccctacaagtgcgaggagtgcggcaaggcctacatgagctacagcagcctgatcaaccacaagagcacccacagcggcgagaagaactgcaagtgcgacgagtgcggcaagagcttcaactacagcagcgtgctggaccagcacaagagaatccacaccggcgagaagccctacgagtgcggcgagtgcggcaaggccttcagaaacagcagcggcctgagagtgcacaagagaatccacaccggcgagaagccctacgagtgcgacatctgcggcaagaccttcagcaacagcagcggcctgagagtgcacaagagaatccacaccggcgagaagccctacgagtgcgacgagtgcggcaaggccttcatcacctgcagaaccctgctgaaccacaagagcatccacttcggcgacaagccctacaagtgcgacgagtgcgagaagagcttcaactacagcagcctgctgatccagcacaaggtgatccacaccggcgagaagccctacgagtgcgacgagtgcggcaaggccttcagaaacagcagcggcctgatcgtgcacaagagaatccacaccggcgagaagccctacaagtgcgacgtgtgcggcaaggccttcagctacagcagcggcctggccgtgcacaagagcatccaccccggcaagaaggcccacgagtgcaaggagtgcggcaagagcttcagctacaacagcctgctgctgcagcacagaaccatccacaccggcgagagaccctacgtgtgcgacgtgtgcggcaagaccttcagaaacaacgccggcctgaaggtgcacagaagactgcacaccggcgagaagccctacaagtgcgacgtgtgcggcaaggcctacatcagcagaagcagcctgaagaaccacaagggcatccacctgggcgagaagccctacaagtgcagctactgcgagaagagcttcaactacagcagcgccctggagcagcacaagagaatccacaccagagagaagcccttcggctgcgacgagtgcggcaaggccttcagaaacaacagcggcctgaaggtgcacaagagaatccacaccggcgagagaccctacaagtgcgaggagtgcggcaaggcctacatcagcctgagcagcctgatcaaccacaagagcgtgcaccccggcgagaagcccttcaagtgcgacgagtgcgagaaggccttcatcacctacagaaccctgaccaaccacaagaaggtgcacctgggcgagaagccctacaagtgcgacgtgtgcgagaagagcttcaactacaccagcctgctgagccagcacagaagagtgcacaccagagagaagccctacgagtgcgacagatgcgagaaggtgttcagaaacaacagcagcctgaaggtgcacaagagaatccacaccggcgagagaccctacgagtgcgacgtgtgcggcaaggcctacatcagccacagcagcctgatcaaccacaagagcacccaccccggcagaaccccccacacctgcgacgagtgcggcaaggccttcttcagcagcagaaccctgatcagccacaagagagtgcacctgggcgagaagcccttcaagtgcgtggagtgcggcaagagcttcagctacagcagcctgctgagccagcacaagagaatccacaccggcgagaagccctacgtgtgcgacagatgcggcaaggccttcagaaacagcagcggcctgaccgtgcacaagagaatccacaccggcgagaagccctacgagtgcgacgagtgcggcaaggcctacatcagccacagcagcctgatcaaccacaagagcgtgcaccagggcaagcagccctacaactgcgagtgcggcaagagcttcaactacagaagcgtgctggaccagcacaagagaatccacaccggcaagaagccctacagatgcaacgagtgcggcaaggccttcaacatcagaagcaacctgaccaagcacaagagaacccacaccggcgaggagagcctgaacgtgatctacgtgggcagctacagcggcaccagccagaagagaacctacgagggcggcaacgccctggacggcggcagaatgagaatgcccctgtag

SEQ ID NO: 106134 - DNA, 483 bp, synthetic construct
  misc_feature 1..483: note = Description of Artificial Sequence: Synthetic coding sequence
  source 1..483: mol_type = other DNA
atgcccgagagcaaggtgggcgacacctgcgtgtgggacagcaaggtggagaaccagcagaagaagcccgtggagaacagaatgaaggaggacaagagcagcatcagagaggccatcagcaaggccaagagcaccgccaacatcaagaccgagcaggagggcgaggccagcgagaagagcctgcacctgagcccccagcacatcacccaccagaccatgcccatcggccagagaggcagcgagcagggcaagagagtggagaacatcaacggcaccagctaccccagcctgcagcagaagaccaacgccgtgaagaagctgcacaagtgcgacgagtgcggcaagagcttcaagtacaacagcagactggtgcagcacaagatcatgcacaccggcgagaagagatacgagtgcgacgactgcggcggcaccttcagaagcagcagcagcctgagagtgcacaagagaatccacaccggctag

SEQ ID NO: 106135 - DNA, 315 bp, synthetic construct
  misc_feature 1..315: note = Description of Artificial Sequence: Synthetic coding sequence
  source 1..315: mol_type = other DNA
atgcccgagagcaaggtgggcgacacctgcgtgtgggacagcaaggtggagaaccagcagaagaagcccgtggagaacagaatgaaggaggacaagagcagcatcagagaggccatcagcaaggccaagagcaccgccaacatcaagaccgagcaggagggcgaggccagcgagaagagcctgcacctgagcccccagcacatcacccaccagaccatgcccatcggccagagaggcagcgagcagggcaagagagtggagaacatcaacggcaccagctaccccagcctgcagcagaagaccaacgccgtgtag

SEQ ID NO: 106136 - DNA, 237 bp, synthetic construct
  misc_feature 1..237: note = Description of Artificial Sequence: Synthetic coding sequence
  source 1..237: mol_type = other DNA
atgcccgagagcaaggtgggcgacacctgcgtgtgggacagcaaggtggagaaccagcagaagaagcccgtggagaacagaatgaaggaggacaagagcagcatcagagaggccatcagcaaggccaagagcaccgccaacatcaagaccgagcaggagggcgaggccagcgagaagagcctgcacctgagcccccagcacatcacccaccagaccatgcccatcggccagagatag

SEQ ID NO: 106137 - DNA, 2604 bp, synthetic construct
  misc_feature 1..2604: note = Description of Artificial Sequence: Synthetic coding sequence
  source 1..2604: mol_type = other DNA
atgcccgagagcaaggtgggcgacacctgcgtgtgggacagcaaggtggagaaccagcagaagaagcccgtggagaacagaatgaaggaggacaagagcagcatcagagaggccatcagcaaggccaagagcaccgccaacatcaagaccgagcaggagggcgaggccagcgagaagagcctgcacctgagcccccagcacatcacccaccagaccatgcccatcggccagagaggcagcgagcagggcaagagagtggagaacatcaacggcaccagctaccccagcctgcagcagaagaccaacgccgtgaagaagctgcacaagtgcgacgagtgcggcaagagcttcaagtacaacagcagactggtgcagcacaagatcatgcacaccggcgagaagagatacgagtgcgacgactgcggcggcaccttcagaagcagcagcagcctgagagtgcacaagagaatccacaccggcgagaagccctacaagtgcgaggagtgcggcaaggcctacatgagctacagcagcctgatcaaccacaagagcacccacagcggcgagaagaactgcaagtgcgacgagtgcggcaagagcttcaactacagcagcgtgctggaccagcacaagagaatccacaccggcgagaagccctacgagtgcggcgagtgcggcaaggccttcagaaacagcagcggcctgagagtgcacaagagaatccacaccggcgagaagccctacgagtgcgacatctgcggcaagaccttcagcaacagcagcggcctgagagtgcacaagagaatccacaccggcgagaagccctacgagtgcgacgagtgcggcaaggccttcatcacctgcagaaccctgctgaaccacaagagcatccacttcggcgacaagccctacaagtgcgacgagtgcgagaagagcttcaactacagcagcctgctgatccagcacaaggtgatccacaccggcgagaagccctacgagtgcgacgagtgcggcaaggccttcagaaacagcagcggcctgatcgtgcacaagagaatccacaccggcgagaagccctacaagtgcgacgtgtgcggcaaggccttcagctacagcagcggcctggccgtgcacaagagcatccaccccggcaagaaggcccacgagtgcaaggagtgcggcaagagcttcagctacaacagcctgctgctgcagcacagaaccatccacaccggcgagagaccctacgtgtgcgacgtgtgcggcaagaccttcagaaacaacgccggcctgaaggtgcacagaagactgcacaccggcgagaagccctacaagtgcgacgtgtgcggcaaggcctacatcagcagaagcagcctgaagaaccacaagggcatccacctgggcgagaagccctacaagtgcagctactgcgagaagagcttcaactacagcagcgccctggagcagcacaagagaatccacaccagagagaagcccttcggctgcgacgagtgcggcaaggccttcagaaacaacagcggcctgaaggtgcacaagagaatccacaccggcgagagaccctacaagtgcgaggagtgcggcaaggcctacatcagcctgagcagcctgatcaaccacaagagcgtgcaccccggcgagaagcccttcaagtgcgacgagtgcgagaaggccttcatcacctacagaaccctgaccaaccacaagaaggtgcacctgggcgagaagccctacaagtgcgacgtgtgcgagaagagcttcaactacaccagcctgctgagccagcacagaagagtgcacaccagagagaagccctacgagtgcgacagatgcgagaaggtgttcagaaacaacagcagcctgaaggtgcacaagagaatccacaccggcgagagaccctacgagtgcgacgtgtgcggcaaggcctacatcagccacagcagcctgatcaaccacaagagcacccaccccggcagaaccccccacacctgcgacgagtgcggcaaggccttcttcagcagcagaaccctgatcagccacaagagagtgcacctgggcgagaagcccttcaagtgcgtggagtgcggcaagagcttcagctacagcagcctgctgagccagcacaagagaatccacaccggcgagaagccctacgtgtgcgacagatgcggcaaggccttcagaaacagcagcggcctgaccgtgcacaagagaatccacaccggcgagaagccctacgagtgcgacgagtgcggcaaggcctacatcagccacagcagcctgatcaaccacaagagcgtgcaccagggcaagcagccctacaactgcgagtgcggcaagagcttcaactacagaagcgtgctggaccagcacaagagaatccacaccggcaagaagccctacagatgcaacgagtgcggcaaggccttcaacatcagaagcaacctgaccaagcacaagagaacccacaccggcgaggagagcctgaacgtgatctacgtgggcagctacagcggcaccagccagaagagaacctacgagggcggcaacgccctggacggcggcagaatgagaatgcccctgtag

SEQ ID NO: 106138 - DNA, 1386 bp, synthetic construct
  misc_feature 1..1386: note = Description of Artificial Sequence: Synthetic coding sequence
  source 1..1386: mol_type = other DNA
atggacagcgtggccttcgaggacgtggccgtgaacttcaccctggaggagtgggccctgctggaccccagccagaagaacctgtacagagacgtgatgagagagaccttcagaaacctggccagcgtgggcaagcagtgggaggaccagaacatcgaggaccccttcaagatccccagaagaaacatcagccacatccccgagagactgtgcgagagcaaggagggcggccagggcgaggagaccttcagccagatccccgacggcatcctgaacaagaagacccccggcgtgaagccctgcgagagcagcgtgtgcggcgaggtgggcatgggccccagcagcctgaacagacacatcagagaccacaccggcagagagcccaacgagtaccaggagtacggcaagaagagctacaccagaaaccagtgcggcagagccctgagctaccacagaagcttccccgtgagagagagaacccaccccggcggcaagccctacgactgcaaggagtgcggcgagaccttcatcagcctggtgagcatcagaagacacatgctgacccacagaggcggcgtgccctacaagtgcaaggtgtgcggcaaggccttcgactaccccagcctgttcagaatccacgagagaagccacaccggcgagaagccctacgagtgcaagcagtgcggcaaggccttcagctgcagcagctacatcagaatccacgagagaacccacaccggcgacaagccctacgagtgcaagcagtgcggcaaggccttcagctgcagcaagtacatcagaatccacgagagaacccacaccggcgagaagccctacgagtgcaagcagtgcggcaaggccttcagatgcgccagcagcgtgagaagccacgagagaacccacaccggcgagaagctgttcgagtgcaaggagtgcggcaaggccctgacctgcctggccagcgtgagaagacacatgatcaagcacaccggcaacggcccctacaagtgcaaggtgtgcggcaaggccttcgacttccccagcagcttcagaatccacgagagaacccacaccggcgagaagccctacgactgcaagcagtgcggcaaggccttcagctgcagcagcagcttcagaaagcacgagagaatccacaccggcgagaagccctacaagtgcaccaagtgcggcaaggccttcagcagaagcagctacttcagaatccacgagagaacccacaccggcgagaagccctacgagtgcaagcagtgcggcaaggccttcagcagaagcacctacttcagagtgcacgagaagatccacaccggcgagaagccctacgagaaccccaaccccaacgccagcgtggtgcccgtgctgagctag

SEQ ID NO: 106139 - DNA, 3168 bp, synthetic construct
  misc_feature 1..3168: note = Description of Artificial Sequence: Synthetic coding sequence
  source 1..3168: mol_type = other DNA
atggtgggcagccacgccgacatggcccccgccagcaccgccgagggcgccggcgagaagcccggccccgccgcccccgcccccgccgcccagtacgagtgcggcgagtgcggcaagagcttcagatggagcagcagactgctgcaccaccagagaacccacaccggcgagagaccctacaagtgccccgactgccccaaggccttcaagggcagcagcgccctgctgtaccaccagagaggccacaccggcgagagaccctaccagtgccccgactgccccaaggccttcaagagaagcagcctgctgcagatccacagaagcgtgcacaccggcctgagagccttcatctgcggccagtgcggcctggccttcaagtggagcagccactaccagtaccacctgagacagcacaccggcgagagaccctacccctgccccgactgccccaaggccttcaagaacagcagcagcctgagaagacacagacacgtgcacaccggcgagagaccctacacctgcggcgtgtgcggcaagagcttcacccagagcaccaacctgagacagcaccagagagtgcacaccggcgagagacccttcagatgccccctgtgccccaagaccttcacccacagcagcaacctgctgctgcaccagagaacccacggcgccgcccccgcccccggcaccgccagcgccgccccccccccccagagcagagagcccggcaaggtgttcgtgtgcgacgcctacctgcagagacacctgcagccccacagcccccccgccccccccgcccccccccccccccccccccccgtggtgcccgagctgttcctggccgccgccgagaccaccgtggagctggtgtacagatgcgacggctgcgagcagggcttcagcagcgaggagctgctgctggagcaccagccctgccccggccccgacgccgccccccagccccaggaggcccccgccgaggcccccaaggccgaccagccccccagccccctgccccagccccccccccccgccgccgcccccgcccccggcttcgcctgcctgccctgcggcaagagcttcagaaccgtggccggcctgagcagacaccagcacagccacggcgccgccggcggccaggccttcagatgcggcagctgcgacggcagcttcccccagctggccagcctgctggcccaccagcagtgccacgtggaggaggccgccgccggcagaccccccccccaggccgaggccgccgaggtgacctgcccccaggagcccctggcccccgccgcccccgtgcccccccccccccccagcgcccccgccagcgccgagagaccctacaagtgcgccgagtgcggcaagagcttcaagggcagcagcggcctgagataccacctgagagaccacaccggcgagagaccctaccagtgcggcgagtgcggcaaggccttcaagagaagcagcctgctggccatccaccagagagtgcacaccggcctgagagccttcacctgcggccagtgcggcctgaccttcaagtggagcagccactaccagtaccacctgagactgcacagcggcgagagaccctacgcctgcggcgagtgcggcaaggccttcagaaacaccagctgcctgagaagacacagacacgtgcacaccggcgagagaccccacgcctgcggcgtgtgcggcaagagcttcgcccagaccagcaacctgagacagcaccagagagtgcacaccggcgagagacccttcagatgccccctgtgccccaagaccttcacccacagcagcaacctgctgctgcaccagagaacccacagcgccgagagacccttcacctgccccatctgcggcagaggcttcgtgatggccgcctacctgcagagacacctgagaacccacgcccccgccaacaccccccccagcaccaccgcccccgccgccggcccccagccccccgcccccctggccgccgccagagccccccccgccacccaggacgtgcacgtgctgccccacctgcaggccaccctgagcctggaggtggccggcggcaccgcccaggcccccagcctgggccccgccgcccccaacagccagaccttcctgctggtgcagaccgcccagggcctgcagctgatccccagcagcgtgcagccccccacccccccccccccccccgccccccccaagctgatcctgctgcccagcagcagcgccggcgccggcggcggcagagccagacagggccccagagccgtgggcaaggccggccagggcgccggcgtggtgtggctgcccggccccggcggcctgggcgtgcagggcgccgccagcgccggcgccagcggcaccggccagagcctgatcgtgctgcagaacgtgggcggcggcgaggccggcccccaggagatgagcggcgtgcagctgcagcccctgagacccgcccccgaggtgaccaccgtgcagctgcagcccgcccaggaggtgaccaccgtgcagctgcagcccgcccaggaggtgaccaccgtgcagctgcagcccgcccaggaggtgaccaccgtgcagctgcagcccgtggccggccagctgagcaacagcagcggcggcgccgtggccaccgaggcccccaacctgctggtggtgcagagcggcgccgccgaggagctgctgaccggccccggccccggcgaggccggcgacggcgaggccagcaccggcgtggtgcaggacgtgctgttcgagaccctgcagaccgacgagggcctgcagagcgtgctggtgctgagcggcgccgacggcgagcagaccagactgtgcgtgcaggaggtggagaccctgccccccggcctgaccgagccccccgccaccggcccccccggccagaagctgctgatcatcagaagcgcccccgccaccgagctgctggacagcagcaacaccggcggcggcaccgccaccctgcagctgctggcccccccccccagcggccccgccagcggccccgccggcctgcccggcgcccccgccagccagatggtgcaggtggtgcccgccggcgccggccccggcgtgatgaccccccagggcctgcccagcatccagatcgtgcagaccctgcccgccgtgcagctggtgcacaccttctag

SEQ ID NO: 106140 - DNA, 1602 bp, synthetic construct
  misc_feature 1..1602: note = Description of Artificial Sequence: Synthetic coding sequence
  source 1..1602: mol_type = other DNA
atggacagataccagggcaaccaggacagagtgctgagacaggtgaccgtgatcagcagagagaccctgaccgacgagatgggcagcaagtacagcgccttcggcaagatgttcaacagatgcaccgacctggcccccctgagccagaagttccacaagttcgacagctgcgagaacagcctgaagagcaacagcgacctgctgaactacaacagaagctacgccagaaagaaccccaccaagagattcagatgcggcagaccccccaagtacaacgccagctgcagcgtgcccgagaaggagggcttcatccacaccggcatggagccctacggcgacagccagtgcgagaaggtgctgagccacaagcaggcccacgtgcagtacaagaagttccaggccagagagaagcccaacgtgtgcagcatgtgcggcaaggccttcatcaagaagagccagctgatcatccaccagagaatccacaccggcgagaagccctacgtgtgcggcgactgcagaaaggccttcagcgagaagagccacctgatcgtgcaccagagaatccacaccggcgagaagccctacgagtgcaccaagtacggcagagccttcagcagaaagagccccttcaccgtgcaccagagagtgcacaccggcgagaagccctacgagtgcttcgagtgccccaaggccttcagccagaagagccacctgatcatccaccagagagtgcacaccagagagaagcccttcgagtgcagcgagtgcagaaaggccttctgcgagatgagccacctgttcatccaccagatcacccacaccggcaagaagccctacgagtgcaccgagtgcggcaagaccttccccagaaagacccagctgatcatccaccagagaacccacaccggcgagaagccctacaagtgcggcgagtgcggcaagaccttctgccagcagagccacctgatcggccaccagagaatccacaccggcgagaagccctacgtgtgcaccgactgcggcaaggccttcagccagaagagccacctgaccggccaccagagactgcacaccggcgagaagccctacatgtgcaccgagtgcggcaagagcttcagccagaagagccccctgatcatccaccagagaatccacaccggcgagaagccctaccagtgcggcgagtgcggcaagaccttcagccagaagagcctgctgatcatccacctgagagtgcacaccggcgagaagccctacgagtgcaccgagtgcggcagagccttcagcctgaagagccacctgatcctgcaccagagaggccacaccggcgagaagccctacgagtgcagcgagtgcggcaaggccttctgcggcaagagccccctgatcatccaccagaagacccaccccagagagaagacccccgagtgcgccgagagcggcatgaccttcttctggaagagccagatgatcacctaccagagaagacacaccggcgagaagcccagcagatgcagcgactgcggcaaggccttctgccagcacgtgtacttcaccggccaccagaacccctacagaaaggacaccctgtacatctgctag

SEQ ID NO: 106141 - DNA, 1974 bp, synthetic construct
  misc_feature 1..1974: note = Description of Artificial Sequence: Synthetic coding sequence
  source 1..1974: mol_type = other DNA
atgatcgagagccaggagcccgtgaccttcgaggacgtggccgtggacttcacccaggaggagtggcagcagctgaaccccgcccagaagaccctgcacagagacgtgatgctggagacctacaaccacctggtgagcgtgggctgcagcggcatcaagcccgacgtgatcttcaagctggagcacggcaaggacccctggatcatcgagagcgagctgagcagatggatctaccccgacagagtgaagggcctggagagcagccagcagatcatcagcggcgagctgctgttccagagagagatcctggagagagcccccaaggacaacagcctgtacagcgtgctgaagatctggcacatcgacaaccagatggacagataccagggcaaccaggacagagtgctgagacaggtgaccgtgatcagcagagagaccctgaccgacgagatgggcagcaagtacagcgccttcggcaagatgttcaacagatgcaccgacctggcccccctgagccagaagttccacaagttcgacagctgcgagaacagcctgaagagcaacagcgacctgctgaactacaacagaagctacgccagaaagaaccccaccaagagattcagatgcggcagaccccccaagtacaacgccagctgcagcgtgcccgagaaggagggcttcatccacaccggcatggagccctacggcgacagccagtgcgagaaggtgctgagccacaagcaggcccacgtgcagtacaagaagttccaggccagagagaagcccaacgtgtgcagcatgtgcggcaaggccttcatcaagaagagccagctgatcatccaccagagaatccacaccggcgagaagccctacgtgtgcggcgactgcagaaaggccttcagcgagaagagccacctgatcgtgcaccagagaatccacaccggcgagaagccctacgagtgcaccaagtacggcagagccttcagcagaaagagccccttcaccgtgcaccagagagtgcacaccggcgagaagccctacgagtgcttcgagtgccccaaggccttcagccagaagagccacctgatcatccaccagagagtgcacaccagagagaagcccttcgagtgcagcgagtgcagaaaggccttctgcgagatgagccacctgttcatccaccagatcacccacaccggcaagaagccctacgagtgcaccgagtgcggcaagaccttccccagaaagacccagctgatcatccaccagagaacccacaccggcgagaagccctacaagtgcggcgagtgcggcaagaccttctgccagcagagccacctgatcggccaccagagaatccacaccggcgagaagccctacgtgtgcaccgactgcggcaaggccttcagccagaagagccacctgaccggccaccagagactgcacaccggcgagaagccctacatgtgcaccgagtgcggcaagagcttcagccagaagagccccctgatcatccaccagagaatccacaccggcgagaagccctaccagtgcggcgagtgcggcaagaccttcagccagaagagcctgctgatcatccacctgagagtgcacaccggcgagaagccctacgagtgcaccgagtgcggcagagccttcagcctgaagagccacctgatcctgcaccagagaggccacaccggcgagaagccctacgagtgcagcgagtgcggcaaggccttctgcggcaagagccccctgatcatccaccagaagacccaccccagagagaagacccccgagtgcgccgagagcggcatgaccttcttctggaagagccagatgatcacctaccagagaagacacaccggcgagaagcccagcagatgcagcgactgcggcaaggccttctgccagcacgtgtacttcaccggccaccagaacccctacagaaaggacaccctgtacatctgctag

SEQ ID NO: 106142 - DNA, 645 bp, synthetic construct
  misc_feature 1..645: note = Description of Artificial Sequence: Synthetic coding sequence
  source 1..645: mol_type = other DNA
atgatcgagagccaggagcccgtgaccttcgaggacgtggccgtggacttcacccaggaggagtggcagcagctgaaccccgcccagaagaccctgcacagagacgtgatgctggagacctacaaccacctggtgagcgtgggctgcagcggcatcaagcccgacgtgatcttcaagctggagcacggcaaggacccctggatcatcgagagcgagctgagcagatggatctaccccgacagagtgaagggcctggagagcagccagcagatcatcagcggcgagctgctgttccagagagagatcctggagagagcccccaaggacaacagcctgtacagcgtgctgaagatctggcacatcgacaaccagatggacagataccagggcaaccaggacagagtgctgagacaggtgaccgtgatcagcagagagaccctgaccgacgagatgggcagcaagtacagcgccttcggcaagatgttcaacagatgcaccgacctggcccccctgagccagaagttccacaagttcgacagctgcgagaacagcctgaagagcaacagcgacctgctgaactacaacagaagctacgccagaaagaaccccaccaagagattcagatgcggcagaccccccaagtag

SEQ ID NO: 106143 - DNA, 1932 bp, synthetic construct
  misc_feature 1..1932: note = Description of Artificial Sequence: Synthetic coding sequence
  source 1..1932: mol_type = other DNA
atgatcgagagccaggaggagtggcagcagctgaaccccgcccagaagaccctgcacagagacgtgatgctggagacctacaaccacctggtgagcgtgggctgcagcggcatcaagcccgacgtgatcttcaagctggagcacggcaaggacccctggatcatcgagagcgagctgagcagatggatctaccccgacagagtgaagggcctggagagcagccagcagatcatcagcggcgagctgctgttccagagagagatcctggagagagcccccaaggacaacagcctgtacagcgtgctgaagatctggcacatcgacaaccagatggacagataccagggcaaccaggacagagtgctgagacaggtgaccgtgatcagcagagagaccctgaccgacgagatgggcagcaagtacagcgccttcggcaagatgttcaacagatgcaccgacctggcccccctgagccagaagttccacaagttcgacagctgcgagaacagcctgaagagcaacagcgacctgctgaactacaacagaagctacgccagaaagaaccccaccaagagattcagatgcggcagaccccccaagtacaacgccagctgcagcgtgcccgagaaggagggcttcatccacaccggcatggagccctacggcgacagccagtgcgagaaggtgctgagccacaagcaggcccacgtgcagtacaagaagttccaggccagagagaagcccaacgtgtgcagcatgtgcggcaaggccttcatcaagaagagccagctgatcatccaccagagaatccacaccggcgagaagccctacgtgtgcggcgactgcagaaaggccttcagcgagaagagccacctgatcgtgcaccagagaatccacaccggcgagaagccctacgagtgcaccaagtacggcagagccttcagcagaaagagccccttcaccgtgcaccagagagtgcacaccggcgagaagccctacgagtgcttcgagtgccccaaggccttcagccagaagagccacctgatcatccaccagagagtgcacaccagagagaagcccttcgagtgcagcgagtgcagaaaggccttctgcgagatgagccacctgttcatccaccagatcacccacaccggcaagaagccctacgagtgcaccgagtgcggcaagaccttccccagaaagacccagctgatcatccaccagagaacccacaccggcgagaagccctacaagtgcggcgagtgcggcaagaccttctgccagcagagccacctgatcggccaccagagaatccacaccggcgagaagccctacgtgtgcaccgactgcggcaaggccttcagccagaagagccacctgaccggccaccagagactgcacaccggcgagaagccctacatgtgcaccgagtgcggcaagagcttcagccagaagagccccctgatcatccaccagagaatccacaccggcgagaagccctaccagtgcggcgagtgcggcaagaccttcagccagaagagcctgctgatcatccacctgagagtgcacaccggcgagaagccctacgagtgcaccgagtgcggcagagccttcagcctgaagagccacctgatcctgcaccagagaggccacaccggcgagaagccctacgagtgcagcgagtgcggcaaggccttctgcggcaagagccccctgatcatccaccagaagacccaccccagagagaagacccccgagtgcgccgagagcggcatgaccttcttctggaagagccagatgatcacctaccagagaagacacaccggcgagaagcccagcagatgcagcgactgcggcaaggccttctgccagcacgtgtacttcaccggccaccagaacccctacagaaaggacaccctgtacatctgctag

SEQ ID NO: 106144 - DNA, 5937 bp, synthetic construct
  misc_feature 1..5937: note = Description of Artificial Sequence: Synthetic coding sequence
  source 1..5937: mol_type = other DNA
atgagcagacccagattcaaccccagaggcgacttccccctgcagagacccagagcccccaaccccagcggcatgagaccccccggccccttcatgagacccggcagcatgggcctgcccagattctaccccgccggcagagccagaggcatcccccacagattcgccggccacgagagctaccagaacatgggcccccagagaatgaacgtgcaggtgacccagcacagaaccgaccccagactgaccaaggagaagctggacttccacgaggcccagcagaagaagggcaagccccacggcagcagatgggacgacgagccccacatcagcgccagcgtggccgtgaagcagagcagcgtgacccaggtgaccgagcagagccccaaggtgcagagcagatacaccaaggagagcgccagcagcatcctggccagcttcggcctgagcaacgaggacctggaggagctgagcagataccccgacgagcagctgacccccgagaacatgcccctgatcctgagagacatcagaatgagaaagatgggcagaagactgcccaacctgcccagccagagcagaaacaaggagaccctgggcagcgaggccgtgagcagcaacgtgatcgactacggccacgccagcaagtacggctacaccgaggaccccctggaggtgagaatctacgaccccgagatccccaccgacgaggtggagaacgagttccagagccagcagaacatcagcgccagcgtgcccaaccccaacgtgatctgcaacagcatgttccccgtggaggacgtgttcagacagatggacttccccggcgagagcagcaacaacagaagcttcttcagcgtggagagcggcaccaagatgagcggcctgcacatcagcggcggccagagcgtgctggagcccatcaagagcgtgaaccagagcatcaaccagaccgtgagccagaccatgagccagagcctgatcccccccagcatgaaccagcagcccttcagcagcgagctgatcagcagcgtgagccagcaggagagaatcccccacgagcccgtgatcaacagcagcaacgtgcacgtgggcagcagaggcagcaagaagaactaccagagccaggccgacatccccatcagaagccccttcggcatcgtgaaggccagctggctgcccaagttcagccacgccgacgcccagaagatgaagagactgcccacccccagcatgatgaacgactactacgccgccagccccagaatcttcccccacctgtgcagcctgtgcaacgtggagtgcagccacctgaaggactggatccagcaccagaacaccagcacccacatcgagagctgcagacagctgagacagcagtaccccgactggaaccccgagatcctgcccagcagaagaaacgagggcaacagaaaggagaacgagacccccagaagaagaagccacagccccagccccagaagaagcagaagaagcagcagcagccacagattcagaagaagcagaagccccatgcactacatgtacagacccagaagcagaagccccagaatctgccacagattcatcagcagatacagaagcagaagcagaagcagaagcccctacagaatcagaaaccccttcagaggcagccccaagtgcttcagaagcgtgagccccgagagaatgagcagaagaagcgtgagaagcagcgacagaaagaaggccctggaggacgtggtgcagagaagcggccacggcaccgagttcaacaagcagaagcacctggaggccgccgacaagggccacagccccgcccagaagcccaagaccagcagcggcaccaagcccagcgtgaagcccaccagcgccaccaagagcgacagcaacctgggcggccacagcatcagatgcaagagcaagaacctggaggacgacaccctgagcgagtgcaagcaggtgagcgacaaggccgtgagcctgcagagaaagctgagaaaggagcagagcctgcactacggcagcgtgctgctgatcaccgagctgcccgaggacggctgcaccgaggaggacgtgagaaagctgttccagcccttcggcaaggtgaacgacgtgctgatcgtgccctacagaaaggaggcctacctggagatggagttcaaggaggccatcaccgccatcatgaagtacatcgagaccacccccctgaccatcaagggcaagagcgtgaagatctgcgtgcccggcaagaagaaggcccagaacaaggaggtgaagaagaagaccctggagagcaagaaggtgagcgccagcaccctgaagagagacgccgacgccagcaaggccgtggagatcgtgaccagcaccagcgccgccaagaccggccaggccaaggccagcgtggccaaggtgaacaagagcaccggcaagagcgccagcagcgtgaagagcgtggtgaccgtggccgtgaagggcaacaaggccagcatcaagaccgccaagagcggcggcaagaagagcctggaggccaagaagaccggcaacgtgaagaacaaggacagcaacaagcccgtgaccatccccgagaacagcgagatcaagaccagcatcgaggtgaaggccaccgagaactgcgccaaggaggccatcagcgacgccgccctggaggccaccgagaacgagcccctgaacaaggagaccgaggagatgtgcgtgatgctggtgagcaacctgcccaacaagggctacagcgtggaggaggtgtacgacctggccaagcccttcggcggcctgaaggacatcctgatcctgagcagccacaagaaggcctacatcgagatcaacagaaaggccgccgagagcatggtgaagttctacacctgcttccccgtgctgatggacggcaaccagctgagcatcagcatggcccccgagaacatgaacatcaaggacgaggaggccatcttcatcaccctggtgaaggagaacgaccccgaggccaacatcgacaccatctacgacagattcgtgcacctggacaacctgcccgaggacggcctgcagtgcgtgctgtgcgtgggcctgcagttcggcaaggtggaccaccacgtgttcatcagcaacagaaacaaggccatcctgcagctggacagccccgagagcgcccagagcatgtacagcttcctgaagcagaacccccagaacatcggcgaccacatgctgacctgcagcctgagccccaagatcgacctgcccgaggtgcagatcgagcacgaccccgagctggagaaggagagccccggcctgaagaacagccccatcgacgagagcgaggtgcagaccgccaccgacagccccagcgtgaagcccaacgagctggaggaggagagcacccccagcatccagaccgagaccctggtgcagcaggaggagccctgcgaggaggaggccgagaaggccacctgcgacagcgacttcgccgtggagaccctggagctggagacccagggcgaggaggtgaaggaggagatccccctggtggccagcgccagcgtgagcatcgagcagttcaccgagaacgccgaggagtgcgccctgaaccagcagatgttcaacagcgacctggagaagaagggcgccgagatcatcaaccccaagaccgccctgctgcccagcgacagcgtgttcgccgaggagagaaacctgaagggcatcctggaggagagccccagcgaggccgaggacttcatcagcggcatcacccagaccatggtggaggccgtggccgaggtggagaagaacgagaccgtgagcgagatcctgcccagcacctgcatcgtgaccctggtgcccggcatccccaccggcgacgagaagaccgtggacaagaagaacatcagcgagaagaagggcaacatggacgagaaggaggagaaggagttcaacaccaaggagaccagaatggacctgcagatcggcaccgagaaggccgagaagaacgagggcagaatggacgccgagaaggtggagaagatggccgccatgaaggagaagcccgccgagaacaccctgttcaaggcctaccccaacaagggcgtgggccaggccaacaagcccgacgagaccagcaagaccagcatcctggccgtgagcgacgtgagcagcagcaagcccagcatcaaggccgtgatcgtgagcagccccaaggccaaggccaccgtgagcaagaccgagaaccagaagagcttccccaagagcgtgcccagagaccagatcaacgccgagaagaagctgagcgccaaggagttcggcctgctgaagcccaccagcgccagaagcggcctggccgagagcagcagcaagttcaagcccacccagagcagcctgaccagaggcggcagcggcagaatcagcgccctgcagggcaagctgagcaagctggactacagagacatcaccaagcagagccaggagaccgaggccagacccagcatcatgaagagagacgacagcaacaacaagaccctggccgagcagaacaccaagaaccccaagagcaccaccggcagaagcagcaagagcaaggaggagcccctgttccccttcaacctggacgagttcgtgaccgtggacgaggtgatcgaggaggtgaaccccagccaggccaagcagaaccccctgaagggcaagagaaaggagaccctgaagaacgtgcccttcagcgagctgaacctgaagaagaagaagggcaagaccagcacccccagaggcgtggagggcgagctgagcttcgtgaccctggacgagatcggcgaggaggaggacgccgccgcccacctggcccaggccctggtgaccgtggacgaggtgatcgacgaggaggagctgaacatggaggagatggtgaagaacagcaacagcctgttcaccctggacgagctgatcgaccaggacgactgcatcagccacagcgagcccaaggacgtgaccgtgctgagcgtggccgaggagcaggacctgctgaagcaggagagactggtgaccgtggacgagatcggcgaggtggaggagctgcccctgaacgagagcgccgacatcaccttcgccaccctgaacaccaagggcaacgagggcgacaccgtgagagacagcatcggcttcatcagcagccaggtgcccgaggaccccagcaccctggtgaccgtggacgagatccaggacgacagcagcgacctgcacctggtgaccctggacgaggtgaccgaggaggacgaggacagcctggccgacttcaacaacctgaaggaggagctgaacttcgtgaccgtggacgaggtgggcgaggaggaggacggcgacaacgacctgaaggtggagctggcccagagcaagaacgaccaccccaccgacaagaagggcaacagaaagaagagagccgtggacaccaagaagaccaagctggagagcctgagccaggtgggccccgtgaacgagaacgtgatggaggaggacctgaagaccatgatcgagagacacctgaccgccaagacccccaccaagagagtgagaatcggcaagaccctgcccagcgagaaggccgtggtgaccgagcccgccaagggcgaggaggccttccagatgagcgaggtggacgaggagagcggcctgaaggacagcgagcccgagagaaagagaaagaagaccgaggacagcagcagcggcaagagcgtggccagcgacgtgcccgaggagctggacttcctggtgcccaaggccggcttcttctgccccatctgcagcctgttctacagcggcgagaaggccatgaccaaccactgcaagagcaccagacacaagcagaacaccgagaagttcatggccaagcagagaaaggagaaggagcagaacgaggccgaggagagaagcagcagatag

SEQ ID NO: 106145 - DNA, 3420 bp, synthetic construct
  misc_feature 1..3420: note = Description of Artificial Sequence: Synthetic coding sequence
  source 1..3420: mol_type = other DNA
atgagcagacccagattcaaccccagaggcgacttccccctgcagagacccagagcccccaaccccagcggcatgagaccccccggccccttcatgagacccggcagcatgggcctgcccagattctaccccgccggcagagccagaggcatcccccacagattcgccggccacgagagctaccagaacatgggcccccagagaatgaacgtgcaggtgacccagcacagaaccgaccccagactgaccaaggagaagctggacttccacgaggcccagcagaagaagggcaagccccacggcagcagatgggacgacgagccccacatcagcgccagcgtggccgtgaagcagagcagcgtgacccaggtgaccgagcagagccccaaggtgcagagcagatacaccaaggagagcgccagcagcatcctggccagcttcggcctgagcaacgaggacctggaggagctgagcagataccccgacgagcagctgacccccgagaacatgcccctgatcctgagagacatcagaatgagaaagatgggcagaagactgcccaacctgcccagccagagcagaaacaaggagaccctgggcagcgaggccgtgagcagcaacgtgatcgactacggccacgccagcaagtacggctacaccgaggaccccctggaggtgagaatctacgaccccgagatccccaccgacgaggtggagaacgagttccagagccagcagaacatcagcgccagcgtgcccaaccccaacgtgatctgcaacagcatgttccccgtggaggacgtgttcagacagatggacttccccggcgagagcagcaacaacagaagcttcttcagcgtggagagcggcaccaagatgagcggcctgcacatcagcggcggccagagcgtgctggagcccatcaagagcgtgaaccagagcatcaaccagaccgtgagccagaccatgagccagagcctgatcccccccagcatgaaccagcagcccttcagcagcgagctgatcagcagcgtgagccagcaggagagaatcccccacgagcccgtgatcaacagcagcaacgtgcacgtgggcagcagaggcagcaagaagaactaccagagccaggccgacatccccatcagaagccccttcggcatcgtgaaggccagctggctgcccaagttcagccacgccgacgcccagaagatgaagagactgcccacccccagcatgatgaacgactactacgccgccagccccagaatcttcccccacctgtgcagcctgtgcaacgtggagtgcagccacctgaaggactggatccagcaccagaacaccagcacccacatcgagagctgcagacagctgagacagcagtaccccgactggaaccccgagatcctgcccagcagaagaaacgagggcaacagaaaggagaacgagacccccagaagaagaagccacagccccagccccagaagaagcagaagaagcagcagcagccacagattcagaagaagcagaagccccatgcactacatgtacagacccagaagcagaagccccagaatctgccacagattcatcagcagatacagaagcagaagcagaagcagaagcccctacagaatcagaaaccccttcagaggcagccccaagtgcttcagaagcgtgagccccgagagaatgagcagaagaagcgtgagaagcagcgacagaaagaaggccctggaggacgtggtgcagagaagcggccacggcaccgagttcaacaagcagaagcacctggaggccgccgacaagggccacagccccgcccagaagcccaagaccagcagcggcaccaagcccagcgtgaagcccaccagcgccaccaagagcgacagcaacctgggcggccacagcatcagatgcaagagcaagaacctggaggacgacaccctgagcgagtgcaagcaggtgagcgacaaggccgtgagcctgcagagaaagctgagaaaggagcagagcctgcactacggcagcgtgctgctgatcaccgagctgcccgaggacggctgcaccgaggaggacgtgagaaagctgttccagcccttcggcaaggtgaacgacgtgctgatcgtgccctacagaaaggaggcctacctggagatggagttcaaggaggccatcaccgccatcatgaagtacatcgagaccacccccctgaccatcaagggcaagagcgtgaagatctgcgtgcccggcaagaagaaggcccagaacaaggaggtgaagaagaagaccctggagagcaagaaggtgagcgccagcaccctgaagagagacgccgacgccagcaaggccgtggagatcgtgaccagcaccagcgccgccaagaccggccaggccaaggccagcgtggccaaggtgaacaagagcaccggcaagagcgccagcagcgtgaagagcgtggtgaccgtggccgtgaagggcaacaaggccagcatcaagaccgccaagagcggcggcaagaagagcctggaggccaagaagaccggcaacgtgaagaacaaggacagcaacaagcccgtgaccatccccgagaacagcgagatcaagaccagcatcgaggtgaaggccaccgagaactgcgccaaggaggccatcagcgacgccgccctggaggccaccgagaacgagcccctgaacaaggagaccgaggagatgtgcgtgatgctggtgagcaacctgcccaacaagggctacagcgtggaggaggtgtacgacctggccaagcccttcggcggcctgaaggacatcctgatcctgagcagccacaagaaggcctacatcgagatcaacagaaaggccgccgagagcatggtgaagttctacacctgcttccccgtgctgatggacggcaaccagctgagcatcagcatggcccccgagaacatgaacatcaaggacgaggaggccatcttcatcaccctggtgaaggagaacgaccccgaggccaacatcgacaccatctacgacagattcgtgcacctggacaacctgcccgaggacggcctgcagtgcgtgctgtgcgtgggcctgcagttcggcaaggtggaccaccacgtgttcatcagcaacagaaacaaggccatcctgcagctggacagccccgagagcgcccagagcatgtacagcttcctgaagcagaacccccagaacatcggcgaccacatgctgacctgcagcctgagccccaagatcgacctgcccgaggtgcagatcgagcacgaccccgagctggagaaggagagactgtggctgagcaagaccctgagaatcctgaaggccctgctggtggaggtgcccaacctgaagagaagccactacttccacctgatctggatgaacctgctgctgtggatgagactgtag

SEQ ID NO: 106146 - DNA, 2445 bp, synthetic construct
  misc_feature 1..2445: note = Description of Artificial Sequence: Synthetic coding sequence
  source 1..2445: mol_type = other DNA
atgagcagacccagattcaaccccagaggcgacttccccctgcagagacccagagcccccaaccccagcggcatgagaccccccggccccttcatgagacccggcagcatgggcctgcccagattctaccccgccggcagagccagaggcatcccccacagattcgccggccacgagagctaccagaacatgggcccccagagaatgaacgtgcaggtgacccagcacagaaccgaccccagactgaccaaggagaagctggacttccacgaggcccagcagaagaagggcaagccccacggcagcagatgggacgacgagccccacatcagcgccagcgtggccgtgaagcagagcagcgtgacccaggtgaccgagcagagccccaaggtgcagagcagatacaccaaggagagcgccagcagcatcctggccagcttcggcctgagcaacgaggacctggaggagctgagcagataccccgacgagcagctgacccccgagaacatgcccctgatcctgagagacatcagaatgagaaagatgggcagaagactgcccaacctgcccagccagagcagaaacaaggagaccctgggcagcgaggccgtgagcagcaacgtgatcgactacggccacgccagcaagtacggctacaccgaggaccccctggaggtgagaatctacgaccccgagatccccaccgacgaggtggagaacgagttccagagccagcagaacatcagcgccagcgtgcccaaccccaacgtgatctgcaacagcatgttccccgtggaggacgtgttcagacagatggacttccccggcgagagcagcaacaacagaagcttcttcagcgtggagagcggcaccaagatgagcggcctgcacatcagcggcggccagagcgtgctggagcccatcaagagcgtgaaccagagcatcaaccagaccgtgagccagaccatgagccagagcctgatcccccccagcatgaaccagcagcccttcagcagcgagctgatcagcagcgtgagccagcaggagagaatcccccacgagcccgtgatcaacagcagcaacgtgcacgtgggcagcagaggcagcaagaagaactaccagagccaggccgacatccccatcagaagccccttcggcatcgtgaaggccagctggctgcccaagttcagccacgccgacgcccagaagatgaagagactgcccacccccagcatgatgaacgactactacgccgccagccccagaatcttcccccacctgtgcagcctgtgcaacgtggagtgcagccacctgaaggactggatccagcaccagaacaccagcacccacatcgagagctgcagacagctgagacagcagtaccccgactggaaccccgagatcctgcccagcagaagaaacgagggcaacagaaaggagaacgagacccccagaagaagaagccacagccccagccccagaagaagcagaagaagcagcagcagccacagattcagaagaagcagaagccccatgcactacatgtacagacccagaagcagaagccccagaatctgccacagattcatcagcagatacagaagcagaagcagaagcagaagcccctacagaatcagaaaccccttcagaggcagccccaagtgcttcagaagcgtgagccccgagagaatgagcagaagaagcgtgagaagcagcgacagaaagaaggccctggaggacgtggtgcagagaagcggccacggcaccgagttcaacaagcagaagcacctggaggccgccgacaagggccacagccccgcccagaagcccaagaccagcagcggcaccaagcccagcgtgaagcccaccagcgccaccaagagcgacagcaacctgggcggccacagcatcagatgcaagagcaagaacctggaggacgacaccctgagcgagtgcaagcaggtgagcgacaaggccgtgagcctgcagagaaagctgagaaaggagcagagcctgcactacggcagcgtgctgctgatcaccgagctgcccgaggacggctgcaccgaggaggacgtgagaaagctgttccagcccttcggcaaggtgaacgacgtgctgatcgtgccctacagaaaggaggcctacctggagatggagttcaaggaggccatcaccgccatcatgaagtacatcgagaccacccccctgaccatcaagggcaagagcgtgaagatctgcgtgcccggcaagaagaaggcccagaacaaggaggtgaagaagaagaccctggagagcaagaaggtgagcgccagcaccctgaagagagacgccgacgccagcaaggccgtggagatcgtgaccagcaccagcgccggcctgctgcccaccggcggcggcaacaactacccccagatcgtgctggcccccggcctgtgccactag

SEQ ID NO: 106147 - DNA, 2643 bp, synthetic construct
  misc_feature 1..2643: note = Description of Artificial Sequence: Synthetic coding sequence
  source 1..2643: mol_type = other DNA
atgcccagagacggcgtgcccgccggcaacaccacccccgccgccgcccaggccgccgcccagagccccgacagcgccaccgccggcgccccccaggtgctggacagcctgaagagataccccgactggaaccccgagatcctgcccagcagaagaaacgagggcaacagaaaggagaacgagacccccagaagaagaagccacagccccagccccagaagaagcagaagaagcagcagcagccacagattcagaagaagcagaagccccatgcactacatgtacagacccagaagcagaagccccagaatctgccacagattcatcagcagatacagaagcagaagcagaagcagaagcccctacagaatcagaaaccccttcagaggcagccccaagtgcttcagaagcgtgagccccgagagaatgagcagaagaagcgtgagaagcagcgacagaaagaaggccctggaggacgtggtgcagagaagcggccacggcaccgagttcaacaagcagaagcacctggaggccgccgacaagggccacagccccgcccagaagcccaagaccagcagcggcaccaagcccagcgtgaagcccaccagcgccaccaagagcgacagcaacctgggcggccacagcatcagatgcaagagcaagaacctggaggacgacaccctgagcgagtgcaagcaggtgagcgacaaggccgtgagcctgcagagaaagctgagaaaggagcagagcctgcactacggcagcgtgctgctgatcaccgagctgcccgaggacggctgcaccgaggaggacgtgagaaagctgttccagcccttcggcaaggtgaacgacgtgctgatcgtgccctacagaaaggaggcctacctggagatggagttcaaggaggccatcaccgccatcatgaagtacatcgagaccacccccctgaccatcaagggcaagagcgtgaagatctgcgtgcccggcaagaagaaggcccagaacaaggaggtgaagaagaagaccctggagagcaagaaggtgagcgccagcaccctgaagagagacgccgacgccagcaaggccgtggagatcgtgaccagcaccagcgccgccaagaccggccaggccaaggccagcgtggccaaggtgaacaagagcaccggcaagagcgccagcagcgtgaagagcgtggtgaccgtggccgtgaagggcaacaaggccagcatcaagaccgccaagagcggcggcaagaagagcctggaggccaagaagaccggcaacgtgaagaacaaggacagcaacaagcccgtgaccatccccgagaacagcgagatcaagaccagcatcgaggtgaaggccaccgagaactgcgccaaggaggccatcagcgacgccgccctggaggccaccgagaacgagcccctgaacaaggagaccgaggagatgtgcgtgatgctggtgagcaacctgcccaacaagggctacagcgtggaggaggtgtacgacctggccaagcccttcggcggcctgaaggacatcctgatcctgagcagccacaagaaggcctacatcgagatcaacagaaaggccgccgagagcatggtgaagttctacacctgcttccccgtgctgatggacggcaaccagctgagcatcagcatggcccccgagaacatgaacatcaaggacgaggaggccatcttcatcaccctggtgaaggagaacgaccccgaggccaacatcgacaccatctacgacagattcgtgcacctggacaacctgcccgaggacggcctgcagtgcgtgctgtgcgtgggcctgcagttcggcaaggtggaccaccacgtgttcatcagcaacagaaacaaggccatcctgcagctggacagccccgagagcgcccagagcatgtacagcttcctgaagcagaacccccagaacatcggcgaccacatgctgacctgcagcctgagccccaagatcgacctgcccgaggtgcagatcgagcacgaccccgagctggagaaggagagccccggcctgaagaacagccccatcgacgagagcgaggtgcagaccgccaccgacagccccagcgtgaagcccaacgagctggaggaggagagcacccccagcatccagaccgagaccctggtgcagcaggaggagccctgcgaggaggaggccgagaaggccacctgcgacagcgacttcgccgtggagaccctggagctggagacccagggcgaggaggtgaaggaggagatccccctggtggccagcgccagcgtgagcatcgagcagttcaccgagaacgccgaggagtgcgccctgaaccagcagatgttcaacagcgacctggagaagaagggcgccgagatcatcaaccccaagaccgccctgctgcccagcgacagcgtgttcgccgaggagagaaacctgaagggcatcctggaggagagccccagcgaggccgaggacttcatcagcggcatcacccagaccatggtggaggccgtggccgaggtggagaagaacgagaccgtgagcgagatcctgcccagcacctgcatcgtgaccctggtgcccggcatccccaccggcgacgagaagaccgtggacaagaagaacatcagctag

SEQ ID NO: 106148 - DNA, 2757 bp, synthetic construct
  misc_feature 1..2757: note = Description of Artificial Sequence: Synthetic coding sequence
  source 1..2757: mol_type = other DNA
atggacagcccccccctgaaggccctgaacagcaacagcatctacttcctgctgctgttccactgcatgctgatcagcgaggtgcagatcgagcacgaccccgagctggagaaggagagccccggcctgaagaacagccccatcgacgagagcgaggtgcagaccgccaccgacagccccagcgtgaagcccaacgagctggaggaggagagcacccccagcatccagaccgagaccctggtgcagcaggaggagccctgcgaggaggaggccgagaaggccacctgcgacagcgacttcgccgtggagaccctggagctggagacccagggcgaggaggtgaaggaggagatccccctggtggccagcgccagcgtgagcatcgagcagttcaccgagaacgccgaggagtgcgccctgaaccagcagatgttcaacagcgacctggagaagaagggcgccgagatcatcaaccccaagaccgccctgctgcccagcgacagcgtgttcgccgaggagagaaacctgaagggcatcctggaggagagccccagcgaggccgaggacttcatcagcggcatcacccagaccatggtggaggccgtggccgaggtggagaagaacgagaccgtgagcgagatcctgcccagcacctgcatcgtgaccctggtgcccggcatccccaccggcgacgagaagaccgtggacaagaagaacatcagcgagaagaagggcaacatggacgagaaggaggagaaggagttcaacaccaaggagaccagaatggacctgcagatcggcaccgagaaggccgagaagaacgagggcagaatggacgccgagaaggtggagaagatggccgccatgaaggagaagcccgccgagaacaccctgttcaaggcctaccccaacaagggcgtgggccaggccaacaagcccgacgagaccagcaagaccagcatcctggccgtgagcgacgtgagcagcagcaagcccagcatcaaggccgtgatcgtgagcagccccaaggccaaggccaccgtgagcaagaccgagaaccagaagagcttccccaagagcgtgcccagagaccagatcaacgccgagaagaagctgagcgccaaggagttcggcctgctgaagcccaccagcgccagaagcggcctggccgagagcagcagcaagttcaagcccacccagagcagcctgaccagaggcggcagcggcagaatcagcgccctgcagggcaagctgagcaagctggactacagagacatcaccaagcagagccaggagaccgaggccagacccagcatcatgaagagagacgacagcaacaacaagaccctggccgagcagaacaccaagaaccccaagagcaccaccggcagaagcagcaagagcaaggaggagcccctgttccccttcaacctggacgagttcgtgaccgtggacgaggtgatcgaggaggtgaaccccagccaggccaagcagaaccccctgaagggcaagagaaaggagaccctgaagaacgtgcccttcagcgagctgaacctgaagaagaagaagggcaagaccagcacccccagaggcgtggagggcgagctgagcttcgtgaccctggacgagatcggcgaggaggaggacgccgccgcccacctggcccaggccctggtgaccgtggacgaggtgatcgacgaggaggagctgaacatggaggagatggtgaagaacagcaacagcctgttcaccctggacgagctgatcgaccaggacgactgcatcagccacagcgagcccaaggacgtgaccgtgctgagcgtggccgaggagcaggacctgctgaagcaggagagactggtgaccgtggacgagatcggcgaggtggaggagctgcccctgaacgagagcgccgacatcaccttcgccaccctgaacaccaagggcaacgagggcgacaccgtgagagacagcatcggcttcatcagcagccaggtgcccgaggaccccagcaccctggtgaccgtggacgagatccaggacgacagcagcgacctgcacctggtgaccctggacgaggtgaccgaggaggacgaggacagcctggccgacttcaacaacctgaaggaggagctgaacttcgtgaccgtggacgaggtgggcgaggaggaggacggcgacaacgacctgaaggtggagctggcccagagcaagaacgaccaccccaccgacaagaagggcaacagaaagaagagagccgtggacaccaagaagaccaagctggagagcctgagccaggtgggccccgtgaacgagaacgtgatggaggaggacctgaagaccatgatcgagagacacctgaccgccaagacccccaccaagagagtgagaatcggcaagaccctgcccagcgagaaggccgtggtgaccgagcccgccaagggcgaggaggccttccagatgagcgaggtggacgaggagagcggcctgaaggacagcgagcccgagagaaagagaaagaagaccgaggacagcagcagcggcaagagcgtggccagcgacgtgcccgaggagctggacttcctggtgcccaaggccggcttcttctgccccatctgcagcctgttctacagcggcgagaaggccatgaccaaccactgcaagagcaccagacacaagcagaacaccgagaagttcatggccaagcagagaaaggagaaggagcagaacgaggccgaggagagaagcagcagatag

SEQ ID NO: 106149 - DNA, 5937 bp, synthetic construct; identical to SEQ ID NO: 106144
  misc_feature 1..5937: note = Description of Artificial Sequence: Synthetic coding sequence
  source 1..5937: mol_type = other DNA

SEQ ID NO: 106150 - DNA, 90 bp, synthetic construct
  misc_feature 1..90: note = Description of Artificial Sequence: Synthetic coding sequence
  source 1..90: mol_type = other DNA
atgagcagacccagattcaaccccagaggcgacttccccctgcagagacccagagcccccaaccccagcggcatgagaccccccggctag

SEQ ID NO: 106151 - DNA, 594 bp, synthetic construct
  misc_feature 1..594: note = Description of Artificial Sequence: Synthetic coding sequence
  source 1..594: mol_type = other DNA
atgagcagacccagattcaaccccagaggcgacttccccctgcagagacccagagcccccaaccccagcggcatgagaccccccggccccttcatgagacccggcagcatgggcctgcccagattctaccccgccggcagagccagaggcatcccccacagattcgccggccacgagagctaccagaacatgggcccccagagaatgaacgtgcaggtgacccagcacagaaccgaccccagactgaccaaggagaagctggacttccacgaggcccagcagaagaagggcaagccccacggcagcagatgggacgacgagccccacatcagcgccagcgtggccgtgaagcagagcagcgtgacccaggtgaccgagcagagccccaaggtgcagagcagatacaccaaggagagcgccagcagcatcctggccagcttcggcctgagcaacgaggacctggaggagctgagcagataccccgacgagcagctgacccccgagaacatgcccctgatcctgagagacatcagaatgagaaagatgggcagaagactgcccaacctgcccagccagagcagaaacaaggagtag

SEQ ID NO: 106152 - DNA, 111 bp, synthetic construct
  misc_feature 1..111: note = Description of Artificial Sequence: Synthetic coding sequence
  source 1..111: mol_type = other DNA
atgagcagacccagattcaaccccagaggcgacttccccctgcagagacccagagcccccaaccccagcggcatgagaccccccggccccttcatgagacccggcagctag

SEQ ID NO: 106153 - DNA, 189 bp, synthetic construct
  misc_feature 1..189: note = Description of Artificial Sequence: Synthetic coding sequence
  source 1..189: mol_type = other DNA
atgagcagacccagattcaaccccagaggcgacttccccctgcagagacccagagcccccaaccccagcggcatgagaccccccggccccttcatgagacccggcagcatgggcctgcccagattctaccccgccggcagagccagaggcatcccccacagattcgccggccacgagagctaccagtag

SEQ ID NO: 106154 - DNA, 189 bp, synthetic construct; identical to SEQ ID NO: 106153
  misc_feature 1..189: note = Description of Artificial Sequence: Synthetic coding sequence
  source 1..189: mol_type = other DNA

SEQ ID NO: 106155 - DNA, 1758 bp, synthetic construct
  misc_feature 1..1758: note = Description of Artificial Sequence: Synthetic coding sequence
  source 1..1758: mol_type = other DNA
atggacagcccccccctgaaggccctgaacagcaacagcatctacttcctgctgctgttccactgcatgctgatcagcgaggtgcagatcgagcacgaccccgagctggagaaggagagccccggcctgaagaacagccccatcgacgagagcgaggtgcagaccgccaccgacagccccagcgtgaagcccaacgagctggaggaggagagcacccccagcatccagaccgagaccctggtgcagcaggaggagccctgcgaggaggaggccgagaaggccacctgcgacagcgacttcgccgtggagaccctggagctggagacccagggcgaggaggtgaaggaggagatccccctggtggccagcgccagcgtgagcatcgagcagttcaccgagaacgccgaggagtgcgccctgaaccagcagatgttcaacagcgacctggagaagaagggcgccgagatcatcaaccccaagaccgccctgctgcccagcgacagcgtgttcgccgaggagagaaacctgaagggcatcctggaggagagccccagcgaggccgaggacttcatcagcggcatcacccagaccatggtggaggccgtggccgaggtggagaagaacgagaccgtgagcgagatcctgcccagcacctgcatcgtgaccctggtgcccggcatccccaccggcgacgagaagaccgtggacaagaagaacatcagcgagaagaagggcaacatggacgagaaggaggagaaggagttcaacaccaaggagaccagaatggacctgcagatcggcaccgagaaggccgagaagaacgagggcagaatggacgccgagaaggtggagaagatggccgccatgaaggagaagcccgccgagaacaccctgttcaaggcctaccccaacaagggcgtgggccaggccaacaagcccgacgagaccagcaagaccagcatcctggccgtgagcgacgtgagcagcagcaagcccagcatcaaggccgtgatcgtgagcagccccaaggccaaggccaccgtgagcaagaccgagaaccagaagagcttccccaagagcgtgcccagagaccagatcaacgccgagaagaagctgagcgccaaggagttcggcctgctgaagcccaccagcgccagaagcggcctggccgagagcagcagcaagttcaagcccacccagagcagcctgaccagaggcggcagcggcagaatcagcgccctgcagggcaagctgagcaagctggactacagagacatcaccaagcagagccaggagaccgaggccagacccagcatcatgaagagagacgacagcaacaacaagaccctggccgagcagaacaccaagaaccccaagagcaccaccggcagaagcagcaagagcaaggaggagcccctgttccccttcaacctggacgagttcgtgaccgtggacgaggtgatcgaggaggtgaaccccagccaggccaagcagaaccccctgaagggcaagagaaaggagaccctgaagaacgtgcccttcagcgagctgaacctgaagaagaagaagggcaagaccagcacccccagaggcgtggagggcgagctgagcttcgtgaccctggacgagatcggcgaggaggaggacgccgccgcccacctggcccaggccctggtgaccgtggacgaggtgatcgacgaggaggagctgaacatggaggagatggtgaagttcaagttcaccttctacatcagatag

SEQ ID NO: 106156 - DNA, 3075 bp, synthetic construct
  misc_feature 1..3075: note = Description of Artificial Sequence: Synthetic coding sequence
  source 1..3075: mol_type = other DNA
atgcccagagacggcgtgcccgccggcaacaccacccccgccgccgcccaggccgccgcccagagccccgacagcgccaccgccggcgccccccaggtgctggacagcctgaagagattcgtgctgttcctggagaacttcgcccccctggtgaacagcctgaacctgggcatcgccaaccccctgctgctgggccccagccccctgcacttcgcccagatcaagacccagctggccctgcagcagctgaacgccgtggccagccacggcagcacccccccctacaccctgctgaaccaggccttcctgaagatcgccatgagcagacccagattcaaccccagaggcgacttccccctgcagagacccagagcccccaaccccagcggcatgagaccccccggccccttcatgagacccggcagcatgggcctgcccagattctaccccgccggcagagccagaggcatcccccacagattcgccggccacgagagctaccagaacatgggcccccagagaatgaacgtgcaggtgacccagcacagaaccgaccccagactgaccaaggagaagctggacttccacgaggcccagcagaagaagggcaagccccacggcagcagatgggacgacgagccccacatcagcgccagcgtggccgtgaagcagagcagcgtgacccaggtgaccgagcagagccccaaggtgcagagcagatacaccaaggagagcgccagcagcatcctggccagcttcggcctgagcaacgaggacctggaggagctgagcagataccccgacgagcagctgacccccgagaacatgcccctgatcctgagagacatcagaatgagaaagatgggcagaagactgcccaacctgcccagccagagcagaaacaaggagaccctgggcagcgaggccgtgagcagcaacgtgatcgactacggccacgccagcaagtacggctacaccgaggaccccctggaggtgagaatctacgaccccgagatccccaccgacgaggtggagaacgagttccagagccagcagaacatcagcgccagcgtgcccaaccccaacgtgatctgcaacagcatgttccccgtggaggacgtgttcagacagatggacttccccggcgagagcagcaacaacagaagcttcttcagcgtggagagcggcaccaagatgagcggcctgcacatcagcggcggccagagcgtgctggagcccatcaagagcgtgaaccagagcatcaaccagaccgtgagccagaccatgagccagagcctgatcccccccagcatgaaccagcagcccttcagcagcgagctgatcagcagcgtgagccagcaggagagaatcccccacgagcccgtgatcaacagcagcaacgtgcacgtgggcagcagaggcagcaagaagaactaccagagccaggccgacatccccatcagaagccccttcggcatcgtgaaggccagctggctgcccaagttcagccacgccgacgcccagaagatgaagagactgcccacccccagcatgatgaacgactactacgccgccagccccagaatcttcccccacctgtgcagcctgtgcaacgtggagtgcagccacctgaaggactggatccagcaccagaacaccagcacccacatcgagagctgcagacagctgagacagcagtaccccgactggaaccccgagatcctgcccagcagaagaaacgagggcaacagaaaggagaacgagacccccagaagaagaagccacagccccagccccagaagaagcagaagaagcagcagcagccacagattcagaagaagcagaagccccatgcactacatgtacagacccagaagcagaagccccagaatctgccacagattcatcagcagatacagaagcagaagcagaagcagaagcccctacagaatcagaaaccccttcagaggcagccccaagtgcttcagaagcgtgagccccgagagaatgagcagaagaagcgtgagaagcagcgacagaaagaaggccctggaggacgtggtgcagagaagcggccacggcaccgagttcaacaagcagaagcacctggaggccgccgacaagggccacagccccgcccagaagcccaagaccagcagcggcaccaagcccagcgtgaagcccaccagcgccaccaagagcgacagcaacctgggcggccacagcatcagatgcaagagcaagaacctggaggacgacaccctgagcgagtgcaagcaggtgagcgacaaggccgtgagcctgcagagaaagctgagaaaggagcagagcctgcactacggcagcgtgctgctgatcaccgagctgcccgaggacggctgcaccgaggaggacgtgagaaagctgttccagcccttcggcaaggtgaacgacgtgctgatcgtgccctacagaaaggaggcctacctggagatggagttcaaggaggccatcaccgccatcatgaagtacatcgagaccacccccctgaccatcaagggcaagagcgtgaagatctgcgtgcccggcaagaagaaggcccagaacaaggaggtgaagaagaagaccctggagagcaagaaggtgagcgccagcaccctgaagagagacgccgacgccagcaaggccgtggagatcgtgaccagcaccagcgccgagagcgtggaccagacccagcagctggtgcccctggtgagaaacaccgccagagaccacgacggcacccccgagaacgagggcgaggagaccgtgcagagcgccctgttcggcttccagtacgacgccagcgaccacaccatggcctggctgggccccaacaccgtgcccgaggtgaaggagatgatcctgcaggacccccagctgcagaccacccagctgccccagaccacccaggcccccgacatcacctggggcatgctgaagaagaccacctacaaggccgagcagatcctgctgcagacccagaagcccttcacccccgacaacctgttcctggccctgctgagcggcgacgccaagcccgagtacgagcagtag

SEQ ID NO: 106157 - DNA, 1317 bp, synthetic construct
  misc_feature 1..1317: note = Description of Artificial Sequence: Synthetic coding sequence
  source 1..1317: mol_type = other DNA
atgcaggccgaggacagaagccagttcggcagcgccgccgagatgctgagcgagcagaccgccgccctgggcaccggctgggagagcatgaacgtgcagctggacggcgccgagccccaggtggagagaggcagccaggaggagagaccctggagaaccgtgcccggccccctggagcacctgtgctgcgacctggaggaggagccccagagcctgcaggagaaggcccagagcgccccctgggtgcccgccatcccccaggagggcaacaccggcgactgggagatggccgccgccctgctggccgccggcagccagggcctggtgaccatcaaggacgtgagcctgtgcttcagccaggaggagtggagaagcctggaccccagccagaccgacttctacggcgagtacgtgatgcaggagaactgcggcatcgtggtgagcctgagattccccatccccaagctggacatgctgagccagctggagggcggcgaggagcagtgggtgcccgacccccaggacctggaggagagagacatcctgagagtgacctacaccggcgacggcagcgagcacgagggcgacacccccgagctggaggccgagccccccagaatgctgagcagcgtgagcgaggacaccgtgctgtggaaccccgagcacgacgagagctgggacagcatgcccagcagcagcagaggcatgctgctgggcccccccttcctgcaggaggacagcttcagcaacctgctgtgcagcaccgagatggacagcctgctgagaccccacacctgcccccagtgcggcaagcagttcgtgtggggcagccacctggccagacaccagcagacccacaccggcgagagaccctacagctgcctgaagtgcgagaagaccttcggcagaagacaccacctgatcagacaccagaagacccacctgcacgacaagaccagcagatgcagcgagtgcggcaagaacttcagatgcaacagccacctggccagccaccagagagtgcacgccgagggcaagagctgcaagggccaggaggtgggcgagagccccggcaccagaaagagacagagagccccccccgtgcccaagtgccacgtgtgcaccgagtgcggcaagagcttcggcagaagacaccacctggtgagacactggctgacccacaccggcgagaagcccttccagtgccccagatgcgagaagagcttcggcagaaagcaccacctggacagacacctgctgacccaccagggccagagccccagaaacagctgggacagaggcaccagcgtgttctag

SEQ ID NO: 106158 - DNA, 1248 bp, synthetic construct
  misc_feature 1..1248: note = Description of Artificial Sequence: Synthetic coding sequence
  source 1..1248: mol_type = other DNA
atgctgagcgagcagaccgccgccctgggcaccggctgggagagcatgaacgtgcagctggacggcgccgagccccaggtggagagaggcagccaggaggagagaccctggagaaccgtgcccggccccctggagcacctgtgctgcgacctggaggaggagccccagagcctgcaggagaaggcccagagcgccccctgggtgcccgccatcccccaggagggcaacaccggcgactgggagatggccgccgccctgctggccgccggcagccaggtgagcagcgccagcctgggcgtgagctgcggccccatcaccgccgccttcgtgctgctgagccaccagcccatcgacgagctggcccacatgatcatcaacggcttccccatccccaagctggacatgctgagccagctggagggcggcgaggagcagtgggtgcccgacccccaggacctggaggagagagacatcctgagagtgacctacaccggcgacggcagcgagcacgagggcgacacccccgagctggaggccgagccccccagaatgctgagcagcgtgagcgaggacaccgtgctgtggaaccccgagcacgacgagagctgggacagcatgcccagcagcagcagaggcatgctgctgggcccccccttcctgcaggaggacagcttcagcaacctgctgtgcagcaccgagatggacagcctgctgagaccccacacctgcccccagtgcggcaagcagttcgtgtggggcagccacctggccagacaccagcagacccacaccggcgagagaccctacagctgcctgaagtgcgagaagaccttcggcagaagacaccacctgatcagacaccagaagacccacctgcacgacaagaccagcagatgcagcgagtgcggcaagaacttcagatgcaacagccacctggccagccaccagagagtgcacgccgagggcaagagctgcaagggccaggaggtgggcgagagccccggcaccagaaagagacagagagccccccccgtgcccaagtgccacgtgtgcaccgagtgcggcaagagcttcggcagaagacaccacctggtgagacactggctgacccacaccggcgagaagcccttccagtgccccagatgcgagaagagcttcggcagaaagcaccacctggacagacacctgctgacccaccagggccagagccccagaaacagctgggacagaggcaccagcgtgttctag

SEQ ID NO: 106159 - DNA, 1317 bp, synthetic construct; identical to SEQ ID NO: 106157
  misc_feature 1..1317: note = Description of Artificial Sequence: Synthetic coding sequence
  source 1..1317: mol_type = other DNA

SEQ ID NO: 106160 - DNA, 1275 bp, synthetic construct
  misc_feature 1..1275: note = Description of Artificial Sequence: Synthetic coding sequence
  source 1..1275: mol_type = other DNA
atgctgagcgagcagaccgccgccctgggcaccggctgggagagcatgaacgtgcagctggacggcgccgagccccaggtggagagaggcagccaggaggagagaccctggagaaccgtgcccggccccctggagcacctgtgctgcgacctggaggaggagccccagagcctgcaggagaaggcccagagcgccccctgggtgcccgccatcccccaggagggcaacaccggcgactgggagatggccgccgccctgctggccgccggcagccagggcctggtgaccatcaaggacgtgagcctgtgcttcagccaggaggagtggagaagcctggaccccagccagaccgacttctacggcgagtacgtgatgcaggagaactgcggcatcgtggtgagcctgagattccccatccccaagctggacatgctgagccagctggagggcggcgaggagcagtgggtgcccgacccccaggacctggaggagagagacatcctgagagtgacctacaccggcgacggcagcgagcacgagggcgacacccccgagctggaggccgagccccccagaatgctgagcagcgtgagcgaggacaccgtgctgtggaaccccgagcacgacgagagctgggacagcatgcccagcagcagcagaggcatgctgctgggcccccccttcctgcaggaggacagcttcagcaacctgctgtgcagcaccgagatggacagcctgctgagaccccacacctgcccccagtgcggcaagcagttcgtgtggggcagccacctggccagacaccagcagacccacaccggcgagagaccctacagctgcctgaagtgcgagaagaccttcggcagaagacaccacctgatcagacaccagaagacccacctgcacgacaagaccagcagatgcagcgagtgcggcaagaacttcagatgcaacagccacctggccagccaccagagagtgcacgccgagggcaagagctgcaagggccaggaggtgggcgagagccccggcaccagaaagagacagagagccccccccgtgcccaagtgccacgtgtgcaccgagtgcggcaagagcttcggcagaagacaccacctggtgagacactggctgacccacaccggcgagaagcccttccagtgccccagatgcgagaagagcttcggcagaaagcaccacctggacagacacctgctgacccaccagggccagagccccagaaacagctgggacagaggcaccagcgtgttctag

SEQ ID NO: 106161 - DNA, 411 bp, synthetic construct
  misc_feature 1..411: note = Description of Artificial Sequence: Synthetic coding sequence
  source 1..411: mol_type = other DNA
atgcaggccgaggacagaagccagttcggcagcgccgccgagatgctgagcgagcagaccgccgccctgggcaccggctgggagagcatgaacgtgcagctggacggcgccgagccccaggtggagagaggcagccaggaggagagaccctggagaaccgtgcccggccccctggagcacctgtgctgcgacctggaggaggagccccagagcctgcaggagaaggcccagagcgccccctgggtgcccgccatcccccaggagggcaacaccggcgactgggagatggccgccgccctgctggccgccggcagccagggcctggtgaccatcaaggacgtgagcctgtgcttcagccaggaggagtggagaagcctggaccccagccagaccgacttctacggcgagtag

SEQ ID NO: 106162 - DNA, 324 bp, synthetic construct
  misc_feature 1..324: note = Description of Artificial Sequence: Synthetic coding sequence
  source 1..324: mol_type = other DNA
atgctgagcgagcagaccgccgccctgggcaccggctgggagagcatgaacgtgcagctggacggcgccgagccccaggtggagagaggcagccaggaggagagaccctggagaaccgtgcccggccccctggagcacctgtgctgcgacctggaggaggagccccagagcctgcaggagaaggcccagagcgccccctgggtgcccgccatcccccaggagggcaacaccggcgactgggagatggccgccgccctgctggccgccggcagccagggcctggtgaccatcaaggacgtgagcctgtgcttcagccaggagtag

SEQ ID NO: 106163 - DNA, 234 bp, synthetic construct
  misc_feature 1..234: note = Description of Artificial Sequence: Synthetic coding sequence
  source 1..234: mol_type = other DNA
atgctgagcgagcagaccgccgccctgggcaccggctgggagagcatgaacgtgcagctggacggcgccgagccccaggtggagagaggcagccaggaggagagaccctggagaaccgtgcccggccccctggagcacctgtgctgcgacctggaggaggagccccagagcctgcaggagaaggcccagagcgccccctgggtgcccgccatcccccaggagggcaacacctag

SEQ ID NO: 106164 - DNA, 3984 bp, synthetic construct
  misc_feature 1..3984: note = Description of Artificial Sequence: Synthetic coding sequence
  source 1..3984: mol_type = other DNA
atgagaagcttcctgcagcaggacgtgaacaagaccaagagcagactgaacgtgctgaacggcctggccaacaacatggacgacctgaagatcaacaccgacatcaccggcgccaaggaggagctgctggacgacaacaacttcatcagcgacaaggagagcggcgtgcacaagcccaaggactgccagaccagcttccagaagaacaacaccctgaccctgcccgaggagctgagcaaggacaagagcgagaacgccctgagcggcggccagagcagcctgttcatccacgccggcgcccccaccgtgagcagcgagaacttcatcctgcccaagggcgccgccgtgaacggccccgtgagccacagcagcctgaccaagaccagcaacatgaacaagggcagcgtgagcctgaccaccggccagcccgtggaccagcccaccaccgagagctgcagcaccctgaaggtggccgccgacctgcagctgagcaccccccagaaggccagccagcaccaggtgctgttcctgctgagcgacgtggcccacgccaagaaccccacccacagcaacaagaagctgcccaccagcgccagcgtgggctgcgacatccagaacagcgtgggcagcaacatcaagagcgacggcaccctgatcaaccaggtggaggtgggcgaggacggcgaggacctgctggtgaaggacgactgcgtgaacaccgtgaccggcatcagcagcggcaccgacggcttcagaagcgagaacgacaccaactgggacccccagaaggagttcatccagttcctgatgaccaacgaggagaccgtggacaaggcccccccccacagcaagatcggcctggagaagaagagaaagagaaagatggacgtgagcaagatcaccagatacaccgaggactgcttcagcgacagcaactgcgtgcccaacaagagcaagatgcaggaggtggacttcctggagcagaacgaggagctgcaggccgtggacagccagaagtacgccctgagcaaggtgaagcccgagagcaccgacgaggacctggagagcgtggacgccttccagcacctgatctacaaccccgacaagtgcggcgaggagagcagccccgtgcacaccagcaccttcctgagcaacaccctgaagaagaagtgcgaggagagcgacagcgagagccccgccaccttcagcaccgaggagcccagcttctacccctgcaccaagtgcaacgtgaacttcagagagaagaagcacctgcacagacacatgatgtaccacctggacggcaacagccacttcagacacctgaacgtgcccagaccctacgcctgcagagagtgcggcagaaccttcagagacagaaacagcctgctgaagcacatgatcatccaccaggagagaagacagaagctgatggaggagatcagagagctgaaggagctgcaggacgagggcagaagcgccagactgcagtgcccccagtgcgtgttcggcaccaactgccccaagaccttcgtgcagcacgccaagacccacgagaaggacaagagatactactgctgcgaggagtgcaacttcatggccgtgaccgagaacgagctggagtgccacagaggcatcgcccacggcgccgtggtgaagtgccccatggtgaccagcgacatcgcccagagaaagacccagaagaagaccttcatgaaggacagcgtggtgggcagcagcaagaagagcgccacctacatctgcaagatgtgccccttcaccaccagcgccaagagcgtgctgaagaagcacaccgagtacctgcacagcagcagctgcgtggacagcttcggcagccccctgggcctggacaagagaaagaacgacatcctggaggagcccgtggacagcgacagcaccaagaccctgaccaagcagcagagcaccaccttccccaagaacagcgccctgaagcaggacgtgaagagaaccttcggcagcaccagccagagcagcagcttcagcaagatccacaagagaccccacagaatccagaaggccagaaagagcatcgcccagagcggcgtgaacatgtgcaaccagaacagcagcccccacaagaacgtgaccatcaagagcagcgtggaccagaagcccaagtacttccaccaggccgccaaggagaagagcaacgccaaggccaacagccactacctgtacagacacaagtacgagaactacagaatgatcaagaagagcggcgagagctaccccgtgcacttcaagaaggaggaggccagcagcctgaacagcctgcacctgttcagcagcagcagcaacagccacaacaacttcatcagcgacccccacaagcccgacgccaagagacccgagagcttcaaggaccacagaagagtggccgtgaagagagtgatcaaggagagcaagaaggagagcagcgtgggcggcgaggacctggacagctaccccgacttcctgcacaagatgaccgtggtggtgctgcagaagctgaacagcgccgagaagaaggacagctacgagaccgaggacgagagcagctgggacaacgtggagctgggcgactacaccacccaggccatcgaggacgagacctacagcgacatcaaccaggagcacgtgaacctgttccccctgttcaagagcaaggtggagggccaggagcccggcgagaacgccaccctgagctacgaccagaacgacggcttctacttcgagtactacgaggacaccggcagcaacaacttcctgcacgagatccacgacccccagcacctggagaccgccgacgccagcctgagcaagcacagcagcgtgttccactggaccgacctgagcctggagaagaagagctgcccctactgccccgccaccttcgagaccggcgtgggcctgagcaaccacgtgagaggccacctgcacagagccggcctgagctacgaggccagacacgtggtgagccccgagcagatcgccaccagcgacaagatgcagcacttcaagagaaccggcaccggcacccccgtgaagagagtgagaaaggccatcgagaagagcgagaccaccagcgagcacacctgccagctgtgcggcggctggttcgacaccaagatcggcctgagcaaccacgtgagaggccacctgaagagactgggcaagaccaagtgggacgcccacaagagccccatctgcgtgctgaacgagatgatgcagaacgaggagaagtacgagaagatcctgaaggccctgaacagcagaagaatcatccccagacccttcgtggcccagaagctggccagcagcgacgacttcatcagccagaacgtgatccccctggaggcctacagaaacggcctgaagaccgaggccctgagcgtgagcgccagcgaggaggagggcctgaacttcctgaacgagtacgacgagaccaagcccgagctgcccagcggcaagaagaaccagagcctgaccctgatcgagctgctgaagaacaagagaatgggcgaggagagaaacagcgccatcagcccccagaagatccacaaccagaccgccagaaagagattcgtgcagaagtgcgtgctgcccctgaacgaggacagccccctgatgtaccagccccagaagatggacctgaccatgcacagcgccctggactgcaagcagaagaagagcagaagcagaagcggcagcaagaagaagatgctgaccctgccccacggcgccgacgaggtgtacatcctgagatgcagattctgcggcctggtgttcagaggccccctgagcgtgcaggaggactggatcaagcacctgcagagacacatcgtgaacgccaacctgcccagaaccggcgccggcatggtggaggtgaccagcctgctgaagaagcccgccagcatcaccgagaccagcttcagcctgctgatggccgaggccgccagctag

SEQ ID NO: 106165 - DNA, 318 bp, synthetic construct
  misc_feature 1..318: note = Description of Artificial Sequence: Synthetic coding sequence
  source 1..318: mol_type = other DNA
atgctgatcagacagaacctggccctggactgcaagcagaagaagagcagaagcagaagcggcagcaagaagaagatgctgaccctgccccacggcgccgacgaggtgtacatcctgagatgcagattctgcggcctggtgttcagaggccccctgagcgtgcaggaggactggatcaagcacctgcagagacacatcgtgaacgccaacctgcccagaaccggcgccggcatggtggaggtgaccagcctgctgaagaagcccgccagcatcaccgagaccagcttcagcctgctgatggccgaggccgccagctag

SEQ ID NO: 106166 - DNA, 318 bp, synthetic construct; identical to SEQ ID NO: 106165
  misc_feature 1..318: note = Description of Artificial Sequence: Synthetic coding sequence
  source 1..318: mol_type = other DNA

SEQ ID NO: 106167 - DNA, 3984 bp, synthetic construct; identical to SEQ ID NO: 106164
  misc_feature 1..3984: note = Description of Artificial Sequence: Synthetic coding sequence
  source 1..3984: mol_type = other DNA

SEQ ID NO: 106168 - DNA, 1953 bp, synthetic construct
  misc_feature 1..1953: note = Description of Artificial Sequence: Synthetic coding sequence
  source 1..1953: mol_type = other DNA
atgatgtaccacctggacggcaacagccacttcagacacctgaacgtgcccagaccctacgcctgcagagagtgcggcagaaccttcagagacagaaacagcctgctgaagcacatgatcatccaccaggagagaagacagaagctgatggaggagatcagagagctgaaggagctgcaggacgagggcagaagcgccagactgcagtgcccccagtgcgtgttcggcaccaactgccccaagaccttcgtgcagcacgccaagacccacgagaaggacaagagatactactgctgcgaggagtgcaacttcatggccgtgaccgagaacgagctggagtgccacagaggcatcgcccacggcgccgtggtgaagtgccccatggtgaccagcgacatcgcccagagaaagacccagaagaagaccttcatgaaggacagcgtggtgggcagcagcaagaagagcgccacctacatctgcaagatgtgccccttcaccaccagcgccaagagcgtgctgaagaagcacaccgagtacctgcacagcagcagctgcgtggacagcttcggcagccccctgggcctggacaagagaaagaacgacatcctggaggagcccgtggacagcgacagcaccaagaccctgaccaagcagcagagcaccaccttccccaagaacagcgccctgaagcaggacgtgaagagaaccttcggcagcaccagccagagcagcagcttcagcaagatccacaagagaccccacagaatccagaaggccagaaagagcatcgcccagagcggcgtgaacatgtgcaaccagaacagcagcccccacaagaacgtgaccatcaagagcagcgtggaccagaagcccaagtacttccaccaggccgccaaggagaagagcaacgccaaggccaacagccactacctgtacagacacaagtacgagaactacagaatgatcaagaagagcggcgagagctaccccgtgcacttcaagaaggaggaggccagcagcctgaacagcctgcacctgttcagcagcagcagcaacagccacaacaacttcatcagcgacccccacaagcccgacgccaagagacccgagagcttcaaggaccacagaagagtggccgtgaagagagtgatcaaggagagcaagaaggagagcagcgtgggcggcgaggacctggacagctaccccgacttcctgcacaagatgaccgtggtggtgctgcagaagctgaacagcgccgagaagaaggacagctacgagaccgaggacgagagcagctgggacaacgtggagctgggcgactacaccacccaggccatcgaggacgagacctacagcgacatcaaccaggagcacgtgaacctgttccccctgttcaagagcaaggtggagggccaggagcccggcgagaacgccaccctgagctacgaccagaacgacggcttctacttcgagtactacgaggacaccggcagcaacaacttcctgcacgagatccacgacccccagcacctggagaccgccgacgccagcctgagcaagcacagcagcgtgttccactggaccgacctgagcctggagaagaagagctgcccctactgccccgccaccttcgagaccggcgtgggcctgagcaaccacgtgagaggccacctgcacagagccggcctgagctacgaggccagacacgtggtgagccccgagcagatcgccaccagcgacaagatgcagcacttcaagagaaccggcaccggcacccccgtgaagagagtgagaaaggccatcgagaagagcgagaccaccagcgagcacacctgccagctgtgcggcggctggttcgacaccaagatcggcctgagcaaccacgtgagaggccacctgaagagactgggcaagaccaagtgggacgcccacaagagccccatctgcgtgtag

SEQ ID NO: 106169 - DNA, 924 bp, synthetic construct
  misc_feature 1..924: note = Description of Artificial Sequence: Synthetic coding sequence
  source 1..924: mol_type = other DNA
atgagaagcttcctgcagcaggacgtgaacaagaccaagagcagactgaacgtgctgaacggcctggccaacaacatggacgacctgaagatcaacaccgacatcaccggcgccaaggaggagctgctggacgacaacaacttcatcagcgacaaggagagcggcgtgcacaagcccaaggactgccagaccagcttccagaagaacaacaccctgaccctgcccgaggagctgagcaaggacaagagcgagaacgccctgagcggcggccagagcagcctgttcatccacgccggcgcccccaccgtgagcagcgagaacttcatcctgcccaagggcgccgccgtgaacggccccgtgagccacagcagcctgaccaagaccagcaacatgaacaagggcagcgtgagcctgaccaccggccagcccgtggaccagcccaccaccgagagctgcagcaccctgaaggtggccgccgacctgcagctgagcaccccccagaaggccagccagcaccaggtgctgttcctgctgagcgacgtggcccacgccaagaaccccacccacagcaacaagaagctgcccaccagcgccagcgtgggctgcgacatccagaacagcgtgggcagcaacatcaagagcgacggcaccctgatcaaccaggtggaggtgggcgaggacggcgaggacctgctggtgaaggacgactgcgtgaacaccgtgaccggcatcagcagcggcaccgacggcttcagaagcgagaacgacaccaactgggacccccagaaggagttcatccagttcctgatgaccaacgaggagaccgtggacaaggcccccccccacagcaagatcggcctggagaagaagaaggccaagaacggctgcaagcaggacaacagcctgtacagaggcctgctgtag

SEQ ID NO: 106170 - DNA, 1518 bp, synthetic construct
  misc_feature 1..1518: note = Description of Artificial Sequence: Synthetic coding sequence
  source 1..1518: mol_type = other DNA
atgaccaaggcccaggagagcctgaccctggaggacgtggccgtggacttcacctgggaggagtggcagttcctgagccccgcccagaaggacctgtacagagacgtgatgctggagaactacagcaacctggtgagcgtgggctaccaggccggcaagcccgacgccctgaccaagctggagcagggcgagcccctgtggaccctggaggacgagatccacagccccgcccaccccgagatcgagaaggccgacgaccacctgcagcagcccctgcagaaccagaagatcctgaagagaaccggccagagatacgagcacggcagaaccctgaagagctacctgggcctgaccaaccagagcagaagatacaacagaaaggagcccgccgagttcaacggcgacggcgccttcctgcacgacaaccacgagcagatgcccaccgagatcgagttccccgagagcagaaagcccatcagcaccaagagccagttcctgaagcaccagcagacccacaacatcgagaaggcccacgagtgcaccgactgcggcaaggccttcctgaagaagagccagctgaccgagcacaagagaatccacaccggcaagaagccccacgtgtgcagcctgtgcggcaaggccttctacaagaagtacagactgaccgagcacgagagagcccacagaggcgagaagccccacggctgcagcctgtgcggcaaggccttctacaagagatacagactgaccgagcacgagagagcccacaagggcgagaagccctacggctgcagcgagtgcggcaaggccttccccagaaagagcgagctgaccgagcaccagagaatccacaccggcatcaagccccaccagtgcagcgagtgcggcagagccttcagcagaaagagcctgctggtggtgcaccagagaacccacaccggcgagaagccccacacctgcagcgagtgcggcaagggcttcatccagaagggcaacctgaacatccaccagagaacccacaccggcgagaagccctacggctgcatcgactgcggcaaggccttcagccagaagagctgcctggtggcccaccagagataccacaccggcaagacccccttcgtgtgccccgagtgcggccagccctgcagccagaagagcggcctgatcagacaccagaagatccacagcggcgagaagccctacaagtgcagcgactgcggcaaggccttcctgaccaagaccatgctgatcgtgcaccacagaacccacaccggcgagagaccctacggctgcgacgagtgcgagaaggcctacttctacatgagctgcctggtgaagcacaagagaatccacagcagagagaagagaggcgacagcgtgaaggtggagaaccccagcaccgccagccacagcctgagccccagcgagcacgtgcagggcaagagccccgtgaacatggtgaccgtggccatggtggccggccagtgcgagttcgcccacatcctgcacagctag

SEQ ID NO: 106171 - DNA, 1833 bp, synthetic construct
  misc_feature 1..1833: note = Description of Artificial Sequence: Synthetic coding sequence
  source 1..1833: mol_type = other DNA
atgcccagcgccagaggcaagagcaagagcaaggcccccatcaccttcggcgacctggccatctacttcagccaggaggagtgggagtggctgagccccatccagaaggacctgtacgaggacgtgatgctggagaactacagaaacctggtgagcctgggcctgagcttcagaagacccaacgtgatcaccctgctggagaagggcaaggccccctggatggtggagcccgtgagaagaagaagagcccccgacagcggcagcaagtgcgagaccaagaagctgccccccaaccagtgcaacaagagcggccagagcatctgccagaagctggtgagcgcccagcagaaggcccccaccagaaagagcggctgcaacaagaacagcgtgctggtgaagcccaagaagggccacagcggcaagaagcccctgaagtgcaacgactgcggcaagaccttcagcagaagcttcagcctgaagctgcaccagaacatccacaccggcgagaagcccttcgagtgcagcaactgcagaaaggccttcagacagatcagcagcatcctgctgcaccagagaatccacagcggcaagaagagccacgagtgcaacaagtgcggcgagagcttcaaccagagaaccaccctgatcctgcacatgagaatccacgacggcaaggagatcctggactgcggcaaggccctgagccagtgccagagcttcaacatccaccagaagatccacgtggtgggcaacgtgtgccagtgcagaaagtgcggcaaggccttcaaccagatgagcagcctgctgctgcacaagaagatccacaacggcaagaagacccacaagtacaacaagtgcggcagaggcttcaagaagaagagcgtgttcgtggtgcacaagagaatccacgccggcgagaagatccccgagaacgccaaggccctgagccagagcctgcagcagagaagccaccacctggagaaccccttcaagtgcagaaagtgcggcaagctgttcaacagaatcagccccctgatgctgcaccagagaatccacaccagcgagaagccctacaagtgcgacaagtgcgacaagttcttcagaagactgagcaccctgatcctgcacctgagaatccacaacggcgagaagctgtacagatgcaacaagtgcgagaaggtgtgcaacagacacagcagcctgatccagcaccagaaggtgcacaccaagaagaagaagctgttcgagtgcaaggagtgcggcaagatgttcagcggcaccgccaacctgaagatccaccagaacatccacagcgaggagaagcccttcaagtgcaacaagtgcagcaaggtgttcggcagacagagcttcctgatcgagcaccagagaatccacaccggcgagaagccctaccagtgcgaggagtgcggcaaggccttcagccacagaatcagcctgaccagacacaagagaatccacaccgaggacagaccctacgagtgcgaccagtgcggcaaggccttcagccagagcgcccacctggcccagcacgagagaatccacaccggcgagaagccctacacctgcaagacctgcggcaaggccttcagccagagaaccagcctgatcctgcacgagagaagccacaccggcgagaagccctacgagtgcaacgagtgcggcaaggccttcagcagcggcagcgacctgatcagacaccagagaagccacagcagcgagaagccctacgagtgcagcaagtgcggcaaggcctacagcagaagcagcagcctgatcagacaccagaacacccacagcgaggagaaggcctag

SEQ ID NO: 106172 - DNA, 2217 bp, synthetic construct
  misc_feature 1..2217: note = Description of Artificial Sequence: Synthetic coding sequence
  source 1..2217: mol_type = other DNA
atgagaaccctggtgaacgccctgagcggcggcggccaggagatcaagcccgagggcaagtgcgcccacaacggcatgtgcttcagatgcgaggaggtggcccccgacacctgcgaggcctacccctaccccggcctggtggtgagcgtggccggcaaggagggccccaaccccgaccacaagagaggcttcctggacctggcccaggagggcatccaggccctgccctaccagctgagcgcccacctgagcgtgtggaccctgaagggcgaggagagaatgcccagcgccagaggcaagagcaagagcaaggcccccatcaccttcggcgacctggccatctacttcagccaggaggagtgggagtggctgagccccatccagaaggacctgtacgaggacgtgatgctggagaactacagaaacctggtgagcctgggcctgagcttcagaagacccaacgtgatcaccctgctggagaagggcaaggccccctggatggtggagcccgtgagaagaagaagagcccccgagctggtgaccgtggccctgttcagcagcttcggcgaggtgatgttcagcagaatggtgctgatgctgatggacgtgtgccagtacctggtgatcgacgagctggacagcggcagcaagtgcgagaccaagaagctgccccccaaccagtgcaacaagagcggccagagcatctgccagaagctggtgagcgcccagcagaaggcccccaccagaaagagcggctgcaacaagaacagcgtgctggtgaagcccaagaagggccacagcggcaagaagcccctgaagtgcaacgactgcggcaagaccttcagcagaagcttcagcctgaagctgcaccagaacatccacaccggcgagaagcccttcgagtgcagcaactgcagaaaggccttcagacagatcagcagcatcctgctgcaccagagaatccacagcggcaagaagagccacgagtgcaacaagtgcggcgagagcttcaaccagagaaccaccctgatcctgcacatgagaatccacgacggcaaggagatcctggactgcggcaaggccctgagccagtgccagagcttcaacatccaccagaagatccacgtggtgggcaacgtgtgccagtgcagaaagtgcggcaaggccttcaaccagatgagcagcctgctgctgcacaagaagatccacaacggcaagaagacccacaagtacaacaagtgcggcagaggcttcaagaagaagagcgtgttcgtggtgcacaagagaatccacgccggcgagaagatccccgagaacgccaaggccctgagccagagcctgcagcagagaagccaccacctggagaaccccttcaagtgcagaaagtgcggcaagctgttcaacagaatcagccccctgatgctgcaccagagaatccacaccagcgagaagccctacaagtgcgacaagtgcgacaagttcttcagaagactgagcaccctgatcctgcacctgagaatccacaacggcgagaagctgtacagatgcaacaagtgcgagaaggtgtgcaacagacacagcagcctgatccagcaccagaaggtgcacaccaagaagaagaagctgttcgagtgcaaggagtgcggcaagatgttcagcggcaccgccaacctgaagatccaccagaacatccacagcgaggagaagcccttcaagtgcaacaagtgcagcaaggtgttcggcagacagagcttcctgatcgagcaccagagaatccacaccggcgagaagccctaccagtgcgaggagtgcggcaaggccttcagccacagaatcagcctgaccagacacaagagaatccacaccgaggacagaccctacgagtgcgaccagtgcggcaaggccttcagccagagcgcccacctggcccagcacgagagaatccacaccggcgagaagccctacacctgcaagacctgcggcaaggccttcagccagagaaccagcctgatcctgcacgagagaagccacaccggcgagaagccctacgagtgcaacgagtgcggcaaggccttcagcagcggcagcgacctgatcagacaccagagaagccacagcagcgagaagccctacgagtgcagcaagtgcggcaaggcctacagcagaagcagcagcctgatcagacaccagaacacccacagcgaggagaaggcctag

SEQ ID NO: 106173 - DNA, 975 bp, synthetic construct
  misc_feature 1..975: note = Description of Artificial Sequence: Synthetic coding sequence
  source 1..975: mol_type = other DNA
aagaacagcgtgctggtgaagcccaagaagggccacagcggcaagaagcccctgaagtgcaacgactgcggcaagaccttcagcagaagcttcagcctgaagctgcaccagaacatccacaccggcgagaagcccttcgagtgcagcaactgcagaaaggccttcagacagatcagcagcatcctgctgcaccagagaatccacagcggcaagaagagccacgagtgcaacaagtgcggcgagagcttcaaccagagaaccaccctgatcctgcacatgagaatccacgacggcaagaaccccttcaagtgcagaaagtgcggcaagctgttcaacagaatcagccccctgatgctgcaccagagaatccacaccagcgagaagccctacaagtgcgaggagtgcggcaagatgttcagcggcaccgccaacctgaagatccaccagaacatccacagcgaggagaagcccttcaagtgcaacaagtgcagcaaggtgttcggcagacagagcttcctgatcgagcaccagagaatccacaccggcgagaagccctaccagtgcgaggagtgcggcaaggccttcagccacagaatcagcctgaccagacacaagagaatccacaccgaggacagaccctacgagtgcgaccagtgcggcaaggccttcagccagagcgcccacctggcccagcacgagagaatccacaccggcgagaagccctacacctgcaagacctgcggcaaggccttcagccagagaaccagcctgatcctgcacgagagaagccacaccggcgagaagccctacgagtgcaacgagtgcggcaaggccttcagcagcggcagcgacctgatcagacaccagagaagccacagcagcgagaagccctacgagtgcagcaagtgcggcaaggcctacagcagaagcagcagcctgatcagacaccagaacacccacagcgaggagaagtag

SEQ ID NO: 106174 - DNA, 1179 bp, synthetic construct
  misc_feature 1..1179: note = Description of Artificial Sequence: Synthetic coding sequence
  source 1..1179: mol_type = other DNA
atgagaatccacgacggcaaggagatcctggactgcggcaaggccctgagccagtgccagagcttcaacatccaccagaagatccacgtggtgggcaacgtgtgccagtgcagaaagtgcggcaaggccttcaaccagatgagcagcctgctgctgcacaagaagatccacaacggcaagaagacccacaagtacaacaagtgcggcagaggcttcaagaagaagagcgtgttcgtggtgcacaagagaatccacgccggcgagaagatccccgagaacgccaaggccctgagccagagcctgcagcagagaagccaccacctggagaaccccttcaagtgcagaaagtgcggcaagctgttcaacagaatcagccccctgatgctgcaccagagaatccacaccagcgagaagccctacaagtgcgacaagtgcgacaagttcttcagaagactgagcaccctgatcctgcacctgagaatccacaacggcgagaagctgtacagatgcaacaagtgcgagaaggtgtgcaacagacacagcagcctgatccagcaccagaaggtgcacaccaagaagaagaagctgttcgagtgcaaggagtgcggcaagatgttcagcggcaccgccaacctgaagatccaccagaacatccacagcgaggagaagcccttcaagtgcaacaagtgcagcaaggtgttcggcagacagagcttcctgatcgagcaccagagaatccacaccggcgagaagccctaccagtgcgaggagtgcggcaaggccttcagccacagaatcagcctgaccagacacaagagaatccacaccgaggacagaccctacgagtgcgaccagtgcggcaaggccttcagccagagcgcccacctggcccagcacgagagaatccacaccggcgagaagccctacacctgcaagacctgcggcaaggccttcagccagagaaccagcctgatcctgcacgagagaagccacaccggcgagaagccctacgagtgcaacgagtgcggcaaggccttcagcagcggcagcgacctgatcagacaccagagaagccacagcagcgagaagccctacgagtgcagcaagtgcggcaaggcctacagcagaagcagcagcctgatcagacaccagaacacccacagcgaggagaaggcctag

SEQ ID NO: 106175 - DNA, 1833 bp, synthetic construct; identical to SEQ ID NO: 106171
  misc_feature 1..1833: note = Description of Artificial Sequence: Synthetic coding sequence
  source 1..1833: mol_type = other DNA

SEQ ID NO: 106176 - DNA, 1728 bp, synthetic construct
  misc_feature 1..1728: note = Description of Artificial Sequence: Synthetic coding sequence
  source 1..1728: mol_type = other DNA
atggccatgagccaggagagcctgaccttcaaggacgtgttcgtggacttcaccctggaggagtggcagcagctggacagcgcccagaagaacctgtacagagacgtgatgctggagaactacagccacctggtgagcgtgggccacctggtgggcaagcccgacgtgatcttcagactgggccccggcgacgagagctggatggccgacggcggcacccccgtgagaacctgcgccgtgtgggaggtggacgagcagatcgaccactacaaggagagccaggacaagttcctgtggcaggccgccttcatcggcaaggagaccctgaaggacgagagcggccaggagtgcaagatctgcagaaagatcatctacctgaacaccgacttcgtgagcgtgaagcagagactgcccaagtactacagctgggagagatgcagcaagcaccacctgaacttcctgggccagaacagaagctacgtgagaaagaaggacgacggctgcaaggcctactggaaggtgtgcctgcactacaacctgcacaaggcccagcccgccgagagattcttcgaccccaaccagagaggcaaggccctgcaccagaagcaggccctgagaaagagccagagaagccagaccggcgagaagctgtacaagtgcaccgagtgcggcaaggtgttcatccagaaggccaacctggtggtgcaccagagaacccacaccggcgagaagccctacgagtgctgcgagtgcgccaaggccttcagccagaagagcaccctgatcgcccaccagagaacccacaccggcgagaagccctacgagtgcagcgagtgcggcaagaccttcatccagaagagcaccctgatcaagcaccagagaacccacaccggcgagaagcccttcgtgtgcgacaagtgccccaaggccttcaagagcagctaccacctgatcagacacgagaagacccacatcagacaggccttctacaagggcatcaagtgcaccaccagcagcctgatctaccagagaatccacaccagcgagaagccccagtgcagcgagcacggcaaggccagcgacgagaagcccagccccaccaagcactggagaacccacaccaaggagaacatctacgagtgcagcaagtgcggcaagagcttcagaggcaagagccacctgagcgtgcaccagagaatccacaccggcgagaagccctacgagtgcagcatctgcggcaagaccttcagcggcaagagccacctgagcgtgcaccacagaacccacaccggcgagaagccctacgagtgcagaagatgcggcaaggccttcggcgagaagagcaccctgatcgtgcaccagagaatgcacaccggcgagaagccctacaagtgcaacgagtgcggcaaggccttcagcgagaagagccccctgatcaagcaccagagaatccacaccggcgagagaccctacgagtgcaccgactgcaagaaggccttcagcagaaagagcaccctgatcaagcaccagagaatccacaccggcgagaagccctacaagtgcagcgagtgcggcaaggccttcagcgtgaagagcaccctgatcgtgcaccacagaacccacaccggcgagaagccctacgagtgcagagactgcggcaaggccttcagcggcaagagcaccctgatcaagcaccagagaagccacaccggcgacaagaacctgtag

SEQ ID NO: 106177 - DNA, 1746 bp, synthetic construct
  misc_feature 1..1746: note = Description of Artificial Sequence: Synthetic coding sequence
  source 1..1746: mol_type = other DNA
atggccatgagccaggagagcctgaccttcaaggacgtgttcgtggacttcaccctggaggagtggcagcagctggacagcgcccagaagaacctgtacagagacgtgatgctggagaactacagccacctggtgagcgtgggccacctggtgggcaagcccgacgtgatcttcagactgggccccggcgacgagagctggatggccgacggcggcacccccgtgagaacctgcgccggcgaggacagacccgaggtgtgggaggtggacgagcagatcgaccactacaaggagagccaggacaagttcctgtggcaggccgccttcatcggcaaggagaccctgaaggacgagagcggccaggagtgcaagatctgcagaaagatcatctacctgaacaccgacttcgtgagcgtgaagcagagactgcccaagtactacagctgggagagatgcagcaagcaccacctgaacttcctgggccagaacagaagctacgtgagaaagaaggacgacggctgcaaggcctactggaaggtgtgcctgcactacaacctgcacaaggcccagcccgccgagagattcttcgaccccaaccagagaggcaaggccctgcaccagaagcaggccctgagaaagagccagagaagccagaccggcgagaagctgtacaagtgcaccgagtgcggcaaggtgttcatccagaaggccaacctggtggtgcaccagagaacccacaccggcgagaagccctacgagtgctgcgagtgcgccaaggccttcagccagaagagcaccctgatcgcccaccagagaacccacaccggcgagaagccctacgagtgcagcgagtgcggcaagaccttcatccagaagagcaccctgatcaagcaccagagaacccacaccggcgagaagcccttcgtgtgcgacaagtgccccaaggccttcaagagcagctaccacctgatcagacacgagaagacccacatcagacaggccttctacaagggcatcaagtgcaccaccagcagcctgatctaccagagaatccacaccagcgagaagccccagtgcagcgagcacggcaaggccagcgacgagaagcccagccccaccaagcactggagaacccacaccaaggagaacatctacgagtgcagcaagtgcggcaagagcttcagaggcaagagccacctgagcgtgcaccagagaatccacaccggcgagaagccctacgagtgcagcatctgcggcaagaccttcagcggcaagagccacctgagcgtgcaccacagaacccacaccggcgagaagccctacgagtgcagaagatgcggcaaggccttcggcgagaagagcaccctgatcgtgcaccagagaatgcacaccggcgagaagccctacaagtgcaacgagtgcggcaaggccttcagcgagaagagccccctgatcaagcaccagagaatccacaccggcgagagaccctacgagtgcaccgactgcaagaaggccttcagcagaaagagcaccctgatcaagcaccagagaatccacaccggcgagaagccctacaagtgcagcgagtgcggcaaggccttcagcgtgaagagcaccctgatcgtgcaccacagaacccacaccggcgagaagccctacgagtgcagagactgcggcaaggccttcagcggcaagagcaccctgatcaagcaccagagaagccacaccggcgacaagaacctgtag

SEQ ID NO: 106178 - DNA, 3714 bp, synthetic construct
  misc_feature 1..3714: note = Description of Artificial Sequence: Synthetic coding sequence
  source 1..3714: mol_type = other DNA
atgggcgacatgaagacccccgacttcgacgacctgctggccgccttcgacatccccgacatcgacgccaacgaggccatccacagcggccccgaggagaacgagggccccggcggccccggcaagcccgagcccggcgtgggcagcgagagcgaggacaccgccgccgccagcgccggcgacggccccggcgtgcccgcccaggccagcgaccacggcctgcccccccccgacatcagcgtggtgagcgtgatcgtgaagaacaccgtgtgccccgagcagagcgaggccctggccggcggcagcgccggcgacggcgcccaggccgccggcgtgaccaaggagggccccgtgggcccccacagaatgcagaacggcttcggcagccccgagcccagcctgcccggcaccccccacagccccgccccccccagcggcggcacctggaaggagaagggcatggagggcaagacccccctggacctgttcgcccacttcggccccgagcccggcgaccacagcgaccccctgccccccagcgcccccagccccaccagagagggcgccctgacccccccccccttccccagcagcttcgagctggcccaggagaacggccccggcatgcagccccccgtgagcagcccccccctgggcgccctgaagcaggagagctgcagcccccaccacccccaggtgctggcccagcagggcagcggcagcagccccaaggccaccgacatccccgccagcgccagccccccccccgtggccggcgtgcccttcttcaagcagagccccggccaccagagccccctggccagccccaaggtgcccgtgtgccagcccctgaaggaggaggacgacgacgagggccccgtggacaagagcagccccggcagcccccagagccccagcagcggcgccgaggccgccgacgaggacagcaacgacagccccgccagcagcagcagcagacccctgaaggtgagaatcaagaccatcaagaccagctgcggcaacatcaccagaaccgtgacccaggtgcccagcgaccccgacccccccgcccccctggccgagggcgccttcctggccgaggccagcctgctgaagctgagccccgccacccccaccagcgagggccccaaggtggtgagcgtgcagctgggcgacggcaccagactgaagggcaccgtgctgcccgtggccaccatccagaacgccagcaccgccatgctgatggccgccagcgtggccagaaaggccgtggtgctgcccggcggcaccgccaccagccccaagatgatcgccaagaacgtgctgggcctggtgccccaggccctgcccaaggccgacggcagagccggcctgggcaccggcggccagaaggtgaacggcgccagcgtggtgatggtgcagcccagcaagaccgccaccggccccagcaccggcggcggcaccgtgatcagcagaacccagagcagcctggtggaggccttcaacaagatcctgaacagcaagaacctgctgcccgcctacagacccaacctgagcccccccgccgaggccggcctggccctgccccccaccggctacagatgcctggagtgcggcgacgccttcagcctggagaagagcctggccagacactacgacagaagaagcatgagaatcgaggtgacctgcaaccactgcgccagaagactggtgttcttcaacaagtgcagcctgctgctgcacgccagagagcacaaggacaagggcctggtgatgcagtgcagccacctggtgatgagacccgtggccctggaccagatggtgggccagcccgacatcacccccctgctgcccgtggccgtgccccccgtgagcggccccctggccctgcccgccctgggcaagggcgagggcgccatcaccagcagcgccatcaccaccgtggccgccgaggcccccgtgctgcccctgagcaccgagccccccgccgcccccgccaccagcgcctacacctgcttcagatgcctggagtgcaaggagcagtgcagagacaaggccggcatggccgcccacttccagcagctgggcccccccgcccccggcgccaccagcaacgtgtgccccacctgccccatgatgctgcccaacagatgcagcttcagcgcccaccagagaatgcacaagaacagacccccccacgtgtgccccgagtgcggcggcaacttcctgcaggccaacttccagacccacctgagagaggcctgcctgcacgtgagcagaagagtgggctacagatgccccagctgcagcgtggtgttcggcggcgtgaacagcatcaagagccacatccagaccagccactgcgaggtgttccacaagtgccccatctgccccatggccttcaagagcggccccagcgcccacgcccacctgtacagccagcaccccagcttccagacccagcaggccaagctgatctacaagtgcgccatgtgcgacaccgtgttcacccacaagcccctgctgagcagccacttcgaccagcacctgctgccccagagagtgagcgtgttcaagtgccccagctgccccctgctgttcgcccagaagagaaccatgctggagcacctgaagaacacccaccagagcggcagactggaggagaccgccggcaagggcgccggcggcgccctgctgacccccaagaccgagcccgaggagctggccgtgagccagggcggcgccgcccccgccaccgaggagagcagcagcagcagcgaggaggaggaggtgcccagcagccccgagccccccagacccgccaagagacccagaagagagctgggcagcaagggcctgaagggcggcggcggcggccccggcggctggacctgcggcctgtgccacagctggttccccgagagagacgagtacgtggcccacatgaagaaggagcacggcaagagcgtgaagaagttcccctgcagactgtgcgagagaagcttctgcagcgcccccagcctgagaagacacgtgagagtgaaccacgagggcatcaagagagtgtacccctgcagatactgcaccgagggcaagagaaccttcagcagcagactgatcctggagaagcacgtgcaggtgagacacggcctgcagctgggcgcccagagccccggcagaggcaccaccctggccagaggcagcagcgccagagcccagggccccggcagaaagagaagacagagcagcgacagctgcagcgaggagcccgacagcaccaccccccccgccaagagccccagaggcggccccggcagcggcggccacggccccctgagatacagaagcagcagcagcaccgagcagagcctgatgatgggcctgagagtggaggacggcgcccagcagtgcctggactgcggcctgtgcttcgccagccccggcagcctgagcagacacagattcatcagccacaagaagagaagaggcgtgggcaaggccagcgccctgggcctgggcgacggcgaggaggaggccccccccagcagaagcgaccccgacggcggcgacagccccctgcccgccagcggcggccccctgacctgcaaggtgtgcggcaagagctgcgacagccccctgaacctgaagacccacttcagaacccacggcatggccttcatcagagccagacagggcgccgtgggcgacaactag

SEQ ID NO: 106179 - DNA, 3714 bp, synthetic construct; identical to SEQ ID NO: 106178
  misc_feature 1..3714: note = Description of Artificial Sequence: Synthetic coding sequence
  source 1..3714: mol_type = other DNA

SEQ ID NO: 106180 - DNA, 3312 bp, synthetic construct
  misc_feature 1..3312: note = Description of Artificial Sequence: Synthetic coding sequence
  source 1..3312: mol_type = other DNA
atgggcgacatgaagacccccgacttcgacgacctgctggccgccttcgacatccccgacatcgacgccaacgaggccatccacagcggccccgaggagaacgagggccccggcggccccggcaagcccgagcccggcgtgggcagcgagagcgaggacaccgccgccgccagcgccggcgacggccccggcgtgcccgcccaggccagcgaccacggcctgcccccccccgacatcagcgtggtgagcgtgatcgtgaagaacaccgtgtgccccgagcagagcgaggccctggccggcggcagcgccggcgacggcgcccaggccgccggcgtgaccaaggagggccccgtgggcccccacagaatgcagaacggcttcggcagccccgagcccagcctgcccggcaccccccacagccccgccccccccagcggcggcacctggaaggagaagggcatggagggcaagacccccctggacctgttcgcccacttcggccccgagcccggcgaccacagcgaccccctgccccccagcgcccccagccccaccagagagggcgccctgacccccccccccttccccagcagcttcgagctggcccaggagaacggccccggcatgcagccccccgtgagcagcccccccctgggcgccctgaagcaggagagctgcagcccccaccacccccaggtgctggcccagcagggcagcggcagcagccccaaggccaccgacatccccgccagcgccagccccccccccgtggccggcgtgcccttcttcaagcagagccccggccaccagagccccctggccagccccaaggtgcccgtgtgccagcccctgaaggaggaggacgacgacgagggccccgtggacaagagcagccccggcagcccccagagccccagcagcggcgccgaggccgccgacgaggacagcaacgacagccccgccagcagcagcagcagacccctgaaggtgagaatcaagaccatcaagaccagctgcggcaacatcaccagaaccgtgacccaggtgcccagcgaccccgacccccccgcccccctggccgagggcgccttcctggccgaggccagcctgctgaagctgagccccgccacccccaccagcgagggccccaaggtggtgagcgtgcagctgggcgacggcaccagactgaagggcaccgtgctgcccgtggccaccatccagaacgccagcaccgccatgctgatggccgccagcgtggccagaaaggccgtggtgctgcccggcggcaccgccaccagccccaagatgatcgccaagaacgtgctgggcctggtgccccaggccctgcccaaggccgacggcagagccggcctgggcaccggcggccagaaggtgaacggcgccagcgtggtgatggtgcagcccagcaagaccgccaccggccccagcaccggcggcggcaccgtgatcagcagaacccagagcagcctggtggaggccttcaacaagatcctgaacagcaagaacctgctgcccgcctacagacccaacctgagcccccccgccgaggccggcctggccctgccccccaccggctacagatgcctggagtgcggcgacgccttcagcctggagaagagcctggccagacactacgacagaagaagcatgagaatcgaggtgacctgcaaccactgcgccagaagactggtgttcttcaacaagtgcagcctgctgctgcacgccagagagcacaaggacaagggcctggtgatgcagtgcagccacctggtgatgagacccgtggccctggaccagatggtgggccagcccgacatcacccccctgctgcccgtggccgtgccccccgtgagcggccccctggccctgcccgccctgggcaagggcgagggcgccatcaccagcagcgccatcaccaccgtggccgccgaggcccccgtgctgcccctgagcaccgagccccccgccgcccccgccaccagcgcctacacctgcttcagatgcctggagtgcaaggagcagtgcagagacaaggccggcatggccgcccacttccagcagctgggcccccccgcccccggcgccaccagcaacgtgtgccccacctgccccatgatgctgcccaacagatgcagcttcagcgcccaccagagaatgcacaagaacagacccccccacgtgtgccccgagtgcggcggcaacttcctgcaggccaacttccagacccacctgagagaggcctgcctgcacgtgagcagaagagtgggctacagatgccccagctgcagcgtggtgttcggcggcgtgaacagcatcaagagccacatccagaccagccactgcgaggtgttccacaagtgccccatctgccccatggccttcaagagcggccccagcgcccacgcccacctgtacagccagcaccccagcttccagacccagcaggccaagctgatctacaagtgcgccatgtgcgacaccgtgttcacccacaagcccctgctgagcagccacttcgaccagcacctgctgccccagagagtgagcgtgttcaagtgccccagctgccccctgctgttcgcccagaagagaaccatgctggagcacctgaagaacacccaccagagcggcagactggaggagaccgccggcaagggcgccggcggcgccctgctgacccccaagaccgagcccgaggagctggccgtgagccagggcggcgccgcccccgccaccgaggagagcagcagcagcagcgaggaggaggaggtgcccagcagccccgagccccccagacccgccaagagacccagaagagagctgggcagcaagggcctgaagggcggcggcggcggccccggcggctggacctgcggcctgtgccacagctggttccccgagagagacgagtacgtggcccacatgaagaaggagcacggcaagagcgtgaagaagttcccctgcagactgtgcgagagaagcttctgcagcgcccccagcctgagaagacacgtgagagtgaaccacgagggcatcaagagagtgtacccctgcagaagcaagggccccggcctgagagccgtgcccctgctgcccagctgccccctgcccttccaggtgctgcacagaggcaagacccacctgcagcagccccccgaccccagagagacctgccccggccccgccagactggccgcctggggccccgtgccctggcccggcgaccacctgggcagcggcttccagtgccagagccccggcgccagaagcgagaccccccccgtgttctag

SEQ ID NO: 106181 - DNA, 2121 bp, synthetic construct
  misc_feature 1..2121: note = Description of Artificial Sequence: Synthetic coding sequence
  source 1..2121: mol_type = other DNA
tgaaccgtgctgcccgtggccaccatccagaacgccagcaccgccatgctgatggccgccagcgtggccagaaaggccgtggtgctgcccggcggcaccgccaccagccccaagatgatcgccaagaacgtgctgggcctggtgccccaggccctgcccaaggccgacggcagagccggcctgggcaccggcggccagaaggtgaacggcgccagcgtggtgatggtgcagcccagcaagaccgccaccggccccagcaccggcggcggcaccgtgatcagcagaacccagagcagcctggtggaggccttcaacaagatcctgaacagcaagaacctgctgcccgcctacagacccaacctgagcccccccgccgaggccggcctggccctgccccccaccggctacagatgcctggagtgcggcgacgccttcagcctggagaagagcctggccagacactacgacagaagaagcatgagaatcgaggtgacctgcaaccactgcgccagaagactggtgttcttcaacaagtgcagcctgctgctgcacgccagagagcacaaggacaagggcctggtgatgcagtgcagccacctggtgatgagacccgtggccctggaccagatggtgggccagcccgacatcacccccctgctgcccgtggccgtgccccccgtgagcggccccctggccctgcccgccctgggcaagggcgagggcgccatcaccagcagcgccatcaccaccgtggccgccgaggcccccgtgctgcccctgagcaccgagccccccgccgcccccgccaccagcgcctacacctgcttcagatgcctggagtgcaaggagcagtgcagagacaaggccggcatggccgcccacttccagcagctgggcccccccgcccccggcgccaccagcaacgtgtgccccacctgccccatgatgctgcccaacagatgcagcttcagcgcccaccagagaatgcacaagaacagacccccccacgtgtgccccgagtgcggcggcaacttcctgcaggccaacttccagacccacctgagagaggcctgcctgcacgtgagcagaagagtgggctacagatgccccagctgcagcgtggtgttcggcggcgtgaacagcatcaagagccacatccagaccagccactgcgaggtgttccacaagtgccccatctgccccatggccttcaagagcggccccagcgcccacgcccacctgtacagccagcaccccagcttccagacccagcaggccaagctgatctacaagtgcgccatgtgcgacaccgtgttcacccacaagcccctgctgagcagccacttcgaccagcacctgctgccccagagagtgagcgtgttcaagtgccccagctgccccctgctgttcgcccagaagagaaccatgctggagcacctgaagaacacccaccagagcggcagactggaggagaccgccggcaagggcgccggcggcgccctgctgacccccaagaccgagcccgaggagctggccgtgagccagggcggcgccgcccccgccaccgaggagagcagcagcagcagcgaggaggaggaggtgcccagcagccccgagccccccagacccgccaagagacccagaagagagctgggcagcaagggcctgaagggcggcggcggcggccccggcggctggacctgcggcctgtgccacagctggttccccgagagagacgagtacgtggcccacatgaagaaggagcacggcaagagcgtgaagaagttcccctgcagactgtgcgagagaagcttctgcagcgcccccagcctgagaagacacgtgagagtgaaccacgagggcatcaagagagtgtacccctgcagaagcaagggccccggcctgagagccgtgcccctgctgcccagctgccccctgcccttccaggtgctgcacagaggcaagacccacctgcagcagccccccgaccccagagagacctgccccggccccgccagactggccgcctggggccccgtgccctggcccggcgaccacctgggcagcggcttccagtgccagagccccggcgccagaagcgagaccccccccgtgttctag

SEQ ID NO: 106182 - DNA, 450 bp, synthetic construct
  misc_feature 1..450: note = Description of Artificial Sequence: Synthetic coding sequence
  source 1..450: mol_type = other DNA
atgccctgctgcagccacagaagatgcagagaggaccccggcaccagcgagagccaggagatggaggagtgggccctgctggacatcagccagagaaagctgtacaaggaggtgatgctggagaccttcagaaacctgaccagcgtgggcaagagctggaaggaccagaacatcgagtacgagtaccagaaccccagaagaaacttcagaagcctgatcgagaagaaggtgaacgagatcaaggacgacagccactgcggcgagaccttcacccaggtgcccgacgacagactgaacttccaggagaagaaggccagccccgagatcaagagctgcgacagcttcgtgtgcggcgaggtgggcctgggcaacagcagcttcaacatgaacatcagaggcgacatcggccacaaggcctacgagtaccaggagtacggccccaagccctag

SEQ ID NO: 106183 - DNA, 1701 bp, synthetic construct
  misc_feature 1..1701: note = Description of Artificial Sequence: Synthetic coding sequence
  source 1..1701: mol_type = other DNA
atgccctgctgcagccacagaagatgcagagaggaccccggcaccagcgagagccaggagatggaccccgtggccttcgacgacgtggccgtgaacttcacccaggaggagtgggccctgctggacatcagccagagaaagctgtacaaggaggtgatgctggagaccttcagaaacctgaccagcgtgggcaagagctggaaggaccagaacatcgagtacgagtaccagaaccccagaagaaacttcagaagcctgatcgagaagaaggtgaacgagatcaaggacgacagccactgcggcgagaccttcacccaggtgcccgacgacagactgaacttccaggagaagaaggccagccccgagatcaagagctgcgacagcttcgtgtgcggcgaggtgggcctgggcaacagcagcttcaacatgaacatcagaggcgacatcggccacaaggcctacgagtaccaggagtacggccccaagccctgcaagtgccagcagcccaagaaggccttcagataccaccccagcttcagaaccccccagagagaccacaccggcgagaagccctacgcctgcaaggagtgcggcaagaccttcatcagccacagcagcatccagagacacgtggtgatgcacagcggcgacggcccctacaagtgcaagttctgcggcaaggccttccactgcctgagcctgtacctgatccacgagagaatccacaccggcgagaagccctacgagtgcaagcagtgcggcaagagcttcagctacagcgccaccctgagaatccacgagagaacccacaccggcgagaagccctacgagtgccagcagtgcggcaaggccttccacagccccagatgctacagaagacacgagagaatccacaccggcgagaaggcctaccagtgcaaggagtgcggcaaggccttcacctgcccccagtacgtgagaatccacgagagaacccacagcagaaagaagccctacgagtgcacccagtgcggcaaggccctgagcagcctgaccagcttccagacccacatcagaatgcacagcggcgagagaccctacgagtgcaagatctgcggcaagggcttctgcagcgccaacagcttccagagacacgagaagacccacagcggcgagaagccctacaagtgcaagcagtgcggcaaggccttcatccacagcagcagcctgagataccacgagagaatccacaccggcgagaagccctacgagtgcaagcagtgcggcaaggccttcagaagcagcagccacctgcagctgcacggcagaacccacaccggcgagaagccctacgagtgccaggagtgcggcaaggccttcagaagcatgaagaacctgcagagccacgagagaacccagacccacgtgagaatccacagcggcgagagaccctacaagtgcaagctgtgcggcaagggcttctactgccccaagagcctgcagagacacgagaagacccacaccggcgagaagctgtacgagtgcaagcagtgcggcgaggccttcagcagcagcagcagcttcagataccacgagagaacccacaccggcgagaagccctacaagtgcaagcagtgcggcaaggccttcagagccgccagcgtgctgagaatgcacggcagaacccaccccgaggacaagccctacgagtgcaagcagtag

SEQ ID NO: 106184 - DNA, 2061 bp, synthetic construct
  misc_feature 1..2061: note = Description of Artificial Sequence: Synthetic coding sequence
  source 1..2061: mol_type = other DNA
atggaggtggtgaccttcggcgacgtggccgtgcacttcagcagagaggagtggcagtgcctggaccccggccagagagccctgtacagagaggtgatgctggagaaccacagcagcgtggccggcctggccggcttcctggtgttcaagcccgagctgatcagcagactggagcagggcgaggagccctgggtgctggacctgcagggcgccgagggcaccgaggcccccagaaccagcaagaccgacagcaccatcagaaccgagaacgagcaggcctgcgaggacatggacatcctgaagagcgagagctacggcaccgtggtgagaatcagcccccaggacttcccccagaaccccggcttcggcgacgtgagcgacagcgaggtgtggctggacagccacctgggcagccccggcctgaaggtgaccggcttcaccttccagaacaactgcctgaacgaggagaccgtggtgcccaagaccttcaccaaggacgccccccagggctgcaaggagctgggcagcagcggcctggactgccagcccctggagagccagggcgagagcgccgagggcatgagccagagatgcgaggagtgcggcaagggcatcagagccaccagcgacatcgccctgcactgggagatcaacacccagaagatcagcagatgccaggagtgccagaagaagctgagcgactgcctgcagggcaagcacaccaacaactgccacggcgagaagccctacgagtgcgccgagtgcggcaaggtgttcagactgtgcagccagctgaaccagcaccagagaatccacaccggcgagaagcccttcaagtgcaccgagtgcggcaaggccttcagactgagcagcaagctgatccagcaccagagaatccacaccggcgagaagccctacagatgcgaggagtgcggcaaggccttcggccagagcagcagcctgatccaccaccagagaatccacaccggcgagagaccctacggctgcagagagtgcggcaaggccttcagccagcagagccagctggtgagacaccagagaacccacaccggcgagagaccctacccctgcaaggagtgcggcaaggccttcagccagagcagcaccctggcccagcaccagagaatgcacaccggcgagaaggcccagatcctgaaggccagcgacagccccagcctggtggcccaccagagaatccacgccgtggagaagcccttcaagtgcgacgagtgcggcaaggccttcagatggatcagcagactgagccagcaccagctgatccacaccggcgagaagccctacaagtgcaacaagtgcaccaaggccttcggctgcagcagcagactgatcagacaccagagaacccacaccggcgagaagcccttcaagtgcgacgagtgcggcaagggcttcgtgcagggcagccacctgatccagcaccagagaatccacaccggcgagaagccctacgtgtgcaacgactgcggcaaggccttcagccagagcagcagcctgatctaccaccagagaatccacaagggcgagaagccctacgagtgcctgcagtgcggcaaggccttcagcatgagcacccagctgaccatccaccagagagtgcacaccggcgagagaccctacaagtgcaacgagtgcggcaaggccttcagccagaacagcaccctgttccagcaccagatcatccacgccggcgtgaagccctacgagtgcagcgagtgcggcaaggccttcagcagaagcagctacctgatcgagcaccagagaatccacaccagagcccagtggttctacgagtacggcaacgccctggagggcagcaccttcgtgagcagaaagaaggtgaacaccatcaagaagctgcaccagtgcgaggactgcgagaagatcttcagatggagaagccacctgatcatccaccagagaatccacaccggcgagaagccctacaagtgcaacgactgcggcaaggccttcaacagaagcagcagactgacccagcaccagaagatccacatgggctag

SEQ ID NO: 106185 - DNA, 2094 bp, synthetic construct
  misc_feature 1..2094: note = Description of Artificial Sequence: Synthetic coding sequence
  source 1..2094: mol_type = other DNA
atgggcttcctgggctgctggtgcgtgagcttccaggaggtggtgaccttcggcgacgtggccgtgcacttcagcagagaggagtggcagtgcctggaccccggccagagagccctgtacagagaggtgatgctggagaaccacagcagcgtggccggcctggccggcttcctggtgttcaagcccgagctgatcagcagactggagcagggcgaggagccctgggtgctggacctgcagggcgccgagggcaccgaggcccccagaaccagcaagaccgacagcaccatcagaaccgagaacgagcaggcctgcgaggacatggacatcctgaagagcgagagctacggcaccgtggtgagaatcagcccccaggacttcccccagaaccccggcttcggcgacgtgagcgacagcgaggtgtggctggacagccacctgggcagccccggcctgaaggtgaccggcttcaccttccagaacaactgcctgaacgaggagaccgtggtgcccaagaccttcaccaaggacgccccccagggctgcaaggagctgggcagcagcggcctggactgccagcccctggagagccagggcgagagcgccgagggcatgagccagagatgcgaggagtgcggcaagggcatcagagccaccagcgacatcgccctgcactgggagatcaacacccagaagatcagcagatgccaggagtgccagaagaagctgagcgactgcctgcagggcaagcacaccaacaactgccacggcgagaagccctacgagtgcgccgagtgcggcaaggtgttcagactgtgcagccagctgaaccagcaccagagaatccacaccggcgagaagcccttcaagtgcaccgagtgcggcaaggccttcagactgagcagcaagctgatccagcaccagagaatccacaccggcgagaagccctacagatgcgaggagtgcggcaaggccttcggccagagcagcagcctgatccaccaccagagaatccacaccggcgagagaccctacggctgcagagagtgcggcaaggccttcagccagcagagccagctggtgagacaccagagaacccacaccggcgagagaccctacccctgcaaggagtgcggcaaggccttcagccagagcagcaccctggcccagcaccagagaatgcacaccggcgagaaggcccagatcctgaaggccagcgacagccccagcctggtggcccaccagagaatccacgccgtggagaagcccttcaagtgcgacgagtgcggcaaggccttcagatggatcagcagactgagccagcaccagctgatccacaccggcgagaagccctacaagtgcaacaagtgcaccaaggccttcggctgcagcagcagactgatcagacaccagagaacccacaccggcgagaagcccttcaagtgcgacgagtgcggcaagggcttcgtgcagggcagccacctgatccagcaccagagaatccacaccggcgagaagccctacgtgtgcaacgactgcggcaaggccttcagccagagcagcagcctgatctaccaccagagaatccacaagggcgagaagccctacgagtgcctgcagtgcggcaaggccttcagcatgagcacccagctgaccatccaccagagagtgcacaccggcgagagaccctacaagtgcaacgagtgcggcaaggccttcagccagaacagcaccctgttccagcaccagatcatccacgccggcgtgaagccctacgagtgcagcgagtgcggcaaggccttcagcagaagcagctacctgatcgagcaccagagaatccacaccagagcccagtggttctacgagtacggcaacgccctggagggcagcaccttcgtgagcagaaagaaggtgaacaccatcaagaagctgcaccagtgcgaggactgcgagaagatcttcagatggagaagccacctgatcatccaccagagaatccacaccggcgagaagccctacaagtgcaacgactgcggcaaggccttcaacagaagcagcagactgacccagcaccagaagatccacatgggctag

SEQ ID NO: 106186 - DNA, 447 bp, synthetic construct
  misc_feature 1..447: note = Description of Artificial Sequence: Synthetic coding sequence
  source 1..447: mol_type = other DNA
atggaggtggtgaccttcggcgacgtggccgtgcacttcagcagagaggagtggcagtgcctggaccccggccagagagccctgtacagagaggtgatgctggagaaccacagcagcgtggccggcctggccggcttcctggtgttcaagcccgagctgatcagcagactggagcagggcgaggagccctgggtgctggacctgcagggcgccgagggcaccgaggcccccagaaccagcaagaccggcttcctgggcagacccaccatgggccaggagcccagacacccccacgccccccccgccacccccgtgcccggcctgcccaagcactgcagccagagactgaccctgcccccccccggcctgagcagcagccccctgggccacttcctggtgcacgaccaggacagaagaagaggcaccagcgccatctggatggtgtag

SEQ ID NO: 106187 - DNA, 2061 bp, synthetic construct; identical to SEQ ID NO: 106184
  misc_feature 1..2061: note = Description of Artificial Sequence: Synthetic coding sequence
  source 1..2061: mol_type = other DNA

SEQ ID NO: 106188 - DNA, 1773 bp, synthetic construct
  misc_feature 1..1773: note = Description of Artificial Sequence: Synthetic coding sequence
  source 1..1773: mol_type = other DNA
atggacatcctgaagagcgagagctacggcaccgtggtgagaatcagcccccaggacttcccccagaaccccggcttcggcgacgtgagcgacagcgaggtgtggctggacagccacctgggcagccccggcctgaaggtgaccggcttcaccttccagaacaactgcctgaacgaggagaccgtggtgcccaagaccttcaccaaggacgccccccagggctgcaaggagctgggcagcagcggcctggactgccagcccctggagagccagggcgagagcgccgagggcatgagccagagatgcgaggagtgcggcaagggcatcagagccaccagcgacatcgccctgcactgggagatcaacacccagaagatcagcagatgccaggagtgccagaagaagctgagcgactgcctgcagggcaagcacaccaacaactgccacggcgagaagccctacgagtgcgccgagtgcggcaaggtgttcagactgtgcagccagctgaaccagcaccagagaatccacaccggcgagaagcccttcaagtgcaccgagtgcggcaaggccttcagactgagcagcaagctgatccagcaccagagaatccacaccggcgagaagccctacagatgcgaggagtgcggcaaggccttcggccagagcagcagcctgatccaccaccagagaatccacaccggcgagagaccctacggctgcagagagtgcggcaaggccttcagccagcagagccagctggtgagacaccagagaacccacaccggcgagagaccctacccctgcaaggagtgcggcaaggccttcagccagagcagcaccctggcccagcaccagagaatgcacaccggcgagaaggcccagatcctgaaggccagcgacagccccagcctggtggcccaccagagaatccacgccgtggagaagcccttcaagtgcgacgagtgcggcaaggccttcagatggatcagcagactgagccagcaccagctgatccacaccggcgagaagccctacaagtgcaacaagtgcaccaaggccttcggctgcagcagcagactgatcagacaccagagaacccacaccggcgagaagcccttcaagtgcgacgagtgcggcaagggcttcgtgcagggcagccacctgatccagcaccagagaatccacaccggcgagaagccctacgtgtgcaacgactgcggcaaggccttcagccagagcagcagcctgatctaccaccagagaatccacaagggcgagaagccctacgagtgcctgcagtgcggcaaggccttcagcatgagcacccagctgaccatccaccagagagtgcacaccggcgagagaccctacaagtgcaacgagtgcggcaaggccttcagccagaacagcaccctgttccagcaccagatcatccacgccggcgtgaagccctacgagtgcagcgagtgcggcaaggccttcagcagaagcagctacctgatcgagcaccagagaatccacaccagagcccagtggttctacgagtacggcaacgccctggagggcagcaccttcgtgagcagaaagaaggtgaacaccatcaagaagctgcaccagtgcgaggactgcgagaagatcttcagatggagaagccacctgatcatccaccagagaatccacaccggcgagaagccctacaagtgcaacgactgcggcaaggccttcaacagaagcagcagactgacccagcaccagaagatccacatgggctag

SEQ ID NO: 106189 - DNA, 1470 bp, synthetic construct
  misc_feature 1..1470: note = Description of Artificial Sequence: Synthetic coding sequence
  source 1..1470: mol_type = other DNA
atgaaggagctggaccccaagaacgacatcagcgaggacaagctgagcgtggtgggcgaggccaccggcggccccaccagaaacggcgccagaggccccggcagcgagggcgtgtgggagcccggcagctggcccgagagacccagaggcgacgccggcgccgagtgggagcccctgggcatcccccagggcaacaagctgctgggcggcagcgtgcccgcctgccacgagctgaaggccttcgccaaccagggctgcgtgctggtgccccccagactggacgaccccaccgagaagggcgcctgcccccccgtgagaagaggcaagaacttcagcagcaccagcgacctgagcaagccccccatgccctgcgaggagaagaagacctacgactgcagcgagtgcggcaaggccttcagcagaagcagcagcctgatcaagcaccagagaatccacaccggcgagaagcccttcgagtgcgacacctgcggcaagcacttcatcgagagaagcagcctgaccatccaccagagagtgcacaccggcgagaagccctacgcctgcggcgactgcggcaaggccttcagccagagaatgaacctgaccgtgcaccagagaacccacaccggcgagaagccctacgtgtgcgacgtgtgcggcaaggccttcagaaagaccagcagcctgacccagcacgagagaatccacaccggcgagaagccctacgcctgcggcgactgcggcaaggccttcagccagaacatgcacctgatcgtgcaccagagaacccacaccggcgagaagccctacgtgtgccccgagtgcggcagagccttcagccagaacatgcacctgaccgagcaccagagaacccacaccggcgagaagccctacgcctgcaaggagtgcggcaaggccttcaacaagagcagcagcctgaccctgcaccagagaaaccacaccggcgagaagccctacgtgtgcggcgagtgcggcaaggccttcagccagagcagctacctgatccagcaccagagattccacatcggcgtgaagcccttcgagtgcagcgagtgcggcaaggccttcagcaagaacagcagcctgacccagcaccagagaatccacaccggcgagaagccctacgagtgctacatctgcaagaagcacttcaccggcagaagcagcctgatcgtgcaccagatcgtgcacaccggcgagaagccctacgtgtgcggcgagtgcggcaaggccttcagccagagcgcctacctgatcgagcaccagagaatccacaccggcgagaagccctacagatgcggccagtgcggcaagagcttcatcaagaacagcagcctgaccgtgcaccagagaatccacaccggcgagaagccctacagatgcggcgagtgcggcaagaccttcagcagaaacaccaacctgaccagacacctgagaatccacacctag

SEQ ID NO: 106190 - DNA, 2286 bp, synthetic construct
  misc_feature 1..2286: note = Description of Artificial Sequence: Synthetic coding sequence
  source 1..2286: mol_type = other DNA
atggacagcggcggcggcagcctgggcctgcacacccccgacagcagaatggcccacaccatgatcatgcaggacttcgtggccggcatggccggcaccgcccacatcgacggcgaccacatcgtggtgagcgtgcccgaggccgtgctggtgagcgacgtggtgaccgacgacggcatcaccctggaccacggcctggccgccgaggtggtgcacggccccgacatcatcaccgagaccgacgtggtgaccgagggcgtgatcgtgcccgaggccgtgctggaggccgacgtggccatcgaggaggacctggaggaggacgacggcgaccacatcctgaccagcgagctgatcaccgagaccgtgagagtgcccgagcaggtgttcgtggccgacctggtgaccggccccaacggccacctggagcacgtggtgcaggactgcgtgagcggcgtggacagccccaccatggtgagcgaggaggtgctggtgaccaacagcgacaccgagaccgtgatccaggccgccggcggcgtgcccggcagcaccgtgaccatcaagaccgaggacgacgacgacgacgacgtgaagagcaccagcgaggactacctgatgatcagcctggacgacgtgggcgagaagctggagcacatgggcaacacccccctgaagatcggcagcgacggcagccaggaggacgccaaggaggacggcttcggcagcgaggtgatcaaggtgtacatcttcaaggccgaggccgaggacgacgtggagatcggcggcaccgagatcgtgaccgagagcgagtacaccagcggccacagcgtggccggcgtgctggaccagagcagaatgcagagagagaagatggtgtacatggccgtgaaggacagcagccaggaggaggacgacatcagagacgagagaagagtgagcagaagatacgaggactgccaggccagcggcaacaccctggacagcgccctggagagcagaagcagcaccgccgcccagtacctgcagatctgcgacggcatcaacaccaacaaggtgctgaagcagaaggccaagaagagaagaagaggcgagaccagacagtggcagaccgccgtgatcatcggccccgacggccagcccctgaccgtgtacccctgccacatctgcaccaagaagttcaagagcagaggcttcctgaagagacacatgaagaaccaccccgaccacctgatgagaaagaagtaccagtgcaccgactgcgacttcaccaccaacaagaaggtgagcttccacaaccacctggagagccacaagctgatcaacaaggtggacaagacccacgagttcaccgagtacaccagaagatacagagaggccagccccctgagcagcaacaagctgatcctgagagacaaggagcccaagatgcacaagtgcaagtactgcgactacgagaccgccgagcagggcctgctgaacagacacctgctggccgtgcacagcaagaacttcccccacgtgtgcgtggagtgcggcaagggcttcagacaccccagcgagctgaagaagcacatgagaacccacaccggcgagaagccctaccagtgccagtactgcatcttcagatgcgccgaccagagcaacctgaagacccacatcaagagcaagcacggcaacaacctgccctacaagtgcgagcactgcccccaggccttcggcgacgagagagagctgcagagacacctggacctgttccagggccacaagacccaccagtgcccccactgcgaccacaagagcaccaacagcagcgacctgaagagacacatcatcagcgtgcacaccaaggacttcccccacaagtgcgaggtgtgcgacaagggcttccacagacccagcgagctgaagaagcacagcgacatccacaagggcagaaagatccaccagtgcagacactgcgacttcaagaccagcgaccccttcatcctgagcggccacatcctgagcgtgcacaccaaggaccagcccctgaagtgcaagagatgcaagagaggcttcagacagcagaacgagctgaagaagcacatgaagacccacaccggcagaaagatctaccagtgcgagtactgcgagtacagcaccaccgacgccagcggcttcaagagacacgtgatcagcatccacaccaaggactacccccacagatgcgagttctgcaagaagggcttcagaagacccagcgagaagaaccagcacatcatgagacaccacaaggaggccctgatgtag

SEQ ID NO: 106191 - DNA, 2286 bp, synthetic construct; identical to SEQ ID NO: 106190
  misc_feature 1..2286: note = Description of Artificial Sequence: Synthetic coding sequence
  source 1..2286: mol_type = other DNA

SEQ ID NO: 106192 - DNA, 2310 bp, synthetic construct
  misc_feature 1..2310: note = Description of Artificial Sequence: Synthetic coding sequence
  source 1..2310: mol_type = other DNA
atgcaggacttcgtggccggcatggccggcaccgcccacatcgacggcgaccacatcgtggtgagcgtgcccgaggccgtgctggtgagcgacgtggtgaccgacgacggcatcaccctggaccacggcctggccgccgaggtggtgcacggccccgacatcatcaccgagaccgacgtggtgaccgagggcgtgatcgtgcccgaggccgtgctggaggccgacgtggccatcgaggaggacctggaggaggacgacggcgaccacatcctgaccagcgagctgatcaccgagaccgtgagagtgcccgagcaggtgttcgtggccgacctggtgaccggccccaacggccacctggagcacgtggtgcaggactgcgtgagcggcgtggacagccccaccatggtgagcgaggaggtgctggtgaccaacagcgacaccgagaccgtgatccaggccgccggcggcgtgcccggcagcaccgtgaccatcaagaccgaggacgacgacgacgacgacgtgaagagcaccagcgaggactacctgatgatcagcctggacgacgtgggcgagaagctggagcacatgggcaacacccccctgaagatcggcagcgacggcagccaggaggacgccaaggaggacggcttcggcagcgaggtgatcaaggtgtacatcttcaaggccgaggccgaggacgacgtggagatcggcggcaccgagatcgtgaccgagagcgagtacaccagcggccacagcgtggccggcgtgctggaccagagcagaatgcagagagagaagatggtgtacatggccgtgaaggacagcagccaggaggaggacgacatcagctgcgccgagatcgccgacgaggtgtacatggaggtgatcgtgggcgaggaggagggcaccagcctgcccgagatccagctggaggacagcgacgtgaacaagaccgtggtgcccgtggtgtgggccgccgcctacggcaacaccctggacagcgccctggagagcagaagcagcaccgccgcccagtacctgcagatctgcgacggcatcaacaccaacaaggtgctgaagcagaaggccaagaagagaagaagaggcgagaccagacagtggcagaccgccgtgatcatcggccccgacggccagcccctgaccgtgtacccctgccacatctgcaccaagaagttcaagagcagaggcttcctgaagagacacatgaagaaccaccccgaccacctgatgagaaagaagtaccagtgcaccgactgcgacttcaccaccaacaagaaggtgagcttccacaaccacctggagagccacaagctgatcaacaaggtggacaagacccacgagttcaccgagtacaccagaagatacagagaggccagccccctgagcagcaacaagctgatcctgagagacaaggagcccaagatgcacaagtgcaagtactgcgactacgagaccgccgagcagggcctgctgaacagacacctgctggccgtgcacagcaagaacttcccccacgtgtgcgtggagtgcggcaagggcttcagacaccccagcgagctgaagaagcacatgagaacccacaccggcgagaagccctaccagtgccagtactgcatcttcagatgcgccgaccagagcaacctgaagacccacatcaagagcaagcacggcaacaacctgccctacaagtgcgagcactgcccccaggccttcggcgacgagagagagctgcagagacacctggacctgttccagggccacaagacccaccagtgcccccactgcgaccacaagagcaccaacagcagcgacctgaagagacacatcatcagcgtgcacaccaaggacttcccccacaagtgcgaggtgtgcgacaagggcttccacagacccagcgagctgaagaagcacagcgacatccacaagggcagaaagatccaccagtgcagacactgcgacttcaagaccagcgaccccttcatcctgagcggccacatcctgagcgtgcacaccaaggaccagcccctgaagtgcaagagatgcaagagaggcttcagacagcagaacgagctgaagaagcacatgaagacccacaccggcagaaagatctaccagtgcgagtactgcgagtacagcaccaccgacgccagcggcttcaagagacacgtgatcagcatccacaccaaggactacccccacagatgcgagttctgcaagaagggcttcagaagacccagcgagaagaaccagcacatcatgagacaccacaaggaggccctgatgtag

SEQ ID NO: 106193 - DNA, 1812 bp, synthetic construct
  misc_feature 1..1812: note = Description of Artificial Sequence: Synthetic coding sequence
  source 1..1812: mol_type = other DNA
atgatcagcctggacgacgtgggcgagaagctggagcacatgggcaacacccccctgaagatcggcagcgacggcagccaggaggacgccaaggaggacggcttcggcagcgaggtgatcaaggtgtacatcttcaaggccgaggccgaggacgacgtggagatcggcggcaccgagatcgtgaccgagagcgagtacaccagcggccacagcgtggccggcgtgctggaccagagcagaatgcagagagagaagatggtgtacatggccgtgaaggacagcagccaggaggaggacgacatcagctgcgccgagatcgccgacgaggtgtacatggaggtgatcgtgggcgaggaggagggcaccagcctgcccgagatccagctggaggacagcgacgtgaacaagaccgtggtgcccgtggtgtgggccgccgcctacggcgacgagagaagagtgagcagaagatacgaggactgccaggccagcggcaacaccctggacagcgccctggagagcagaagcagcaccgccgcccagtacctgcagatctgcgacggcatcaacaccaacaaggtgctgaagcagaaggccaagaagagaagaagaggcgagaccagacagtggcagaccgccgtgatcatcggccccgacggccagcccctgaccgtgtacccctgccacatctgcaccaagaagttcaagagcagaggcttcctgaagagacacatgaagaaccaccccgaccacctgatgagaaagaagtaccagtgcaccgactgcgacttcaccaccaacaagaaggtgagcttccacaaccacctggagagccacaagctgatcaacaaggtggacaagacccacgagttcaccgagtacaccagaagatacagagaggccagccccctgagcagcaacaagctgatcctgagagacaaggagcccaagatgcacaagtgcaagtactgcgactacgagaccgccgagcagggcctgctgaacagacacctgctggccgtgcacagcaagaacttcccccacgtgtgcgtggagtgcggcaagggcttcagacaccccagcgagctgaagaagcacatgagaacccacaccggcgagaagccctaccagtgccagtactgcatcttcagatgcgccgaccagagcaacctgaagacccacatcaagagcaagcacggcaacaacctgccctacaagtgcgagcactgcccccaggccttcggcgacgagagagagctgcagagacacctggacctgttccagggccacaagacccaccagtgcccccactgcgaccacaagagcaccaacagcagcgacctgaagagacacatcatcagcgtgcacaccaaggacttcccccacaagtgcgaggtgtgcgacaagggcttccacagacccagcgagctgaagaagcacagcgacatccacaagggcagaaagatccaccagtgcagacactgcgacttcaagaccagcgaccccttcatcctgagcggccacatcctgagcgtgcacaccaaggaccagcccctgaagtgcaagagatgcaagagaggcttcagacagcagaacgagctgaagaagcacatgaagacccacaccggcagaaagatctaccagtgcgagtactgcgagtacagcaccaccgacgccagcggcttcaagagacacgtgatcagcatccacaccaaggactacccccacagatgcgagttctgcaagaagggcttcagaagacccagcgagaagaaccagcacatcatgagacaccacaaggaggccctgatgtag

SEQ ID NO: 106194 - DNA, 1611 bp, synthetic construct
  misc_feature 1..1611: note = Description of Artificial Sequence: Synthetic coding sequence
  source 1..1611: mol_type = other DNA
atgggccccctgcagttcagagacgtggccatcgagttcagcctggaggagtggcactgcctggacaccgcccagagaaacctgtacagaaacgtgatgctggagaactacagaaacctggtgttcctgggcatcgtggtgagcaagcccgacctgatcacctgcctggagcagggcaagaagcccctgaccatgaagaagcacgagatggtggccaaccccagcgtgacctgcagccacttcgccagagacctgtggcccgagcagagcatcaaggacagcttccagaaggtgaccctgagaagatacgagaactacggccacgacaacctgcagttcaagaagggctgcgagagcgtggacgagtgcaaggtgcacaagagaggctacaacggcctgaaccagtacctgaccaccacccagagcaagatcttccagtgcgacaagtacgtgaaggtgatccacaagttcagcaacagcaacagacacaagatcagacacaccggcaagaagcccttcaagtgcatcgagtgcggcaaggccttcaaccagagcagcaccctgaccacccacaagaagatccacaccggcgagaagcccttcaagtgcgaggagtgcggcaaggccttcaactggagcagccacctgaccacccacaagagaatccacaccggcgagaagagatacaagtgcgaggactgcggcaaggccttcagcagattcagctacctgaccgcccacaagatcatccacagcggcgagaagccctacaagtgcgaggagtgcggcaaggccttcaagagaagcagcaacctgaccacccacaagatcatccacaccggcgagaagccctacaagtgcgaggagtgcggcaaggccttcaagagaagcagcatcctgaccgcccacaagatcatccacagcggcgagaagccctacaagtgcgaggagtgcggcaaggccttcaagcaccccagcgtgctgaccacccacaagagaatccacaccggcgagaagccctacaagtgcgaggagtgcggcagagccttcaagtacttcagcagcctgaccacccacaagatcatccacagcggcgagaagccctacaagtgcgaggagtgcggcaaggccttcaactggagcagccacctgaccacccacaagagaatccacaccggcgagaagccctacaagtgcgaggagtgcggcgaggccttcaagtacagcagcagcctgaccacccacaagatcatccacaccggccagcagcccttcaagtgcgaggagtgcggcaaggccttcaagtgcttcagcatcctgaccacccacaagagaatccacaccggcgagaagccctacaagtgcgaggagtgcggcaaggccttcaacagcagcagccacctgaccgcccacaagagaatccacaccggcgagaagccctacaagtgcgagagatgcggcaaggccttcaagagaagcttcatcctgaccagacacaagagaatccacaccggcgagaagccctacaagtgcgaggagtgcggcaagggcttcaagtgccccagcaccctgaccacccacaaggtgatccacaccggcgagaagctgtag

SEQ ID NO: 106195 - DNA, 1935 bp, synthetic construct
  misc_feature 1..1935: note = Description of Artificial Sequence: Synthetic coding sequence
  source 1..1935: mol_type = other DNA
atggagatccccgcccccgagcccgagaagaccgccctgagcagccaggaccccgccctgagcctgaaggagaacctggaggacatcagcggctggggcctgcccgaggccagaagcaaggagagcgtgagcttcaaggacgtggccgtggacttcacccaggaggagtggggccagctggacagcccccagagagccctgtacagagacgtgatgctggagaactaccagaacctgctggccctgggcccccccctgcacaagcccgacgtgatcagccacctggagagaggcgaggagccctggagcatgcagagagaggtgcccagaggcccctgccccgagtgggagctgaaggccgtgcccagccagcagcagggcatctgcaaggaggagcccgcccaggagcccatcatggagagacccctgggcggcgcccaggcctggggcagacaggccggcgccctgcagagaagccaggccgccccctgggcccccgcccccgccatggtgtgggacgtgcccgtggaggagttccccctgagatgccccctgttcgcccagcagagagtgcccgagggcggccccctgctggacaccagaaagaacgtgcaggccaccgagggcagaaccaaggcccccgccagactgtgcgccggcgagaacgccagcacccccagcgagcccgagaagttcccccaggtgagaagacagagaggcgccggcgccggcgagggcgagttcgtgtgcggcgagtgcggcaaggccttcagacagagcagcagcctgaccctgcacagaagatggcacagcagagagaaggcctacaagtgcgacgagtgcggcaaggccttcacctggagcaccaacctgctggagcacagaagaatccacaccggcgagaagcccttcttctgcggcgagtgcggcaaggccttcagctgccacagcagcctgaacgtgcaccagagaatccacaccggcgagagaccctacaagtgcagcgcctgcgagaaggccttcagctgcagcagcctgctgagcatgcacctgagagtgcacaccggcgagaagccctacagatgcggcgagtgcggcaaggccttcaaccagagaacccacctgaccagacaccacagaatccacaccggcgagaagccctaccagtgcggcagctgcggcaaggccttcacctgccacagcagcctgaccgtgcacgagaagatccacagcggcgacaagcccttcaagtgcagcgactgcgagaaggccttcaacagcagaagcagactgaccctgcaccagagaacccacaccggcgagaagcccttcaagtgcgccgactgcggcaagggcttcagctgccacgcctacctgctggtgcacagaagaatccacagcggcgagaagcccttcaagtgcaacgagtgcggcaaggccttcagcagccacgcctacctgatcgtgcacagaagaatccacaccggcgagaagcccttcgactgcagccagtgctggaaggccttcagctgccacagcagcctgatcgtgcaccagagaatccacaccggcgagaagccctacaagtgcagcgagtgcggcagagccttcagccagaaccactgcctgatcaagcaccagaagatccacagcggcgagaagagcttcaagtgcgagaagtgcggcgagatgttcaactggagcagccacctgaccgagcaccagagactgcacagcgagggcaagcccctggccatccagttcaacaagcacctgctgagcacctactacgtgcccggcagcctgctgggcgccggcgacgccggcctgagagacgtggaccccatcgacgccctggacgtggccaagctgctgtgcgtggtgccccccagagccggcagaaacttcagcctgggcagcaagcccagaaactag

SEQ ID NO: 106196 - DNA, 1935 bp, synthetic construct; identical to SEQ ID NO: 106195
  misc_feature 1..1935: note = Description of Artificial Sequence: Synthetic coding sequence
  source 1..1935: mol_type = other DNA

SEQ ID NO: 106197 - DNA, 1839 bp, synthetic construct
  misc_feature 1..1839: note = Description of Artificial Sequence: Synthetic coding sequence
  source 1..1839: mol_type = other DNA
atggagatccccgcccccgagcccgagaagaccgccctgagcagccaggaccccgccctgagcctgaaggagaacctggaggacatcagcggctggggcctgcccgaggccagaagcaaggagagcgtgagcttcaaggacgtggccgtggacttcacccaggaggagtggggccagctggacagcccccagagagccctgtacagagacgtgatgctggagaactaccagaacctgctggccctggagtgggagctgaaggccgtgcccagccagcagcagggcatctgcaaggaggagcccgcccaggagcccatcatggagagacccctgggcggcgcccaggcctggggcagacaggccggcgccctgcagagaagccaggccgccccctgggcccccgcccccgccatggtgtgggacgtgcccgtggaggagttccccctgagatgccccctgttcgcccagcagagagtgcccgagggcggccccctgctggacaccagaaagaacgtgcaggccaccgagggcagaaccaaggcccccgccagactgtgcgccggcgagaacgccagcacccccagcgagcccgagaagttcccccaggtgagaagacagagaggcgccggcgccggcgagggcgagttcgtgtgcggcgagtgcggcaaggccttcagacagagcagcagcctgaccctgcacagaagatggcacagcagagagaaggcctacaagtgcgacgagtgcggcaaggccttcacctggagcaccaacctgctggagcacagaagaatccacaccggcgagaagcccttcttctgcggcgagtgcggcaaggccttcagctgccacagcagcctgaacgtgcaccagagaatccacaccggcgagagaccctacaagtgcagcgcctgcgagaaggccttcagctgcagcagcctgctgagcatgcacctgagagtgcacaccggcgagaagccctacagatgcggcgagtgcggcaaggccttcaaccagagaacccacctgaccagacaccacagaatccacaccggcgagaagccctaccagtgcggcagctgcggcaaggccttcacctgccacagcagcctgaccgtgcacgagaagatccacagcggcgacaagcccttcaagtgcagcgactgcgagaaggccttcaacagcagaagcagactgaccctgcaccagagaacccacaccggcgagaagcccttcaagtgcgccgactgcggcaagggcttcagctgccacgcctacctgctggtgcacagaagaatccacagcggcgagaagcccttcaagtgcaacgagtgcggcaaggccttcagcagccacgcctacctgatcgtgcacagaagaatccacaccggcgagaagcccttcgactgcagccagtgctggaaggccttcagctgccacagcagcctgatcgtgcaccagagaatccacaccggcgagaagccctacaagtgcagcgagtgcggcagagccttcagccagaaccactgcctgatcaagcaccagaagatccacagcggcgagaagagcttcaagtgcgagaagtgcggcgagatgttcaactggagcagccacctgaccgagcaccagagactgcacagcgagggcaagcccctggccatccagttcaacaagcacctgctgagcacctactacgtgcccggcagcctgctgggcgccggcgacgccggcctgagagacgtggaccccatcgacgccctggacgtggccaagctgctgtgcgtggtgccccccagagccggcagaaacttcagcctgggcagcaagcccagaaactag

SEQ ID NO: 106198 - DNA, 210 bp, synthetic construct
  misc_feature 1..210: note = Description of Artificial Sequence: Synthetic coding sequence
  source 1..210: mol_type = other DNA
atggagatccccgcccccgagcccgagaagaccgccctgagcagccaggaccccgccctgagcctgaaggagaacctggaggacatcagcggctggggcctgcccgaggccagaagcaagagcctggccctggtgacccaggccggcgtgcagtggagaaacctgggcagcctgcagcccccccccctgggcttcaagcagttcagctag

SEQ ID NO: 106199 - DNA, 1935 bp, synthetic construct
  misc_feature 1..1935: note = Description of Artificial Sequence: Synthetic coding sequence
  source 1..1935: mol_type = other DNA
atggccgaggccgtggccgcccccatcagcccctggaccatggccgccaccatccaggccatggagagaaagatcgagagccaggccgccagactgctgagcctggagggcagaaccggcatggccgagaagaagctggccgactgcgagaagaccgccgtggagttcggcaaccagctggagggcaagtgggccgtgctgggcaccctgctgcaggagtacggcctgctgcagagaagactggagaacgtggagaacctgctgagaaacagaaacttctggatcctgagactgccccccggcagcaagggcgagagccccaaggagtggggcaagctggaggactggcagaaggagctgtacaagcacgtgatgagaggcaactacgagaccctggtgagcctggactacgccatcagcaagcccgaggtgctgagccagatcgagcagggcaaggagccctgcaactggagaagacccggccccaagatccccgacgtgcccgtggaccccagccccggcagcggcccccccgtgcccgcccccgacctgctgatgcagatcaagcaggagggcgagctgcagctgcaggagcagcaggccctgggcgtggaggcctgggccgccggccagcccgacatcggcgaggagccctggggcctgagccagctggacagcggcgccggcgacatcagcaccgacgccaccagcggcgtgcacagcaacttcagcaccaccatcccccccaccagctggcagaccgacctgcccccccaccaccccagcagcgcctgcagcgacggcaccctgaagctgaacaccgccgccagcaccgaggacgtgaagatcgtgatcaagaccgaggtgcaggaggaggaggtggtggccacccccgtgcaccccaccgacctggaggcccacggcaccctgttcggccccggccaggccaccagattcttccccagccccgcccaggagggcgcctgggagagccagggcagcagcttccccagccaggaccccgtgctgggcctgagagagcccgccagacccgagagagacatgggcgagctgagccccgccgtggcccaggaggagaccccccccggcgactggctgttcggcggcgtgagatggggctggaacttcagatgcaagccccccgtgggcctgaaccccagaaccggccccgagggcctgccctacagcagccccgacaacggcgaggccatcctggaccccagccaggcccccagacccttcaacgagccctgcaagtaccccggcagaaccaagggcttcggccacaagcccggcctgaagaagcaccccgccgccccccccggcggcagacccttcacctgcgccacctgcggcaagagcttccagctgcaggtgagcctgagcgcccaccagagaagctgcggcgcccccgacggcagcggccccggcaccggcggcggcggcagcggcagcggcggcggcggcggcggcagcggcggcggcagcgccagagacggcagcgccctgagatgcggcgagtgcggcagatgcttcaccagacccgcccacctgatcagacacagaatgctgcacaccggcgagagacccttcccctgcaccgagtgcgagaagagattcaccgagagaagcaagctgatcgaccactacagaacccacaccggcgtgagacccttcacctgcaccgtgtgcggcaagagcttcatcagaaaggaccacctgagaaagcaccagagaaaccacgccgccggcgccaagacccccgccagaggccagcccctgcccaccccccccgccccccccgaccccttcaagagccccgccagcaagggccccctggccagcaccgacctggtgaccgactggacctgcggcctgagcgtgctgggccccaccgacggcggcgacatgtag

SEQ ID NO: 106200 - DNA, 1938 bp, synthetic construct
  misc_feature 1..1938: note = Description of Artificial Sequence: Synthetic coding sequence
  source 1..1938: mol_type = other DNA
atggccgaggccgtggccgcccccatcagcccctggaccatggccgccaccatccaggccatggagagaaagatcgagagccaggccgccagactgctgagcctggagggcagaaccggcatggccgagaagaagctggccgactgcgagaagaccgccgtggagttcggcaaccagctggagggcaagtgggccgtgctgggcaccctgctgcaggagtacggcctgctgcagagaagactggagaacgtggagaacctgctgagaaacagaaacttctggatcctgagactgccccccggcagcaagggcgagagccccaaggagtggggcaagctggaggactggcagaaggagctgtacaagcacgtgatgagaggcaactacgagaccctggtgagcctggactacgccatcagcaagcccgaggtgctgagccagatcgagcagggcaaggagccctgcaactggagaagacccggccccaagatccccgacgtgcccgtggaccccagccccggcagcggcccccccgtgcccgcccccgacctgctgatgcagatcaagcaggagggcgagctgcagctgcaggagcagcaggccctgggcgtggaggcctgggccgccggccagcccgacatcggcgaggagccctggggcctgagccagctggacagcggcgccggcgacatcagcaccgacgccaccagcggcgtgcacagcaacttcagcaccaccatcccccccaccagctggcagaccgacctgcccccccaccaccccagcagcgcctgcagcgacggcaccctgaagctgaacaccgccgccagcaccgaggccgacgtgaagatcgtgatcaagaccgaggtgcaggaggaggaggtggtggccacccccgtgcaccccaccgacctggaggcccacggcaccctgttcggccccggccaggccaccagattcttccccagccccgcccaggagggcgcctgggagagccagggcagcagcttccccagccaggaccccgtgctgggcctgagagagcccgccagacccgagagagacatgggcgagctgagccccgccgtggcccaggaggagaccccccccggcgactggctgttcggcggcgtgagatggggctggaacttcagatgcaagccccccgtgggcctgaaccccagaaccggccccgagggcctgccctacagcagccccgacaacggcgaggccatcctggaccccagccaggcccccagacccttcaacgagccctgcaagtaccccggcagaaccaagggcttcggccacaagcccggcctgaagaagcaccccgccgccccccccggcggcagacccttcacctgcgccacctgcggcaagagcttccagctgcaggtgagcctgagcgcccaccagagaagctgcggcgcccccgacggcagcggccccggcaccggcggcggcggcagcggcagcggcggcggcggcggcggcagcggcggcggcagcgccagagacggcagcgccctgagatgcggcgagtgcggcagatgcttcaccagacccgcccacctgatcagacacagaatgctgcacaccggcgagagacccttcccctgcaccgagtgcgagaagagattcaccgagagaagcaagctgatcgaccactacagaacccacaccggcgtgagacccttcacctgcaccgtgtgcggcaagagcttcatcagaaaggaccacctgagaaagcaccagagaaaccacgccgccggcgccaagacccccgccagaggccagcccctgcccaccccccccgccccccccgaccccttcaagagccccgccagcaagggccccctggccagcaccgacctggtgaccgactggacctgcggcctgagcgtgctgggccccaccgacggcggcgacatgtag

SEQ ID NO: 106201 - DNA, 2172 bp, synthetic construct
  misc_feature 1..2172: note = Description of Artificial Sequence: Synthetic coding sequence
  source 1..2172: mol_type = other DNA
atgagcctgctgaaggagagaaagcccaagaagccccactacatccccagaccccccggcaagcccttcaagtacaagtgcttccagtgccccttcacctgcaacgagaagagccacctgttcaaccacatgaagtacggcctgtgcaagaacagcatcaccctggtgagcgagcaggacagagtgcccaagtgccccaagagcaacagcctggaccccaagcagaccaaccagcccgacgccaccgccaagcccgccagcagcaagagcgtggccaacggcctgagcgccttcgacagcaagctgcagcacagcagcgccagagaggacatcaaggagaacctggagctgcaggccagaggcacccacagatgcctgggccagaagcccgccctgcacagagccagcccctgcaagagccccgcccccgaggccgccctgggcgcccagcccgccctggagggcgccgccagacccagcgccttcgtgcccgtgggcgagcacagactgaagggccccgacaacgccgaggcccccgagaccctggccctgcacaaccccaccgccaaggccgtgagcttccacaccaagagcgccttccacacccccggctacccctggaaggccggcagccccttcctgccccccgagttcccccacaagatcagcagcaccaagggcctgggcgccatcagcccctacatgcaccccaccatccccgagtaccccccccacttctacaccgagcacggcctggccaccatctacagcccctacctgctggccggcagcagccccgagtgcgacgcccccctgctgagcgtgtacggcacccaggaccccagacacttcctgccccaccccggccccatccccaagcacctggcccccagccccgccacctacgaccactacagattcttccagcagtaccccagcaacctgcccatcccctacggcttctacagacccgagagcgccttcagcagctacggcctgagactgccccccgtgaccggcctgaccagagaccagagcagccacctgctggaggaggccaccctggtgtaccccgccagcagccccagcagactgaaccccagcgaccccaacagaaagcacgtggagttcgagagccccatccccgaggccaaggacagcagcaaggccggccagagagacaccgagggcagcaagatgagccccagagccggcagcgccgccaccggcagccccggcagacccagccccaccgacttcatgcagaccagccagacctgcgagggcctgtacgacctgagcaacaaggccgccagcagcgccctgggcagactgtacccccccgagcagagcctgaccgccttcagacccgtgaagaagagcaccgagtgcctgcccgcccaggccgccgagaccaccgccgagagccccgtgagcctgaacgtggtgaacggcgacccccccgcccccaccggcagcgccagcctggtgagcgaggccgcccccagcagccccgacgacagcagcggcatgggccccctgaacctgagcaagaagagcgagatcaacctggccgccacccacgagcccacctaccagggcagcccccaggccgagaccgccagcttcagcgagctgcaggacctgcccctgaacctgagcgtgaaggacccctgcaacacccaggcccccagacccgccttccccggcagacccagagccgccgagcccgccgccgccgtgccccagaagaccggcaccgagggcagcgaggacggccccagccaccccgagaccaagcccggcagcctggacggcgacggcgccccccccaccggccccggcgaggaggcccccgacgcctgcgccgtggacagcagcgaggagcagaagcagaccgccgccgtggccctgtgccagctggccgcctacagccccagaaacatcagagtgggcgacggcgacgccgccgcccccgagcccgcctgcagacaggacacccccaccctgagcagcatggagagccaggaggcccagtgcgacctgagacccaagggccagaagagaaccagcctgagagacgccggcaagagccagcagggcgccaagaaggccaagctgcaggacaccgccagagtgttcaccctgagaagaagagccagagtgagctag

SEQ ID NO: 106202 - DNA, 951 bp, synthetic construct
  misc_feature 1..951: note = Description of Artificial Sequence: Synthetic coding sequence
  source 1..951: mol_type = other DNA
atgagccccagagccggcagcgccgccaccggcagccccggcagacccagccccaccgacttcatgcagaccagccagacctgcgagggcctgtacgacctgagcaacaaggccgccagcagcgccctgggcagactgtacccccccgagcagagcctgaccgccttcagacccgtgaagaagagcaccgagtgcctgcccgcccaggccgccgagaccaccgccgagagccccgtgagcctgaacgtggtgaacggcgacccccccgcccccaccggcagcgccagcctggtgagcgaggccgcccccagcagccccgacgacagcagcggcaagagcgagatcaacctggccgccacccacgagcccacctaccagggcagcccccaggccgagaccgccagcttcagcgagctgcaggacctgcccctgaacctgagcgtgaaggacccctgcaacacccaggcccccagacccgccttccccggcagacccagagccgccgagcccgccgccgccgtgccccagaagaccggcaccgagggcagcgaggacggccccagccaccccgagaccaagcccggcagcctggacggcgacggcgccccccccaccggccccggcgaggaggcccccgacgcctgcgccgtggacagcagcgaggagcagaagcagaccgccgccgtggccctgtgccagctggccgcctacagccccagaaacatcagagtgggcgacggcgacgccgccgcccccgagcccgcctgcagacaggacacccccaccctgagcagcatggagagccaggaggcccagtgcgacctgagacccaagggccagaagagaaccagcctgagagacgccggcaagagccagcagggcgccaagaaggccaagctgcaggacaccgccagagtgttcaccctgagaagaagagccagagtgagctag

SEQ ID NO: 106203 - DNA, 891 bp, synthetic construct
  misc_feature 1..891: note = Description of Artificial Sequence: Synthetic coding sequence
  source 1..891: mol_type = other DNA
atgtacttcagccaggaggagtgggagctgctggaccccacccagaaggccctgtacaacgacgtgatgcaggagaactacgagaccgtgatcagcctggccctgttcgtgctgcccaagcccaaggtgatcagctgcctggagcagggcgaggagccctgggtgcaggtgagccccgagttcaaggacagcgccggcaagagccccaccggcctgaagctgaagaacgacaccgagaaccaccagcccgtgagcctgagcgacctggagatccaggccagcgccggcgtgatcagcaagaaggccaaggtgaaggtgccccagaagaccgccggcaaggagaaccacttcgacatgcacagagtgggcaagtggcaccaggacttccccgtgaagaagagaaagaagctgagcacctggaagcaggagctgctgaagctgatggacagacacaagaaggactgcgccagagagaagcccttcaagtgccaggagtgcggcaagaccttcagagtgagcagcgacctgatcaagcaccagagaatccacaccgaggagaagccctacaagtgccagcagtgcgacaagagattcagatggagcagcgacctgaacaagcacctgaccacccaccagggcatcaagccctacaagtgcagctggtgcggcaagagcttcagccagaacaccaacctgcacacccaccagagaacccacaccggcgagaagcccttcacctgccacgagtgcggcaagaagttcagccagaacagccacctgatcaagcacagaagaacccacaccggcgagcagccctacacctgcagcatctgcagaagaaacttcagcagaagaagcagcctgctgagacaccagaagctgcacctgtag

SEQ ID NO: 106204 - DNA, 891 bp, synthetic construct; identical to SEQ ID NO: 106203
  misc_feature 1..891: note = Description of Artificial Sequence: Synthetic coding sequence
  source 1..891: mol_type = other DNA

SEQ ID NO: 106205 - DNA, 1248 bp, synthetic construct
  misc_feature 1..1248: note = Description of Artificial Sequence: Synthetic coding sequence
  source 1..1248: mol_type = other DNA
atggccatgagagagctgaacgccgacagctgcagcagcccccagatgggcgccatgtgggagaccagcggcagcgtgaaggagaacagcagccagagcaagaagtacagcaccaagatcgagaacctgggccccgagagcgcctgcagacacttctggagcttcagataccacgaggccaccggccccctggagaccatcagccagctgcagaagctgtgccaccagtggctgagacccgagatccacagcaaggagcagatcctggagatgctggtgctggagcagttcctgagcatcctgcccaaggagacccagaactgggtgcagaagcaccacccccagaacgtgaagcaggccctggtgctggtggagttcctgcagagagagcccgacggcaccaagaacgagagcctgctgaccttcgaggacgtggccgtgtacttcagcgaggaggagtggcagctgctgaaccccctggagaagaccctgtacaacgacgtgatgcaggacatctacgagaccgtgatcagcctgggcctgaagctgaagaacgacaccggcaacgaccaccccatcagcgtgagcaccagcgagatccagaccagcggctgcgaggtgagcaagaagaccagaatgaagatcgcccagaagaccatgggcagagagaaccccggcgacacccacagcgtgcagaagtggcacagagccttccccagaaagaagagaaagaagcccgccacctgcaagcaggagctgcccaagctgatggacctgcacggcaagggccccaccggcgagaagcccttcaagtgccaggagtgcggcaagagcttcagagtgagcagcgacctgatcaagcaccacagaatccacaccggcgagaagccctacaagtgccagcagtgcgacagaagattcagatggagcagcgacctgaacaagcacttcatgacccaccagggcatcaagccctacagatgcagctggtgcggcaagagcttcagccacaacaccaacctgcacacccaccagagaatccacaccggcgagaagcccttcaagtgcgacgagtgcggcaagagattcatccagaacagccacctgatcaagcaccagagaacccacaccggcgagcagccctacacctgcagcctgtgcaagagaaacttcagcagaagaagcagcctgctgagacaccagaagctgcacagaagaagagaggcctgcctggtgagccccaactag

SEQ ID NO: 106206 - DNA, 1533 bp, synthetic construct
  misc_feature 1..1533: note = Description of Artificial Sequence: Synthetic coding sequence
  source 1..1533: mol_type = other DNA
atggccatgagagagctgaacgccgacagctgcagcagcccccagatgggcgccatgtgggagaccagcggcagcgtgaaggagaacagcagccagagcaagaagtacagcaccaagatcgagaacctgggccccgagagcgcctgcagacacttctggagcttcagataccacgaggccaccggccccctggagaccatcagccagctgcagaagctgtgccaccagtggctgagacccgagatccacagcaaggagcagatcctggagatgctggtgctggagcagttcctgagcatcctgcccaaggagacccagaactgggtgcagaagcaccacccccagaacgtgaagcaggccctggtgctggtggagttcctgcagagagagcccgacggcaccaagaacgaggtgaccgcccacgagctgggcaaggaggccgtgctgctgggcggcaccgccgtggcccccggcttcaagtggaagcccgccgagccccagcccatgggcgtgttccagaaggagtactggaacacctacagagtgctgcaggagcagctgggctggaacacccacaaggagacccagcccgtgtacgagagagccgtgcacgaccagcagatgctggccctgagcgagcagaagagaatcaagcactggaagatggccagcaagctgatcctgcccgagagcctgagcctgctgaccttcgaggacgtggccgtgtacttcagcgaggaggagtggcagctgctgaaccccctggagaagaccctgtacaacgacgtgatgcaggacatctacgagaccgtgatcagcctgggcctgaagctgaagaacgacaccggcaacgaccaccccatcagcgtgagcaccagcgagatccagaccagcggctgcgaggtgagcaagaagaccagaatgaagatcgcccagaagaccatgggcagagagaaccccggcgacacccacagcgtgcagaagtggcacagagccttccccagaaagaagagaaagaagcccgccacctgcaagcaggagctgcccaagctgatggacctgcacggcaagggccccaccggcgagaagcccttcaagtgccaggagtgcggcaagagcttcagagtgagcagcgacctgatcaagcaccacagaatccacaccggcgagaagccctacaagtgccagcagtgcgacagaagattcagatggagcagcgacctgaacaagcacttcatgacccaccagggcatcaagccctacagatgcagctggtgcggcaagagcttcagccacaacaccaacctgcacacccaccagagaatccacaccggcgagaagcccttcaagtgcgacgagtgcggcaagagattcatccagaacagccacctgatcaagcaccagagaacccacaccggcgagcagccctacacctgcagcctgtgcaagagaaacttcagcagaagaagcagcctgctgagacaccagaagctgcacagaagaagagaggcctgcctggtgagccccaactag

SEQ ID NO: 106207 - DNA, 1548 bp, synthetic construct
  misc_feature 1..1548: note = Description of Artificial Sequence: Synthetic coding sequence
  source 1..1548: mol_type = other DNA
atggagagcctgggcctgcacaccgtgaccctgagcgacggcaccaccgcctacgtgcagcaggccgtgaagggcgagaagctgctggagggccaggtgatccagctggaggacggcaccaccgcctacatccaccaggtgaccgtgcagaaggaggccctgagcttcgaggacggccagcccgtgcagctggaggacggcagcatggcctacatccacagaacccccagagagggctacgaccccagcaccctggaggccgtgcagctggaggacggcagcaccgcctacatccaccaccccgtggccgtgcccagcgagagcaccatcctggccgtgcagaccgaggtgggcctggaggacctggccgccgaggacgacgagggcttcagcgccgacgccgtggtggccctggagcagtacgccagcaaggtgctgcacgacagccagatccccagaaacggcaagggccagcaggtgggcgacagagccttcagatgcggctacaagggctgcggcagactgtacaccaccgcccaccacctgaaggtgcacgagagagcccacaccggcgacagaccctacagatgcgacttccccagctgcggcaaggccttcgccaccggctacggcctgaagagccacgtgagaacccacaccggcgagaagccctacaagtgccccgaggagctgtgcagcaaggccttcaagaccagcggcgacctgcagaagcacgtgagaacccacaccggcgagagacccttccagtgccccttcgagggctgcggcagaagcttcaccaccagcaacatcagaaaggtgcacgtgagaacccacaccggcgagagaccctacacctgccccgagccccactgcggcagaggcttcaccagcgccaccaactacaagaaccacgtgagaatccacaccggcgagaagccctacgtgtgcaccgtgcccggctgcggcaagagattcaccgagtacagcagcctgtacaagcaccacgtggtgcacacccactgcaagccctacacctgcagcacctgcggcaagacctacagacagaccagcaccctggccatgcacaagagaagcgcccacggcgagctggaggccaccgaggagagcgagcaggccctgtacgagcagcagcagctggaggccgccagcgccgccgaggagagccccccccccaagagacccagaatcgcctacctgagcgaggtgaaggaggagagagacgacatccccgcccaggtggccatggtgaccgaggaggacggcgccccccaggtggccctgatcacccaggacggcgcccagcaggtgaccatcatcaccagcggcgccgtggtggccgaggacagcagcgtggccagcctgagacaccagcaggtggccctgctggccaccgccaacggcacccacatcgccgtgcagctggaggagcagcagaccctggaggaggccatcaacgtggccaccgccgccatgcagcagggcgccgtgaccctggagaccaccgtgagcgagagcggctgctag

SEQ ID NO: 106208 - DNA, 1713 bp, synthetic construct
  misc_feature 1..1713: note = Description of Artificial Sequence: Synthetic coding sequence
  source 1..1713: mol_type = other DNA
atggagagcctgggcctgcacaccgtgaccctgagcgacggcaccaccgcctacgtgcagcaggccgtgaagggcgagaagctgctggagggccaggtgatccagctggaggacggcaccaccgcctacatccaccaggtgaccgtgcagaaggaggccctgagcttcgaggacggccagcccgtgcagctggaggacggcagcatggcctacatccacagaacccccagagagggctacgaccccagcaccctggaggccgtgcagctggaggacggcagcaccgcctacatccaccaccccgtggccgtgcccagcgagagcaccatcctggccgtgcagaccgaggtgggcctggaggacctggccgccgaggacgacgagggcttcagcgccgacgccgtggtggccctggagcagtacgccagcaaggtgctgcacgacagccagatccccagaaacggcaagggccagcaggtgggcgacagagccttcagatgcggctacaagggctgcggcagactgtacaccaccgcccaccacctgaaggtgcacgagagagcccacaccggcgacagaccctacagatgcgacttccccagctgcggcaaggccttcgccaccggctacggcctgaagagccacgtgagaacccacaccggcgagaagccctacaagtgccccgaggagctgtgcagcaaggccttcaagaccagcggcgacctgcagaagcacgtgagaacccacaccggcgagagacccttccagtgccccttcgagggctgcggcagaagcttcaccaccagcaacatcagaaaggtgcacgtgagaacccacaccggcgagagaccctacacctgccccgagccccactgcggcagaggcttcaccagcgccaccaactacaagaaccacgtgagaatccacaccggcgagaagccctacgtgtgcaccgtgcccggctgcggcaagagattcaccgagtacagcagcctgtacaagcaccacgtggtgcacacccactgcaagccctacacctgcagcacctgcggcaagacctacagacagaccagcaccctggccatgcacaagagaagcgcccacggcgagctggaggccaccgaggagagcgagcaggccctgtacgagcagcagcagctggaggccgccagcgccgccgaggagagccccccccccaagagacccagaatcgcctacctgagcgaggtgaaggaggagagagacgacatccccgcccaggtggccatggtgaccgaggaggacggcgccccccaggtggccctgatcacccaggacggcgcccagcaggtgagcctgagccccgaggacctgcaggccctgggcagcgccatcagcatggtgacccagcacggcagcaccaccctgaccatccccagccccgacgccgacctggccaccagcggcacccacaccgtgaccatggtgagcgccgacggcacccagacccagcccgtgaccatcatcaccagcggcgccgtggtggccgaggacagcagcgtggccagcctgagacaccagcaggtggccctgctggccaccgccaacggcacccacatcgccgtgcagctggaggagcagcagaccctggaggaggccatcaacgtggccaccgccgccatgcagcagggcgccgtgaccctggagaccaccgtgagcgagagcggctgctag

SEQ ID NO: 106209 - DNA, 1287 bp, synthetic construct
  misc_feature 1..1287: note = Description of Artificial Sequence: Synthetic coding sequence
  source 1..1287: mol_type = other DNA
atggagagcctgggcctgcacaccgtgaccctgagcgacggcaccaccgcctacgtgcagcaggccgtgaagggcgagaagctgctggagggccaggtgatccagctggaggacggcaccaccgcctacatccaccaggtgaccgtgcagaaggaggccctgagcttcgaggacggccagcccgtgcagctggaggacggcagcatggcctacatccacagaacccccagagagggctacgaccccagcaccctggaggccgtgcagctggaggacggcagcaccgcctacatccaccaccccgtggccgtgcccagcgagagcaccatcctggccgtgcagaccgaggtgggcctggaggacctggccgccgaggacgacgagggcttcagcgccgacgccgtggtggccctggagcagtacgccagcaaggtgctgcacgacagccagatccccagaaacggcaagggccagcaggtgggcgacagagccttcagatgcggctacaagggctgcggcagactgtacaccaccgcccaccacctgaaggtgcacgagagagcccacaccggcgacagaccctacagatgcgacttccccagctgcggcaaggccttcgccaccggctacggcctgaagagccacgtgagaacccacaccggcgagaagccctacaagtgccccgaggagctgtgcagcaaggccttcaagaccagcggcgacctgcagaagcacgtgagaacccacaccggcgagagacccttccagtgccccttcgagggctgcggcagaagcttcaccaccagcaacatcagaaaggtgcacgtgagaacccacaccggcgagagaccctacacctgccccgagccccactgcggcagaggcttcaccagcgccaccaactacaagaaccacgtgagaatccacaccggcgagaagccctacgtgtgcaccgtgcccggctgcggcaagagattcaccgagtacagcagcctgtacaagcaccacgtggtgcacacccactgcaagccctacacctgcagcacctgcggcaagacctacagacagaccagcaccctggccatgcacaagagaagcggccactgcggccacgccgccagaggctgcgaccccggcgacaacagcgtgggcgagtggctgctgagccccagaggcctgggccccaccccctgctggagaaagtgccacctgcacggccacagctgcccccagggccccagactgtggctgacccacagaagatggccccacagaagcctgggctag

SEQ ID NO: 106210 - DNA, 1635 bp, synthetic construct
  misc_feature 1..1635: note = Description of Artificial Sequence: Synthetic coding sequence
  source 1..1635: mol_type = other DNA
atggagagcctgggcctgcacaccgtgaccctgagcgacggcaccaccgcctacgtgcagcaggccgtgaagggcgagaagctgctggagggccaggtgatccagctggaggacggcaccaccgcctacatccaccaggtgaccgtgcagaaggagggctacgaccccagcaccctggaggccgtgcagctggaggacggcagcaccgcctacatccaccaccccgtggccgtgcccagcgagagcaccatcctggccgtgcagaccgaggtgggcctggaggacctggccgccgaggacgacgagggcttcagcgccgacgccgtggtggccctggagcagtacgccagcaaggtgctgcacgacagccagatccccagaaacggcaagggccagcaggtgggcgacagagccttcagatgcggctacaagggctgcggcagactgtacaccaccgcccaccacctgaaggtgcacgagagagcccacaccggcgacagaccctacagatgcgacttccccagctgcggcaaggccttcgccaccggctacggcctgaagagccacgtgagaacccacaccggcgagaagccctacaagtgccccgaggagctgtgcagcaaggccttcaagaccagcggcgacctgcagaagcacgtgagaacccacaccggcgagagacccttccagtgccccttcgagggctgcggcagaagcttcaccaccagcaacatcagaaaggtgcacgtgagaacccacaccggcgagagaccctacacctgccccgagccccactgcggcagaggcttcaccagcgccaccaactacaagaaccacgtgagaatccacaccggcgagaagccctacgtgtgcaccgtgcccggctgcggcaagagattcaccgagtacagcagcctgtacaagcaccacgtggtgcacacccactgcaagccctacacctgcagcacctgcggcaagacctacagacagaccagcaccctggccatgcacaagagaagcgcccacggcgagctggaggccaccgaggagagcgagcaggccctgtacgagcagcagcagctggaggccgccagcgccgccgaggagagccccccccccaagagacccagaatcgcctacctgagcgaggtgaaggaggagagagacgacatccccgcccaggtggccatggtgaccgaggaggacggcgccccccaggtggccctgatcacccaggacggcgcccagcaggtgagcctgagccccgaggacctgcaggccctgggcagcgccatcagcatggtgacccagcacggcagcaccaccctgaccatccccagccccgacgccgacctggccaccagcggcacccacaccgtgaccatggtgagcgccgacggcacccagacccagcccgtgaccatcatcaccagcggcgccgtggtggccgaggacagcagcgtggccagcctgagacaccagcaggtggccctgctggccaccgccaacggcacccacatcgccgtgcagctggaggagcagcagaccctggaggaggccatcaacgtggccaccgccgccatgcagcagggcgccgtgaccctggagaccaccgtgagcgagagcggctgctag

SEQ ID NO: 106211 - DNA, 1209 bp, synthetic construct
  misc_feature 1..1209: note = Description of Artificial Sequence: Synthetic coding sequence
  source 1..1209: mol_type = other DNA
atggagagcctgggcctgcacaccgtgaccctgagcgacggcaccaccgcctacgtgcagcaggccgtgaagggcgagaagctgctggagggccaggtgatccagctggaggacggcaccaccgcctacatccaccaggtgaccgtgcagaaggaggccctgagcttcgaggacggccagcccgtgcagctggaggacggcagcatggcctacatccacagaacccccagagagggctacgaccccagcaccctggaggccgtgcagctggaggacggcagcaccgcctacatccaccaccccgtggccgtgcccagcgagagcaccatcctggccgtgcagaccgaggtgggcctggaggacctggccgccgaggacgacgagggcttcagcgccgacgccgtggtggccctggagcagtacgccagcaaggtgctgcacgacagccagatccccagaaacggcaagggccagcaggtgggcgacagagccttcagatgcggctacaagggctgcggcagactgtacaccaccgcccaccacctgaaggtgcacgagagagcccacaccggcgacagaccctacagatgcgacttccccagctgcggcaaggccttcgccaccggctacggcctgaagagccacgtgagaacccacaccggcgagaagccctacaagtgccccgaggagctgtgcagcaaggccttcaagaccagcggcgacctgcagaagcacgtgagaacccacaccggcgagagacccttccagtgccccttcgagggctgcggcagaagcttcaccaccagcaacatcagaaaggtgcacgtgagaacccacaccggcgagagaccctacacctgccccgagccccactgcggcagaggcttcaccagcgccaccaactacaagaaccacgtgagaatccacaccggcgagaagccctacgtgtgcaccgtgcccggctgcggcaagagattcaccgagtacagcagcctgtacaagcaccacgtggtgcacacccaccactgcggccacgccgccagaggctgcgaccccggcgacaacagcgtgggcgagtggctgctgagccccagaggcctgggccccaccccctgctggagaaagtgccacctgcacggccacagctgcccccagggccccagactgtggctgacccacagaagatggccccacagaagcctgggctag

SEQ ID NO: 106212 - DNA, 1023 bp, synthetic construct
  misc_feature 1..1023: note = Description of Artificial Sequence: Synthetic coding sequence
  source 1..1023: mol_type = other DNA
atggagagcctgggcctgcacaccgtgaccctgagcgacggcaccaccgcctacgtgcagcaggccgtgaagggcgagaagctgctggagggccaggtgatccagctggaggacggcaccaccgcctacatccaccaggtgaccgtgcagaaggaggccctgagcttcgaggacggccagcccgtgcagctggaggacggcagcatggcctacatccacagaacccccagagagggctacgaccccagcaccctggaggccgtgcagctggaggacggcagcaccgcctacatccaccaccccgtggccgtgcccagcgagagcaccatcctggccgtgcagaccgaggtgggcctggaggacctggccgccgaggacgacgagggcttcagcgccgacgccgtggtggccctggagcagtacgccagcaaggtgctgcacgacagccagatccccagaaacggcaagggccagcaggtgggcgacagagccttcagatgcggctacaagggctgcggcagactgtacaccaccgcccaccacctgaaggtgcacgagagagcccacaccggcgacagaccctacagatgcgacttccccagctgcggcaaggccttcgccaccggctacggcctgaagagccacgtgagaacccacaccggcgagaagccctacaagtgccccgaggagctgtgcagcaaggccttcaagaccagcggcgacctgcagaagcacgtgagaacccacaccggcgagagacccttccagtgccccttcgagggctgcggcagaagcttcaccaccagcaacatcagaaaggtgcacgtgagaacccacaccggcgagagaccctacacctgccccgagccccactgcggcagaggcttcaccagcgccaccaactacaagaaccacgtgagaatccacaccggcgagaagccctacgtgtgcaccgtgcccggctgcggcaagagattcaccgagtacagcagcctgtacaagcaccacgtggtgcacacctag

SEQ ID NO: 106213 - DNA, 1638 bp, synthetic construct
  misc_feature 1..1638: note = Description of Artificial Sequence: Synthetic coding sequence
  source 1..1638: mol_type = other DNA
atggactgcgtgatcttcgaggaggtggccgtgaacttcacccccgaggagtgggccctgctggaccacgcccagagaagcctgtacagagacgtgatgctggagacctgcagaaacctggccagcctggactgctacatctacgtgagaaccagcggcagcagcagccagagagacgtgttcggcaacggcatcagcaacgacgaggagatcgtgaagttcaccggcagcgacagctggagcatcttcggcgagaactggagattcgacaacaccggcgaccagcaccagatcccccagagacacctgagaagccagctgggcagactgtgcgagagcaacgagggccaccagtgcggcgagaccctgagccagaccgccaacctgctggtgcacaagagctaccccaccgaggccaagcccagcgagtgcaccaagtgcggcaaggccttcgagaacagacagagaagccacaccggccagagaccctgcaaggagtgcggccaggcctgcagctgcctgagctgccagagcccccccatgaagacccagaccgtggagaagccctgcaactgccaggacagcagaaccgccagcgtgacctacgtgaagagcctgagcagcaagaagagctacgagtgccagaagtgcggcaaggccttcatctgccccagcagcttcagaggccacgtgaacagccaccacggccagaagacccacgcctgcaaggtgtgcggcaagaccttcatgtactacagctacctgaccagacacgtgagaacccacaccggcgagaagccctacgagtgcaaggagtgcggcaaggccttcagctgccccagctacttcagagagcacgtgagaacccacaccggcgagaagccctacgagtgcaagcactgcggcaagagcttcagctgctacagcagcttcagagaccacgtgagaacccacaccggcgagaagccctgccagtgcaagcactgcggcaaggccttcacctgctacagcagcctgagagagcacggcagaacccacagcggcgagaagccctacgagtgcaaggagtgcggcaaggccttcagataccccagcagcctgagagcccacatgagaatgcacaccggcgagaagccctacgtgtgcaagcagtgcggcaaggccttcggctgccccacctacttcagaagacacgtgaagacccacagcggcgtgaagccctaccagtgcaaggagtgcggcaaggcctacagcttcagcagcagcctgagaatccacgtgagaacccacaccggcgagaagcccttcgagtgcaagcactgcggcaaggccttcagctgccacagcagcctgagagagcacgtgagaacccacagcggcgagaagccctacgagtgcaaccagtgcggcaaggccttcagccacgcccagtacttccagaagcacgtgagaagccacagcggcgtgaagccctacgagtgcaccgagtgcggcaaggcctacagctgcagcagcagcctgagagtgcacgtgagaacccacaccggcgagagaccctacgagtgcaagcagtgcggcaagaccttcagatacctggccagcctgcaggcccacgtgagaacccacgccggcgcctag

SEQ ID NO: 106214 - DNA, 1308 bp, synthetic construct
  misc_feature 1..1308: note = Description of Artificial Sequence: Synthetic coding sequence
  source 1..1308: mol_type = other DNA
agactgtgcgagagcaacgagggccaccagtgcggcgagaccctgagccagaccgccaacctgctggtgcacaagagctaccccaccgaggccaagcccagcgagtgcaccaagtgcggcaagaccttcatgtactacagctacctgaccagacacgtgagaacccacaccggcgagaagccctacgagtgcaaggagtgcggcaaggccttcagctgccccagctacttcagagagcacgtgagaacccacaccggcgagaagccctacgagtgcaagcactgcggcaagagcttcagctgctacagcagcttcagagaccacgtgagaacccacaccggcgagaagccctgccagtgcaagcactgcggcaaggccttcacctgctacagcagcctgagagagcacggcagaacccacagcggcgagaagccctacgagtgcaaggagtgcggcaaggccttcagataccccagcagcctgagagcccacatgagaatgcacaccggcgagaagccctacgtgtgcaagcagtgcggcaaggccttcggctgccccacctacttcagaagacacgtgaagacccacagcggcgtgaagccctaccagtgcaaggagtgcggcaaggcctacagcttcagcagcagcctgagaatccacgtgagaacccacaccggcgagaagcccttcgagtgcaagcactgcggcaaggccttcagctgccacagcagcctgagagagcacgtgagaacccacagcggcgagaagccctacgagtgcaaccagtgcggcaaggccttcagccacgcccagtacttccagaagcacgtgagaagccacagcggcgtgaagccctacgagtgcaccgagtgcggcaaggcctacagctgcagcagcagcctgagagtgcacgtgagaacccacaccggcgagagaccctacgagtgcaagcagtgcggcaagaccttcagctggcccagcgacctgagagtgcacatgagaacccacagcggcgagaagagatgcggctgcaagcagtgcggcaagagcttcagcagccccagcagcttcaagggccacatcagaacccacaccggcgagaagctgtacacctgcagagagtgcggcaaggtgttcagcagccccagctacttcagaacccaggtgagaatccacatcggcgagaagccctacgtgtgcgagcagagaggcaaggtgttcagctggagcagcagcttcagaggccacctgagaacccacagcagagagaagccctacgagtgcaaggagtgcaccaaggccttctag

SEQ ID NO: 106215 - DNA, 1497 bp, synthetic construct
  misc_feature 1..1497: note = Description of Artificial Sequence: Synthetic coding sequence
  source 1..1497: mol_type = other DNA
atgctggaggagggcgtgctgcccagccccggccccgccctgccccaggaggagaacaccggcgaggagggcatggccgccggcctgctgaccgccggccccagaggcagcaccttcttcagcagcgtgaccgtggccttcgcccaggagagatggagatgcctggtgagcacccccagagacagattcaaggagggcatccccggcaagagcagaagcctggtgctgctgggcctgcccgtgagccagcccggcatgaacagccagctggagcagagagagggcgcctggatgctggagggcgaggacctgagaagccccagccccggctggaagatcatcagcggcagcccccccgagcaggccctgagcgaggccagcttccaggacccctgcgtggagatgccccccggcgacagcgaccacggcaccagcgacctggagaagagcttcaacctgagacccgtgctgagcccccagcagagagtgcccgtggaggccagacccagaaagtgcgagacccacaccgagagcttcaagaacagcgagatcctgaagccccacagagccaagccctacgcctgcaacgagtgcggcaaggccttcagctactgcagcagcctgagccagcaccagaagagccacaccggcgagaagccctacgagtgcagcgagtgcggcaaggccttcagccagagcagcagcctgatccagcaccagagaatccacaccggcgagaagccctacaagtgcagcgagtgcggcagagccttcagccagaacgccaacctgaccaagcaccagagaacccacaccggcgagaagccctacagatgcagcgagtgcgagaaggccttcagcgactgcagcgccctggtgcagcaccagagaatccacaccggcgagaagccctacgagtgcagcgactgcggcaaggccttcagacacagcgccaacctgaccaaccaccagagaacccacaccggcgagaagccctacaagtgcagcgagtgcggcaaggccttcagctactgcgccgccttcatccagcaccagagaatccacaccggcgagaagccctacagatgcgccgcctgcggcaaggccttcagccagagcgccaacctgaccaaccaccagagaacccacaccggcgagaagccctacaagtgcagcgagtgcggcaaggccttcagccagagcaccaacctgatcatccaccagaagacccacaccggcgagaagccctacaagtgcaacgagtgcggcaagttcttcagcgagagcagcgccctgatcagacaccacatcatccacaccggcgagaagccctacgagtgcaacgagtgcggcaaggccttcaaccagagcagcagcctgagccagcaccagagaatccacaccggcgtgaagccctacgagtgcagcgagtgcggcaaggccttcagatgcagcagcgccttcgtgagacaccagagactgcacgccggcgagtag

SEQ ID NO: 106216 - DNA, 1425 bp, synthetic construct
  misc_feature 1..1425: note = Description of Artificial Sequence: Synthetic coding sequence
  source 1..1425: mol_type = other DNA
atggccgccggcctgctgaccgccggccccagaggcagcaccttcttcagcagcgtgaccgtggccttcgcccaggagagatggagatgcctggtgagcacccccagagacagattcaaggagggcatccccggcaagagcagaagcctggtgctgctgggcctgcccgtgagccagcccggcatgaacagccagctggagcagagagagggcgcctggatgctggagggcgaggacctgagaagccccagccccggctggaagatcatcagcggcagcccccccgagcaggccctgagcgaggccagcttccaggacccctgcgtggagatgccccccggcgacagcgaccacggcaccagcgacctggagaagagcttcaacctgagacccgtgctgagcccccagcagagagtgcccgtggaggccagacccagaaagtgcgagacccacaccgagagcttcaagaacagcgagatcctgaagccccacagagccaagccctacgcctgcaacgagtgcggcaaggccttcagctactgcagcagcctgagccagcaccagaagagccacaccggcgagaagccctacgagtgcagcgagtgcggcaaggccttcagccagagcagcagcctgatccagcaccagagaatccacaccggcgagaagccctacaagtgcagcgagtgcggcagagccttcagccagaacgccaacctgaccaagcaccagagaacccacaccggcgagaagccctacagatgcagcgagtgcgagaaggccttcagcgactgcagcgccctggtgcagcaccagagaatccacaccggcgagaagccctacgagtgcagcgactgcggcaaggccttcagacacagcgccaacctgaccaaccaccagagaacccacaccggcgagaagccctacaagtgcagcgagtgcggcaaggccttcagctactgcgccgccttcatccagcaccagagaatccacaccggcgagaagccctacagatgcgccgcctgcggcaaggccttcagccagagcgccaacctgaccaaccaccagagaacccacaccggcgagaagccctacaagtgcagcgagtgcggcaaggccttcagccagagcaccaacctgatcatccaccagaagacccacaccggcgagaagccctacaagtgcaacgagtgcggcaagttcttcagcgagagcagcgccctgatcagacaccacatcatccacaccggcgagaagccctacgagtgcaacgagtgcggcaaggccttcaaccagagcagcagcctgagccagcaccagagaatccacaccggcgtgaagccctacgagtgcagcgagtgcggcaaggccttcagatgcagcagcgccttcgtgagacaccagagactgcacgccggcgagtag

SEQ ID NO: 106217 - DNA, 1728 bp, synthetic construct
  misc_feature 1..1728: note = Description of Artificial Sequence: Synthetic coding sequence
  source 1..1728: mol_type = other DNA
atggaccccgaggacgagggcgtggccggcgtgatgagcgtgggcccccccgccgccagactgcaggagcccgtgaccttcagagacgtggccgtggacttcacccaggaggagtggggccagctggaccccacccagagaatcctgtacagagacgtgatgctggagaccttcggccacctgctgagcatcggccccgagctgcccaagcccgaggtgatcagccagctggagcagggcaccgagctgtgggtggccgagagaggcaccacccagggctgccaccccgcctgggagcccagaagcgagagccaggccagcagaaaggaggagggcctgcccgaggaggagcccagccacgtgaccggcagagagggcttccccaccgacgccccctaccccaccaccctgggcaaggacagagagtgccagagccagagcctggccctgaaggagcagaacaacctgaagcagctggagttcggcctgaaggaggcccccgtgcaggaccagggctacaagaccctgagactgagagagaactgcgtgctgagcagcagccccaaccccttccccgagatcagcagaggcgagtacctgtacacctacgacagccagatcaccgacagcgagcacaacagcagcctggtgagccagcagaccggcagccccggcaagcagcccggcgagaacagcgactgccacagagacagcagccaggccatccccatcaccgagctgaccaagagccaggtgcaggacaagccctacaagtgcaccgactgcggcaagagcttcaaccacaacgcccacctgaccgtgcacaagagaatccacaccggcgagagaccctacatgtgcaaggagtgcggcaaggccttcagccagaacagcagcctggtgcagcacgagagaatccacaccggcgacaagccctacaagtgcgccgagtgcggcaagagcttctgccacagcacccacctgaccgtgcacagaagaatccacaccggcgagaagccctacgagtgccaggactgcggcagagccttcaaccagaacagcagcctgggcagacacaagagaacccacaccggcgagaagccctacacctgcagcgtgtgcggcaagagcttcagcagaaccacctgcctgttcctgcacctgagaacccacaccgaggagagaccctacgagtgcaaccactgcggcaagggcttcagacacagcagcagcctggcccagcaccagagaaagcacgccggcgagaagcccttcgagtgcagacagagactgatcttcgagcagacccccgccctgaccaagcacgagtggaccgaggccctgggctgcgacccccccctgagccaggacgagagaacccacagaagcgacagacccttcaagtgcaaccagtgcggcaagtgcttcatccagagcagccacctgatcagacaccagatcacccacaccagagaggagcagccccacggcagaagcagaagaagagagcagagcagcagcagaaacagccacctggtgcagcaccagcaccccaacagcagaaagagcagcgccggcggcgccaaggccggccagcccgagagcagagccctggccctgttcgacatccagaagatcatgcaggagaagaaccccgtgcacgtgatcggcgtggaggagcccagcgtgggcgccagcatgctgttcgacatcagagagagcacctag

SEQ ID NO: 106218 - DNA, 519 bp, synthetic construct
  misc_feature 1..519: note = Description of Artificial Sequence: Synthetic coding sequence
  source 1..519: mol_type = other DNA
atggaccccgaggacgagggcgtggccggcgtgatgagcgtgggcccccccgccgccagactgcaggtgaccatcaccaccatcaccaccgccgccggcagcggccaggccagccccgcccagaccgaccccttcaccagcagaagagacgagagcggcaccgccgtgaacgccctggacacctggggcaacagcgacgccggcagaggcgtggtgaccgtgctggccggccagagaggcggcagagacagcaaccaggcccccggccccagaatgagaatgctgcacgccgccctgagcagccccgcccccagaagcccctgccccggcgcctgggcccagcccctgggcggcaacgacggcagccccagaaccgagtgcgacgagagcgaccaccagggcagacccctgagagactgcggcagaaccgccgtgcagggcggccagtgcctgcagggccacctggccatcagagcccccctgagcagacagagcggctgcggcctgtgcagcccctag

SEQ ID NO: 106219 - DNA, 873 bp, synthetic construct
  misc_feature 1..873: note = Description of Artificial Sequence: Synthetic coding sequence
  source 1..873: mol_type = other DNA
atgtgcaaggagtgcggcaaggccttcagccagaacagcagcctggtgcagcacgagagaatccacaccggcgacaagccctacaagtgcgccgagtgcggcaagagcttctgccacagcacccacctgaccgtgcacagaagaatccacaccggcgagaagccctacgagtgccaggactgcggcagagccttcaaccagaacagcagcctgggcagacacaagagaacccacaccggcgagaagccctacacctgcagcgtgtgcggcaagagcttcagcagaaccacctgcctgttcctgcacctgagaacccacaccgaggagagaccctacgagtgcaaccactgcggcaagggcttcagacacagcagcagcctggcccagcaccagagaaagcacgccggcgagaagcccttcgagtgcagacagagactgatcttcgagcagacccccgccctgaccaagcacgagtggaccgaggccctgggctgcgacccccccctgagccaggacgagagaacccacagaagcgacagacccttcaagtgcaaccagtgcggcaagtgcttcatccagagcagccacctgatcagacaccagatcacccacaccagagaggagcagccccacggcagaagcagaagaagagagcagagcagcagcagaaacagccacctggtgcagcaccagcaccccaacagcagaaagagcagcgccggcggcgccaaggccggccagcccgagagcagagccctggccctgttcgacatccagaagatcatgcaggagaagaaccccgtgcacgtgatcggcgtggaggagcccagcgtgggcgccagcatgctgttcgacatcagagagagcacctag

SEQ ID NO: 106220 - DNA, 822 bp, synthetic construct
  misc_feature 1..822: note = Description of Artificial Sequence: Synthetic coding sequence
  source 1..822: mol_type = other DNA
atgagccccaagagagacggcctgggcaccggcgacggcctgcacagccaggtgctgcaggagcaggtgagcaccggcgacaacctgcacgagtgcgacagccagggccccagcaaggacaccctggtgagagagggcaagacctacaagtgcaaggagtgcggcagcgtgttcaacaagaacagcctgctggtgagacaccagcagatccacaccggcgtgaagccctacgagtgccaggagtgcggcaaggccttccccgagaaggtggacttcgtgagacccatgagaatccacaccggcgagaagccctgcaagtgcgtggagtgcggcaaggtgttcaacagaagaagccacctgctgtgctacagacagatccacaccggcgagaagccctacgagtgcagcgagtgcggcaagaccttcagctaccacagcgtgttcatccagcacagagtgacccacaccggcgagaagctgttcggctgcaaggagtgcggcaagaccttctactacaacagcagcctgaccagacacatgaagatccacaccggcgagaagccctgcaagtgcagcgagtgcggcaagaccttcacctacagaagcgtgttcttcagacacagcatgacccacaccgccggcaagccctacgagtgcaaggagtgcggcaagggcttctactacagctacagcctgaccagacacaccagaagccacaccggcgagaagccctacgagtgcctggagcacagaaaggacttcggctaccacagcgccttcgcccagcagagcaagatccacagcggcggcaagaacctgtag

SEQ ID NO: 106221 - DNA, 822 bp, synthetic construct; identical to SEQ ID NO: 106220
  misc_feature 1..822: note = Description of Artificial Sequence: Synthetic coding sequence
  source 1..822: mol_type = other DNA

SEQ ID NO: 106222 - DNA, 3630 bp, synthetic construct
  misc_feature 1..3630: note = Description of Artificial Sequence: Synthetic coding sequence
  source 1..3630: mol_type = other DNA
atggagtgctactacatcgtgatcagcagcacccacctgagcaacggccacttcagaaacatcaagggcgtgttcagaggccccctgagcaagaacggcaacaagaccctggactacgccgagaaggagaacaccatcgccaaggccctggaggacctgaaggccaacttctactgcgagctgtgcgacaagcagtactacaagcaccaggagttcgacaaccacatcaacagctacgaccacgcccacaagcagagactgaaggagctgaagcagagagagttcgccagaaacgtggccagcaagagcagaaaggacgagagaaagcaggagaaggccctgcagagactgcacaagctggccgagctgagaaaggagaccgtgtgcgcccccggcagcggccccatgttcaagagcaccaccgtgaccgtgagagagaactgcaacgagatcagccagagagtggtggtggacagcgtgaacaaccagcaggacttcaagtacaccctgatccacagcgaggagaacaccaaggacgccaccaccgtggccgaggaccccgagagcgccaacaactacaccgccaagaacaaccaggtgggcgaccaggcccagggcatccacagacacaagatcggcttcagcttcgccttccccaagaaggccagcgtgaagctggagagcagcgccgccgccttcagcgagtacagcgacgacgccagcgtgggcaagggcttcagcagaaagagcagattcgtgcccagcgcctgccacctgcagcagagcagccccaccgacgtgctgctgagcagcgaggagaagaccaacagcttccacccccccgaggccatgtgcagagacaaggagaccgtgcagacccaggagatcaaggaggtgagcagcgagaaggacgccctgctgctgcccagcttctgcaagttccagctgcagctgagcagcgacgccgacaactgccagaacagcgtgcccctggccgaccagatccccctggagagcgtggtgatcaacgaggacatccccgtgagcggcaacagcttcgagctgctgggcaacaagagcaccgtgctggacatgagcaacgactgcatcagcgtgcaggccaccaccgaggagaacgtgaagcacaacgaggccagcaccaccgaggtggagaacaagaacggccccgagaccctggcccccagcaacaccgaggaggtgaacatcaccatccacaagaagaccaacttctgcaagagacagtgcgagcccttcgtgcccgtgctgaacaagcacagaagcaccgtgctgcagtggcccagcgagatgctggtgtacaccaccaccaagcccagcatcagctacagctgcaaccccctgtgcttcgacttcaagagcaccaaggtgaacaacaacctggacaagaacaagcccgacctgaaggacctgtgcagccagcagaagcaggaggacatctgcatgggccccctgagcgactacaaggacgtgagcaccgagggcctgaccgactacgagatcggcagcagcaagaacaagtgcagccaggtgacccccctgctggccgacgacatcctgagcagcagctgcgacagcggcaagaacgagaacaccggccagagatacaagaacatcagctgcaagatcagagagaccgagaagtacaacttcaccaagagccagatcaagcaggacaccctggacgagaagtacaacaagatcagactgaaggagacccacgagtactggttccacaagagcagaagaaagaagaagagaaagaagctgtgccagcaccaccacatggagaagaccaaggagagcgagaccagatgcaagatggaggccgagaacagctacaccgagaacgccggcaagtacctgctggagcccatcagcgagaagcagtacctggccgccgagcagctgctggacagccaccagctgctggacaagagacccaagagcgagagcatcagcctgagcgacaacgaggagatgtgcaagacctggaacaccgagtacaacacctacgacaccatcagcagcaagaaccactgcaagaagaacaccatcctgctgaacggccagagcaacgccaccatgatccacagcggcaagcacaacctgacctacagcagaacctactgctgctggaagaccaagatgagcagctgcagccaggaccacagaagcctggtgctgcagaacgacatgaagcacatgagccagaaccaggccgtgaagagaggctacaacagcgtgatgaacgagagcgagagattctacagaaagagaagacagcacagccacagctacagcagcgacgagagcctgaacagacagaaccacctgcccgaggagttcctgagaccccccagcaccagcgtggccccctgcaagcccaagaagaagagaagaagaaagagaggcagattccaccccggcttcgagaccctggagctgaaggagaacaccgactaccccgtgaaggacaacagcagcctgaaccccctggacagactgatcagcgaggacaagaaggagaagatgaagccccaggaggtggccaagatcgagagaaacagcgagcagaccaaccagctgagaaacaagctgagcttccaccccaacaacctgctgcccagcgagaccaacggcgagaccgagcacctggagatggagaccaccagcggcgagctgagcgacgtgagcaacgaccccaccaccagcgtgtgcgtggccagcgcccccaccaaggaggccatcgacaacaccctgctggagcacaaggagagaagcgagaacatcaacctgaacgagaagcagatccccttccaggtgcccaacatcgagagaaacttcagacagagccagcccaagagctacctgtgccactacgagctggccgaggccctgccccagggcaagatgaacgagacccccaccgagtggctgagatacaacagcggcatcctgaacacccagccccccctgcccttcaaggaggcccacgtgagcggccacaccttcgtgaccgccgagcagatcctggcccccctggccctgcccgagcaggccctgctgatccccctggagaaccacgacaagttcaagaacgtgccctgcgaggtgtaccagcacatcctgcagcccaacatgctggccaacaaggtgaagttcaccttcccccccgccgccctgcccccccccagcacccccctgcagcccctgcccctgcagcagagcctgtgcagcaccagcgtgaccaccatccaccacaccgtgctgcagcagcacgccgccgccgccgccgccgccgccgccgccgccgccgccggcaccttcaaggtgctgcagccccaccagcagttcctgagccagatccccgccctgaccagaaccagcctgccccagctgagcgtgggccccgtgggccccagactgtgccccggcaaccagcccaccttcgtggcccccccccagatgcccatcatccccgccagcgtgctgcaccccagccacctggccttccccagcctgccccacgccctgttccccagcctgctgagcccccaccccaccgtgatccccctgcagcccctgttctag

SEQ ID NO: 106223 - DNA, 210 bp, synthetic construct
  misc_feature 1..210: note = Description of Artificial Sequence: Synthetic coding sequence
  source 1..210: mol_type = other DNA
atgcccgccaacgaggacgccccccagcccggcgagcacggcagcgcctgcgaggtgagcgtgagcttcgaggacgtgaccgtggacttcagcagagaggagtggcagcagctggacagcacccagagaagactgtaccaggacgtgatgctggagaactacagccacctgctgagcgtgggcaaggacaaccaccccgtgaagctgtag

SEQ ID NO: 106224 - DNA, 1986 bp, synthetic construct
  misc_feature 1..1986: note = Description of Artificial Sequence: Synthetic coding sequence
  source 1..1986: mol_type = other DNA
atgcccgccaacgaggacgccccccagcccggcgagcacggcagcgcctgcgaggtgagcgtgagcttcgaggacgtgaccgtggacttcagcagagaggagtggcagcagctggacagcacccagagaagactgtaccaggacgtgatgctggagaactacagccacctgctgagcgtgggcttcgaggtgcccaagcccgaggtgatcttcaagctggagcagggcgagggcccctggaccctggagggcgaggccccccaccagagctgcagcgacggcaagttcggcatcaagcccagccagagaagaatcagcggcaagagcaccttccacagcgagatggagggcgaggacaccagagacgacagcctgtacagcatcctggaggagctgtggcaggacgccgagcagatcaagagatgccaggagaagcacaacaagctgctgagcagaaccaccttcctgaacaagaagatcctgaacaccgagtgggactacgagtacaaggacttcggcaagttcgtgcaccccagccccaacctgatcctgagccagaagagaccccacaagagagacagcttcggcaagagcttcaagcacaacctggacctgcacatccacaacaagagcaacgccgccaagaacctggacaagaccatcggccacggccaggtgttcacccagaacagcagctacagccaccacgagaacacccacaccggcgtgaagttctgcgagagaaaccagtgcggcaaggtgctgagcctgaagcacagcctgagccagaacgtgaagttccccatcggcgagaaggccaacacctgcaccgagttcggcaagatcttcacccagagaagccacttcttcgccccccagaagatccacaccgtggagaagccccacgagctgagcaagtgcgtgaacgtgttcacccagaagcccctgctgagcatctacctgagagtgcacagagacgagaagctgtacatctgcaccaagtgcggcaaggccttcatccagaacagcgagctgatcatgcacgagaagacccacaccagagagaagccctacaagtgcaacgagtgcggcaagagcttcttccaggtgagcagcctgctgagacaccagaccacccacaccggcgagaagctgttcgagtgcagcgagtgcggcaagggcttcagcctgaacagcgccctgaacatccaccagaagatccacaccggcgagagacaccacaagtgcagcgagtgcggcaaggccttcacccagaagagcaccctgagaatgcaccagagaatccacaccggcgagagaagctacatctgcacccagtgcggccaggccttcatccagaaggcccacctgatcgcccaccagagaatccacaccggcgagaagccctacgagtgcagcgactgcggcaagagcttccccagcaagagccagctgcagatgcacaagagaatccacaccggcgagaagccctacatctgcaccgagtgcggcaaggccttcaccaacagaagcaacctgaacacccaccagaagagccacaccggcgagaagagctacatctgcgccgagtgcggcaaggccttcaccgacagaagcaacttcaacaagcaccagaccatccacaccggcgagaagccctacgtgtgcgccgactgcggcagagccttcatccagaagagcgagctgatcacccaccagagaatccacaccaccgagaagccctacaagtgccccgactgcgagaagagcttcagcaagaagccccacctgaaggtgcaccagagaatccacaccggcgagaagccctacatctgcgccgagtgcggcaaggccttcaccgacagaagcaacttcaacaagcaccagaccatccacaccggcgacaagccctacaagtgcagcgactgcggcaagggcttcacccagaagagcgtgctgagcatgcacagaaacatccacacctag

SEQ ID NO: 106225 - DNA, 312 bp, synthetic construct
  misc_feature 1..312: note = Description of Artificial Sequence: Synthetic coding sequence
  source 1..312: mol_type = other DNA
atgcccgccaacgaggacgccccccagcccggcgagcacggcagcgcctgcgaggtgagcgtgagcttcgaggacgtgaccgtggacttcagcagagaggagtggcagcagctggacagcacccagagaagactgtaccaggacgtgatgctggagaactacagccacctgctgagcgtgggcttcgaggtgcccaagcccgaggtgatcttcaagctggagcagggcgagggcccctggaccctggagggcgaggccccccaccagagctgcagcggcatcagcacctacttcgtgaccagcaccgtgtag

SEQ ID NO: 106226 - DNA, 1986 bp, synthetic construct; identical to SEQ ID NO: 106224
  misc_feature 1..1986: note = Description of Artificial Sequence: Synthetic coding sequence
  source 1..1986: mol_type = other DNA

SEQ ID NO: 106227 - DNA, 369 bp, synthetic construct
  misc_feature 1..369: note = Description of Artificial Sequence: Synthetic coding sequence
  source 1..369: mol_type = other DNA
atgcccgccaacgaggacgccccccagcccggcgagcacggcagcgcctgcgaggtgagcgtgagcttcgaggacgtgaccgtggacttcagcagagaggagtggcagcagctggacagcacccagagaagactgtaccaggacgtgatgctggagaactacagccacctgctgagcgtgggcttcgaggtgcccaagcccgaggtgatcttcaagctggagcagggcgagggcccctggaccctggagggcgaggccccccaccagagctgcagcgacggcaagttcggcatcaagcccagccagagaagaatcagcggcaagagcaccttccacagcgagatggagggcgaggacaccctgtgctag

SEQ ID NO: 106228 - DNA, 1551 bp, synthetic construct
  misc_feature 1..1551: note = Description of Artificial Sequence: Synthetic coding sequence
  source 1..1551: mol_type = other DNA
atgcacggcagaaaggacgacgcccagaagcagcccgtgaagaaccagctgggcctgaacccccagagccacctgcccgagctgcagctgttccaggccgagggcaagatctacaagtacgaccacatggagaagagcgtgaacagcagcagcctggtgagccccccccagagaatcagcagcaccgtgaagacccacatcagccacacctacgagtgcaacttcgtggacagcctgttcacccagaaggagaaggccaacatcggcaccgagcactacaagtgcagcgagagaggcaaggccttccaccagggcctgcacttcaccatccaccagatcatccacaccaaggagacccagttcaagtgcgacatctgcggcaagatcttcaacaagaagagcaacctggccagccaccagagaatccacaccggcgagaagccctacaagtgcaacgagtgcggcaaggtgttccacaacatgagccacctggcccagcacagaagaatccacaccggcgagaagccctacaagtgcaacgagtgcggcaaggtgttcaaccagatcagccacctggcccagcaccagagaatccacaccggcgagaagccctacaagtgcaacgagtgcggcaaggtgttccaccagatcagccacctggcccagcacagaaccatccacaccggcgagaagccctacgagtgcaacaagtgcggcaaggtgttcagcagaaacagctacctggtgcagcacctgatcatccacaccggcgagaagccctacagatgcaacgtgtgcggcaaggtgttccaccacatcagccacctggcccagcaccagagaatccacaccggcgagaagccctacaagtgcaacgagtgcggcaaggtgttcagccacaagagcagcctggtgaaccactggagaatccacaccggcgagaagccctacaagtgcaacgagtgcggcaaggtgttcagccacaagagcagcctggtgaaccactggagaatccacaccggcgagaagccctacaagtgcaacgagtgcggcaaggtgttcagcagaaacagctacctggcccagcacctgatcatccacgccggcgagaagccctacaagtgcgacgagtgcgacaaggccttcagccagaacagccacctggtgcagcaccacagaatccacaccggcgagaagccctacaagtgcgacgagtgcggcaaggtgttcagccagaacagctacctggcctaccactggagaatccacaccggcgagaaggcctacaagtgcaacgagtgcggcaaggtgttcggcctgaacagcagcctggcccaccacagaaagatccacaccggcgagaagcccttcaagtgcaacgagtgcggcaaggccttcagcatgagaagcagcctgaccaaccaccacgccatccacaccggcgagaagcacttcaagtgcaacgagtgcggcaagctgttcagagacaacagctacctggtgagacaccagagattccacgccggcaagaagagcaacacctgcaactag

SEQ ID NO: 106229 - DNA, 1467 bp, synthetic construct
  misc_feature 1..1467: note = Description of Artificial Sequence: Synthetic coding sequence
  source 1..1467: mol_type = other DNA
atgcacggcagaaaggacgacgcccagaagcagcccgtgaagaaccagctgggcctgaacccccagagccacctgcccgagctgcagctgttccaggccgagggcaagatctacaagtacgaccacatggagaagagcgtgaacagcagcagcctggtgagccccccccagagaatcagcagcaccgtgaagacccacatcagccacacctacgagtgcaacttcgtggacagcctgttcacccagaaggagaaggccaacatcggcaccgagcactacaagtgcagcgagagaggcaaggccttccaccagggcctgcacttcaccatccaccagatcatccacaccaaggagacccagttcaagtgcgacatctgcggcaagatcttcaacaagaagagcaacctggccagccaccagagaatccacaccggcgagaagccctacaagtgcaacgagtgcggcaaggtgttccacaacatgagccacctggcccagcacagaagaatccacaccggcgagaagccctacaagtgcaacgagtgcggcaaggtgttcaaccagatcagccacctggcccagcaccagagaatccacaccggcgagaagccctacaagtgcaacgagtgcggcaaggtgttccaccagatcagccacctggcccagcacagaaccatccacaccggcgagaagccctacgagtgcaacaagtgcggcaaggtgttcagcagaaacagctacctggtgcagcacctgatcatccacaccggcgagaagccctacagatgcaacgtgtgcggcaaggtgttcagccacaagagcagcctggtgaaccactggagaatccacaccggcgagaagccctacaagtgcaacgagtgcggcaaggtgttcagccacaagagcagcctggtgaaccactggagaatccacaccggcgagaagccctacaagtgcaacgagtgcggcaaggtgttcagcagaaacagctacctggcccagcacctgatcatccacgccggcgagaagccctacaagtgcgacgagtgcgacaaggccttcagccagaacagccacctggtgcagcaccacagaatccacaccggcgagaagccctacaagtgcgacgagtgcggcaaggtgttcagccagaacagctacctggcctaccactggagaatccacaccggcgagaaggcctacaagtgcaacgagtgcggcaaggtgttcggcctgaacagcagcctggcccaccacagaaagatccacaccggcgagaagcccttcaagtgcaacgagtgcggcaaggccttcagcatgagaagcagcctgaccaaccaccacgccatccacaccggcgagaagcacttcaagtgcaacgagtgcggcaagctgttcagagacaacagctacctggtgagacaccagagattccacgccggcaagaagagcaacacctgcaactag

SEQ ID NO: 106230 - DNA, 1467 bp, synthetic construct; identical to SEQ ID NO: 106229
  misc_feature 1..1467: note = Description of Artificial Sequence: Synthetic coding sequence
  source 1..1467: mol_type = other DNA

SEQ ID NO: 106231 - DNA, 1551 bp, synthetic construct; identical to SEQ ID NO: 106228
  misc_feature 1..1551: note = Description of Artificial Sequence: Synthetic coding sequence
  source 1..1551: mol_type = other DNA

SEQ ID NO: 106232 - DNA, 1551 bp, synthetic construct; identical to SEQ ID NO: 106228
  misc_feature 1..1551: note = Description of Artificial Sequence: Synthetic coding sequence
  source 1..1551: mol_type = other DNA

SEQ ID NO: 106233 - DNA, 1551 bp, synthetic construct; identical to SEQ ID NO: 106228
  misc_feature 1..1551: note = Description of Artificial Sequence: Synthetic coding sequence
  source 1..1551: mol_type = other DNA

SEQ ID NO: 106234 - DNA, 1551 bp, synthetic construct; identical to SEQ ID NO: 106228
  misc_feature 1..1551: note = Description of Artificial Sequence: Synthetic coding sequence
  source 1..1551: mol_type = other DNA

SEQ ID NO: 106235 - DNA, 5034 bp, synthetic construct
  misc_feature 1..5034: note = Description of Artificial Sequence: Synthetic coding sequence
  source 1..5034: mol_type = other DNA
atggaggtgcccgagcccacctgccccgccccccccgccagagaccagcccgcccccacccccggcccccccggcgcccccggcggccaggccagcccccacctgaccctgggccccgtgctgctgccccccgagcagggcctggccccccccaccgtgttcctgaaggccctgcccatccccctgtaccacaccgtgccccccggcggcctgcagcccagagcccccctggtgaccggcagcctggacggcggcaacgtgcccttcatcctgagccccgtgctgcagcccgagggccccggccccacccaggtgggcaagcccgccgcccccaccctgaccgtgaacatcgtgggcaccctgcccgtgctgagccccggcctgggccccaccctgggcagccccggcaaggtgagaaacgccggcaagtacctgtgcccccactgcggcagagactgcctgaagcccagcgtgctggagaagcacatcagaagccacaccggcgagagacccttcccctgcgccacctgcggcatcgccttcaagacccagagcaacctgtacaagcacagaagaacccagacccacctgaacaacagcagactgagcagcgagagcgagggcgccggcggcggcctgctggaggagggcgacaaggccggcgagccccccagacccgagggcagaggcgagagcagatgccagggcatgcacgagggcgccagcgagagacccctgagccccggcgcccacgtgcccctgctggccaagaacctggacgtgagaaccgaggccgccccctgccccggcagcgccttcgccgacagagaggccccctgggacagcgcccccatggccagccccggcctgcccgccgccagcacccagccctggagaaagctgcccgagcagaagagccccaccgccggcaagccctgcgccctgcagagacagcaggccaccgccgccgagaagccctgggacgccaaggcccccgagggcagactgagaaagtgcgagagcaccgacagcggctacctgagcagaagcgacagcgccgagcagccccacgccccctgcagccccctgcacagcctgagcgagcacagcgccgagagcgagggcgagggcggccccggccccggccccggcgtggccggcgccgagcccggcgccagagaggccggcctggagctggagaagaagagactggaggagagaatcgcccagctgatcagccacaaccaggccgtggtggacgacgcccagctggacaacgtgagacccagaaagaccggcctgagcaagcagggcagcatcgacctgcccaccccctacacctacaaggacagcttccacttcgacatcagagccctggagcccggcagaagaagagcccccggccccgtgagaagcacctggaccccccccgacaagagcagacccctgttcttccacagcgtgcccacccagctgagcaccaccgtggagtgcgtgcccgtgaccagaagcaacagcctgcccttcgtggagggcagcagaacctggctggagcccagagagcccagagacccctggagcagaacccagaagcccctgagccccagacccggccccgccagactgggctgcagaagcggcctgagcagcaccgacgtgcccagcggccaccccagagccctggtgagacaggccgccgtggaggacctgcccggcacccccatcggcgacgccctggtgcccgccgaggacaccgacgccaagagaaccgccgccagagaggccatggccggcaagggcagagccggcggcagaaagtgcggccagagaagactgaagatgttcagccaggagaagtggcaggtgtacggcgacgagaccttcaagagaatctaccagaagatgaaggccagcccccacggcggcaagaaggccagagaggtgggcatgggcagcggcgccgagctgggcttccccctgcagaaggaggccgccggcagcagcggcaccgtgcccacccaggacagaagaacccccgtgcacgaggacatcagcgccggcgccacccccgagccctggggcaacccccccgccctggaggccagcctggtgaccgagcccaccaagcacggcgagaccgtggccagaagaggcgacagcgacagacccagagtggaggaggccgtgagcagccccgccctgggcggcagagacagcccctgcagcggcagcagaagccccctggtgagccccaacggcagactggagctgggctggcagatgccccccgcccccggccccctgaagggcggcgacgtggaggcccccagacccgtgtggcccgaccccaagctggagggcggcgccagaggcgtgggcgacgtgcaggagacctgcctgtgggcccagaccgtgctgagatggcccagcagaggcagcggcgaggacaagctgcccagcgagagaaagaagctgaaggtggaggacctgcacagctggaagcagcccgagcccgtgagcgccgagacccccggcggccccacccagcccgccagcctgagcagccagaagcaggacgccgaccccggcgaggtgcccggcggcagcaaggagagcgccagacaggtgggcgagcccctggagagcagcggcgccagcctggccgccgccagcgtggccctgaagagagtgggccccagagacaaggccacccccctgcaccccgccgcccccgcccccgccgagcaccccagcctggccacccccccccaggcccccagagtgctgagcgccctggccgacaacgccttcagccccaagtacctgctgagactgccccaggccgagacccccctgcccctgcccatcccctggggccccagacacagccaggacagcctgtgcagcagcggctggcccgaggagagagccagcttcgtgggcagcggcctgggcacccccctgagccccagccccgccagcggccccagccccggcgaggccgacagcatcctggaggaccccagctgcagcagaccccaggacggcagaaagggcgcccagctgggcggcgacaagggcgacagaatggccaccagcagacccgccgccagagagctgcccatcagcgcccccggcgcccccagagaggccaccagcagcccccccacccccacctgcgaggcccacctggtgcaggacatggagggcgacagccacagaatccacagactgtgcatgggcagcaccctggccagagccagactgagcggcgacgtgctgaacccctgggtgcccaactgggagctgggcgagccccccggcaacgcccccgaggaccccagcagcggccccctggtgggccccgacccctgcagccccctgcagcccggcagcttcctgaccgccctgaccagaccccagggcgtgccccccggctggcccgagctggccctgagcagccacagcggcaccagcagaagccacagcaccagaagcccccacagcacccagaaccccttccccagcctgaaggccgagcccagactgacctggtgctgcctgagcagaagcgtgcccctgcccgccgagcagaaggccaaggccgccagcgtgtacctggccgtgcacttccccggcagcagcctgagagacgagggccccaacggcccccccggcagcaacggcggctggacctggaccagccccggcgagggcggccccgcccagatgagcaagttcagctaccccaccgtgcccggcgtgatgccccagcaccaggtgagcgagcccgagtggaagaagggcctgccctggagagccaagatgagcagaggcaacagcaagcagagaaagctgaagatcaaccccaagagatacaagggcaacttcctgcagagctgcgtgcagctgagagccagcagactgagaacccccacctgggtgagaagaagaagcagacacccccccgccctggagggcctgaagccctgcagaacccccggccagaccagcagcgagatcgccggcctgaacctgcaggaggagcccagctgcgccaccagcgagagccccccctgctgcggcaaggaggagaagaaggagggcgactgcagacagaccctgggcaccctgagcctgggcaccagcagcagaatcgtgagagagatggacaagagaaccgtgaaggacatcagccccagcgccggcgagcacggcgactgcaccacccacagcaccgccgccaccagcggcctgagcctgcagagcgacacctgcctggccgtggtgaacgacgtgcccctgccccccggcaagggcctggacctgggcctgctggagacccagctgctggccagccaggacagcgtgagcaccgaccccaagccctacatcttcagcgacgcccagagacccagcagcttcggcagcaagggcaccttcccccaccacgacatcgccaccagcgtggccgccgtgtgcatcagcctgcccgtgagaaccgaccacatcgcccaggagatccacagcgccgagagcagagaccacagccagaccgccggcagaaccctgaccagcagcagccccgacagcaaggtgaccgaggagggcagagcccagaccctgctgcccggcagacccagcagcggccagagaatcagcgacagcgtgcccctggagagcaccgagaagacccacctggagatccccgccagcggccccagcagcgccagcagccaccacaaggagggcagacacaagaccttcttccccagcagaggccagtacggctgcggcgagatgaccgtgccctgccccagcctgggcagcgacggcagaaagagacaggtgagcggcctgatcaccagaaaggacagcgtggtgcccagcaagcccgagcagcccatcgagatccccgaggcccccagcaagagcctgaagaagagaagcctggagggcatgagaaagcagaccagagtggagttcagcgacaccagcagcgacgacgaggacagactggtgatcgagatctag

SEQ ID NO: 106236 - DNA, 264 bp, synthetic construct
  misc_feature 1..264: note = Description of Artificial Sequence: Synthetic coding sequence
  source 1..264: mol_type = other DNA
atgggccccctgaccttcagagacgtggccatcgagttcagcctgaaggagtggcagtgcctggacaccgcccagagaaacctgtacagaaacgtgatgctggagaactacagaaacctggtgttcctgggcatcaccgtgagcaagcccgacctgatcacctgcctggagcagggcaaggaggcctggagcatgaagagacacgagatcatggtggccaagcccaccgagagctacagcgtgacccagagcggcatgcagtag

SEQ ID NO: 106237 - DNA, 1788 bp, synthetic construct
  misc_feature 1..1788: note = Description of Artificial Sequence: Synthetic coding sequence
  source 1..1788: mol_type = other DNA
atgggccccctgaccttcagagacgtggccatcgagttcagcctgaaggagtggcagtgcctggacaccgcccagagaaacctgtacagaaacgtgatgctggagaactacagaaacctggtgttcctgggcatcaccgtgagcaagcccgacctgatcacctgcctggagcagggcaaggaggcctggagcatgaagagacacgagatcatggtggccaagcccaccgtgatgtgcagccacttcgcccaggacctgtggcccgagcagaacatcaaggacagcttccagaaggtgaccctgaagagatacggcaagtgcagacacgagaacctgcccctgagaaagggctgcgagagcatggacgagtgcaagatgcacaagggcggctgcaacggcctgaaccagtgcctgaccgccacccagagcaagatcttccagtgcgacaagtacgtgaaggtggcccacaagttcagcaacagcaacagacacgagatcagacacaccaagaagaagcccttcaagtgcaccaagtgcggcaagagcttcggcatgatcagctgcctgaccgagcacagcagaatccacaccagagtgaacttctacaagtgcgaggagtgcggcaaggccttcaactggagcagcaccctgaccaagcacaagagaatccacaccggcgagaagccctacaagtgcgaggagtgcggcaaggccttcaaccagagcagcaacctgatcaagcacaagaagatccacaccggcgagaagccctacaagtgcgaggagtgcggcaagaccttcaacagattcagcaccctgaccacccacaagatcatccacaccggcgagaagccctacaagtgcaaggagtgcggcaaggccttcaacagaagcagcaccctgaccacccacagaaagatccacaccggcgagaagccctacaagtgcgaggagtgcggcaaggccttcaagcagagcagcaacctgaccacccacaagatcatccacaccggcgagaagccctacaagtgcaagaagtgcggcaaggccttcaaccagagcgcccacctgaccacccacgaggtgatccacaccggcgagaagccctacaagtgcgagaagtgcggcaaggccttcaaccacttcagccacctgaccacccacaagatcatccacaccggcgagaagccctacaagtgcaaggagtgcggcaaggccttcaagcacagcagcaccctgaccaagcacaagatcatccacaccggcgagaagccctacaagtgcaaggagtgcgagaaggccttcaaccagagcagcaagctgaccgagcacaagaagatccacaccggcgagaagccctacgagtgcgagaagtgcggcaaggccttcaaccagagcagcaacctgaccagacacaagaagagccacaccgaggagaagccctacaagtgcgaggagtgcggcaagggcttcaagtggcccagcaccctgaccatccacaagatcatccacaccggcgagaagccctacaagtgcgaggagtgcggcaaggccttcaaccagagcagcaagctgaccaagcacaagaagatccacaccggcgagaagccctacacctgcgaggagtgcggcaaggccttcaaccagagcagcaacctgaccaagcacaagagaatccacaccggcgagaagccctacaagtgcgaggagtgcgacaaggccttcaagtggagcagcgtgctgaccaagcacaagatcatccacaccggcgagaagctgcagatctag

SEQ ID NO: 106238 - DNA, 1689 bp, synthetic construct
  misc_feature 1..1689: note = Description of Artificial Sequence: Synthetic coding sequence
  source 1..1689: mol_type = other DNA
atgggccccctgaccttcagagacgtggccatcgagttcagcctgaaggagtggcagtgcctggacaccgcccagagaaacctgtacagaaacgtgatgctggagaactacagaaacctggtgttcctggtgatgtgcagccacttcgcccaggacctgtggcccgagcagaacatcaaggacagcttccagaaggtgaccctgaagagatacggcaagtgcagacacgagaacctgcccctgagaaagggctgcgagagcatggacgagtgcaagatgcacaagggcggctgcaacggcctgaaccagtgcctgaccgccacccagagcaagatcttccagtgcgacaagtacgtgaaggtggcccacaagttcagcaacagcaacagacacgagatcagacacaccaagaagaagcccttcaagtgcaccaagtgcggcaagagcttcggcatgatcagctgcctgaccgagcacagcagaatccacaccagagtgaacttctacaagtgcgaggagtgcggcaaggccttcaactggagcagcaccctgaccaagcacaagagaatccacaccggcgagaagccctacaagtgcgaggagtgcggcaaggccttcaaccagagcagcaacctgatcaagcacaagaagatccacaccggcgagaagccctacaagtgcgaggagtgcggcaagaccttcaacagattcagcaccctgaccacccacaagatcatccacaccggcgagaagccctacaagtgcaaggagtgcggcaaggccttcaacagaagcagcaccctgaccacccacagaaagatccacaccggcgagaagccctacaagtgcgaggagtgcggcaaggccttcaagcagagcagcaacctgaccacccacaagatcatccacaccggcgagaagccctacaagtgcaagaagtgcggcaaggccttcaaccagagcgcccacctgaccacccacgaggtgatccacaccggcgagaagccctacaagtgcgagaagtgcggcaaggccttcaaccacttcagccacctgaccacccacaagatcatccacaccggcgagaagccctacaagtgcaaggagtgcggcaaggccttcaagcacagcagcaccctgaccaagcacaagatcatccacaccggcgagaagccctacaagtgcaaggagtgcgagaaggccttcaaccagagcagcaagctgaccgagcacaagaagatccacaccggcgagaagccctacgagtgcgagaagtgcggcaaggccttcaaccagagcagcaacctgaccagacacaagaagagccacaccgaggagaagccctacaagtgcgaggagtgcggcaagggcttcaagtggcccagcaccctgaccatccacaagatcatccacaccggcgagaagccctacaagtgcgaggagtgcggcaaggccttcaaccagagcagcaagctgaccaagcacaagaagatccacaccggcgagaagccctacacctgcgaggagtgcggcaaggccttcaaccagagcagcaacctgaccaagcacaagagaatccacaccggcgagaagccctacaagtgcgaggagtgcgacaaggccttcaagtggagcagcgtgctgaccaagcacaagatcatccacaccggcgagaagctgcagatctag

SEQ ID NO: 106239 - DNA, 1413 bp, synthetic construct
  misc_feature 1..1413: note = Description of Artificial Sequence: Synthetic coding sequence
  source 1..1413: mol_type = other DNA
atgcacaagggcggctgcaacggcctgaaccagtgcctgaccgccacccagagcaagatcttccagtgcgacaagtacgtgaaggtggcccacaagttcagcaacagcaacagacacgagatcagacacaccaagaagaagcccttcaagtgcaccaagtgcggcaagagcttcggcatgatcagctgcctgaccgagcacagcagaatccacaccagagtgaacttctacaagtgcgaggagtgcggcaaggccttcaactggagcagcaccctgaccaagcacaagagaatccacaccggcgagaagccctacaagtgcgaggagtgcggcaaggccttcaaccagagcagcaacctgatcaagcacaagaagatccacaccggcgagaagccctacaagtgcgaggagtgcggcaagaccttcaacagattcagcaccctgaccacccacaagatcatccacaccggcgagaagccctacaagtgcaaggagtgcggcaaggccttcaacagaagcagcaccctgaccacccacagaaagatccacaccggcgagaagccctacaagtgcgaggagtgcggcaaggccttcaagcagagcagcaacctgaccacccacaagatcatccacaccggcgagaagccctacaagtgcaagaagtgcggcaaggccttcaaccagagcgcccacctgaccacccacgaggtgatccacaccggcgagaagccctacaagtgcgagaagtgcggcaaggccttcaaccacttcagccacctgaccacccacaagatcatccacaccggcgagaagccctacaagtgcaaggagtgcggcaaggccttcaagcacagcagcaccctgaccaagcacaagatcatccacaccggcgagaagccctacaagtgcaaggagtgcgagaaggccttcaaccagagcagcaagctgaccgagcacaagaagatccacaccggcgagaagccctacgagtgcgagaagtgcggcaaggccttcaaccagagcagcaacctgaccagacacaagaagagccacaccgaggagaagccctacaagtgcgaggagtgcggcaagggcttcaagtggcccagcaccctgaccatccacaagatcatccacaccggcgagaagccctacaagtgcgaggagtgcggcaaggccttcaaccagagcagcaagctgaccaagcacaagaagatccacaccggcgagaagccctacacctgcgaggagtgcggcaaggccttcaaccagagcagcaacctgaccaagcacaagagaatccacaccggcgagaagccctacaagtgcgaggagtgcgacaaggccttcaagtggagcagcgtgctgaccaagcacaagatcatccacaccggcgagaagctgcagatctag

SEQ ID NO: 106240 - DNA, 1806 bp, synthetic construct
  misc_feature 1..1806: note = Description of Artificial Sequence: Synthetic coding sequence
  source 1..1806: mol_type = other DNA
atgggccccctggagttcagagacgtggccatcgagttcagcctggaggagtggcactgcctggacaccgcccagcagaacctgtacagagacgtgatgctggagaactacagacacctggtgttcctgggcatcgtggtgaccaagcccgacctgatcacctgcctggagcagggcaagaagcccttcaccgtgaagagacacgagatgatcgccaagagccccgtgatgtgcttccacttcgcccaggacctgtgccccgagcagagcctgaaggacagcttccagaaggtgatcgtgaccagatacgagaagagagagtacggcaacctggagctgaagaagggctgcgagagcgtggacgagggcaaggtgcacaagagaggctacaacggcctgaaccagtgcctgaccgccacccagagcaaggtgttccagtgcgacacctacgtgaaggtgagccacatcttcagcaacagcaacagacacaagatcagagacaccggcaagaagcccttcaagtgcatcgagtgcggcaaggccttcaaccagagcagcaccctggccacccacaagaagatccacaccggcgagatcacctgcaagtgcgaggagtgcggcaaggccttcaacagaagcagccacctgaccagccacaagagaatccacaccggcgagaagagatacaagtgcgaggactgcggcaaggagctgaagtacagcagcaccctgaccgcccacaagagaatccacaccggcgagaagagatacaagtgcgaggactgcggcaaggagctgaagtacagcagcaccctgaccgcccacaagagaatccacaccggcgagaagccctacaagtgcgacaagtgcggcagagccttcatcagcagcagcatcctgtacgtgcacaagatcagccacaccgaggagaagccctacaagtgcgaggagtgcggcaaggccttcaagctgagcagcatcctgagcacccacaagagaatccacaccggcgagaagccctacaagtgcgaggagtgcggcaaggccttcagaagaagcctggtgctgagaacccacaagagaatccacaccggcgagaagccctacaagtgcgacaagtgcggcaaggccttcatcagcagcagcctgctgtacaagcacaagatcagccacagcgagaagaagccctacaagtgcgaggagtgcggcaaggccttcaagagaagcagcaccctgaccatccacaagatcagccacaccgaggagaagccctacaagtgccaggagtgcgacaaggtgttcaagagaagcagcgccctgagcacccacaagatcatccacagcggcgagaagccctacaagtgcgaggagtgcggcaaggccttcaagagaagcagcaacctgaccacccacaagatcagccacaccgaggagaagctgtacaagtgccaggagtgcgacaaggccttcaagtacagcagcgccctgagcacccacaagatcatccacagcggcgagaacccctacaagtgcgaggagtgcggcaaggccttcaagagaagcagcgtgctgagcaagcacaagatcatccacaccggcgccaagccctacaagtgcgaggagtgcggcaaggccttcaagagaagcagccagctgaccagccacaagatcagccacaccggcgagaagccctacaagtgcgaggagtgcggcaaggccttcaacctgagcagcgacctgaacacccacaagagaatccacatcggccagaaggcctacatcgtgaagaacatggccaacctgtag

SEQ ID NO: 106241 - DNA, 369 bp, synthetic construct
  misc_feature 1..369: note = Description of Artificial Sequence: Synthetic coding sequence
  source 1..369: mol_type = other DNA
atgagaaagcacatcaaggagagagagctgagcctgatggagcagatcaaggagttcatcctggagagaaacaccatgaacgtgcccaccgtgggcaagcccttcagcggcagacacagcctgctgagcatcagagagttcaccctgggcagaagccccatgaacgtgatgaacgtgggcgagcccagcgagaagaagcccacctgcatgatcatcagagagttcatcctggagaagaaccccatcctggtgagaaacgtgggcaagaccagcgccgaggtgcagctgctgctgaacaccagagagttcatcctggagatcaacagcagaaacagagagatcaaggagttcgccgagtgcttcagctag

SEQ ID NO: 106242 - DNA, 1911 bp, synthetic construct
  misc_feature 1..1911: note = Description of Artificial Sequence: Synthetic coding sequence
  source 1..1911: mol_type = other DNA
atggcccccagaccccccaccgccgccccccaggagagcgtgaccttcaaggacgtgagcgtggacttcacccaggaggagtggtaccacgtggaccccgcccagagaagcctgtacagagacgtgatgctggagaactacagccacctggtgagcctgggctaccaggtgagcaagcccgaggtgatcttcaagctggagcagggcgaggagccctggatcagcgagggcgagatccagagacccttctaccccgactggaagaccagacccgaggtgaagagcagccacctgcagcaggacgtgagcgaggtgagccactgcacccacgacctgctgcacgccaccctggaggacagctgggacgtgagcagccagctggacagacagcaggagaactggaagagacacctgggcagcgaggccagcacccagaagaagatcatcaccccccaggagaacttcgagcagaacaagttcggcgagaacagcagactgaacaccaacctggtgacccagctgaacatccccgccagaatcagacccagcgagtgcgagaccctgggcagcaacctgggccacaacgccgacctgctgaacgagaacaacatcctggccaagaagaagccctacaagtgcgacaagtgcagaaaggccttcatccacagaagcagcctgaccaagcacgagaagacccacaagggcgagggcgccttccccaacggcaccgaccagggcatctaccccggcaagaagcaccacgagtgcaccgactgcggcaagaccttcctgtggaagacccagctgaccgagcaccagagaatccacaccggcgagaagcccttcgagtgcaacgtgtgcggcaaggccttcagacacagcagcagcctgggccagcacgagaacgcccacaccggcgagaagccctaccagtgcagcctgtgcggcaaggccttccagagaagcagcagcctggtgcagcaccagagaatccacaccggcgagaagccctacagatgcaacctgtgcggcagaagcttcagacacggcaccagcctgacccagcacgaggtgacccacagcggcgagaagcccttccagtgcaaggagtgcggcaaggccttcagcagatgcagcagcctggtgcagcacgagagaacccacaccggcgagaagcccttcgagtgcagcatctgcggcagagccttcggccagagccccagcctgtacaagcacatgagaatccacaagagaggcaagccctaccagagcagcaactacagcatcgacttcaagcacagcaccagcctgacccaggacgagagcaccctgaccgaggtgaagagctaccactgcaacgactgcggcgaggacttcagccacatcaccgacttcaccgaccaccagagaatccacaccgccgagaacccctacgactgcgagcaggccttcagccagcaggccatcagccaccccggcgagaagccctaccagtgcaacgtgtgcggcaaggccttcaagagaagcaccagcttcatcgagcaccacagaatccacaccggcgagaagccctacgagtgcaacgagtgcggcgaggccttcagcagaagaagcagcctgacccagcacgagagaacccacaccggcgagaagccctacgagtgcatcgactgcggcaaggccttcagccagagcagcagcctgatccagcacgagagaacccacaccggcgagaagccctacgagtgcaacgagtgcggcagagccttcagaaagaagaccaacctgcacgaccaccagagaatccacaccggcgagaagccctacagctgcaaggagtgcggcaagaacttcagcagaagcagcgccctgaccaagcaccagagaatccacaccagaaacaagctgtag

SEQ ID NO: 106243 - DNA, 3576 bp, synthetic construct
  misc_feature 1..3576: note = Description of Artificial Sequence: Synthetic coding sequence
  source 1..3576: mol_type = other DNA
atgcccggcacccccggcagcctggagatgggcctgctgaccttcagagacgtggccatcgagttcagccccgaggagtggcagtgcctggacaccgcccagcagaacctgtacagaaacgtgatgctggagaactacagaaacctggccttcctgggcatcgccctgagcaagcccgacctgatcacctacctggagcagggcaaggagccctggaacatgaagcagcacgagatggtggacgagcccaccggcatctgcccccacttcccccaggacttctggcccgagcagagcatggaggacagcttccagaaggtgctgctgagaaagtacgagaagtgcggccacgagaacctgcagctgagaaagggctgcaagagcgtggacgagtgcaaggtgcacaaggagggctacaacaagctgaaccagtgcctgaccaccgcccagagcaaggtgttccagtgcggcaagtacctgaaggtgttctacaagttcctgaacagcaacagacacaccatcagacacaccggcaagaagtgcttcaagtgcaagaagtgcgtgaagagcttctgcatcagactgcacaagacccagcacaagtgcgtgtacatcaccgagaagagctgcaagtgcaaggagtgcgagaagaccttccactggagcagcaccctgaccaaccacaaggagatccacaccgaggacaagccctacaagtgcgaggagtgcggcaaggccttcaagcagctgagcaccctgaccacccacaagatcatctgcgccaaggagaagatctacaagtgcgaggagtgcggcaaggccttcctgtggagcagcaccctgaccagacacaagagaatccacaccggcgagaagccctacaagtgcgaggagtgcggcaaggccttcagccacagcagcaccctggccaagcacaagagaatccacaccggcgagaagccctacaagtgcgaggagtgcggcaaggccttcagcagaagcagcaccctggccaagcacaagagaatccacaccggcgagaagccctacaagtgcaaggagtgcggcaaggccttcagcaacagcagcaccctggccaaccacaagatcacccacaccgaggagaagccctacaagtgcaaggagtgcgacaaggccttcaagagactgagcaccctgaccaagcacaagatcatccacgccggcgagaagctgtacaagtgcgaggagtgcggcaaggccttcaacagaagcagcaacctgaccatccacaagttcatccacaccggcgagaagccctacaagtgcgaggagtgcggcaaggccttcaactggagcagcagcctgaccaagcacaagagattccacaccagagagaagcccttcaagtgcaaggagtgcggcaaggccttcatctggagcagcaccctgaccagacacaagagaatccacaccggcgagaagccctacaagtgcgaggagtgcggcaaggccttcagacagagcagcaccctgaccaagcacaagatcatccacaccggcgagaagccctacaagttcgaggagtgcggcaaggccttcagacagagcctgaccctgaacaagcacaagatcatccacagcagagagaagccctacaagtgcaaggagtgcggcaaggccttcaagcagttcagcaccctgaccacccacaagatcatccacgccggcaagaagctgtacaagtgcgaggagtgcggcaaggccttcaaccacagcagcagcctgagcacccacaagatcatccacaccggcgagaagagctacaagtgcgaggagtgcggcaaggccttcctgtggagcagcaccctgagaagacacaagagaatccacaccggcgagaagccctacaagtgcgaggagtgcggcaaggccttcagccacagcagcgccctggccaagcacaagagaatccacaccggcgagaagccctacaagtgcaaggagtgcggcaaggccttcagcaacagcagcaccctggccaaccacaagatcacccacaccgaggagaagccctacaagtgcaaggagtgcgacaagaccttcaagagactgagcaccctgaccaagcacaagatcatccacgccggcgagaagctgtacaagtgcgaggagtgcggcaaggccttcaacagaagcagcaacctgaccatccacaagttcatccacaccggcgagaagccctacaagtgcgaggagtgcggcaaggccttcaactggagcagcagcctgaccaagcacaagagaatccacaccagagagaagcccttcaagtgcaaggagtgcggcaaggccttcatctggagcagcaccctgaccagacacaagagaatccacaccggcgagaagccctacaagtgcgaggagtgcggcaaggccttcagcagaagcagcaccctgaccaagcacaagaccatccacaccggcgagaagccctacaagtgcaaggagtgcggcaaggccttcaagcacagcagcgccctggccaagcacaagatcatccacgccggcgagaagctgtacaagtgcgaggagtgcggcaaggccttcaaccagagcagcaacctgaccacccacaagatcatccacaccaaggagaagcccagcaagagcgaggagtgcgacaaggccttcatctggagcagcaccctgaccgagcacaagagaatccacaccagagagaagacctacaagtgcgaggagtgcggcaaggccttcagccagcccagccacctgaccacccacaagagaatgcacaccggcgagaagccctacaagtgcgaggagtgcggcaaggccttcagccagagcagcaccctgaccacccacaagatcatccacaccggcgagaagccctacaagtgcgaggagtgcggcaaggccttcagaaagagcagcaccctgaccgagcacaagatcatccacaccggcgagaagccctacaagtgcgaggagtgcggcaaggccttcagccagagcagcaccctgaccagacacaccagaatgcacaccggcgagaagccctacaagtgcgaggagtgcggcaaggccttcaacagaagcagcaagctgaccacccacaagatcatccacaccggcgagaagccctacaagtgcgaggagtgcggcaaggccttcatcagcagcagcaccctgaacggccacaagagaatccacaccagagagaagccctacaagtgcgaggagtgcggcaaggccttcagccagagcagcaccctgaccagacacaagagactgcacaccggcgagaagccctacaagtgcggcgagtgcggcaaggccttcaaggagagcagcgccctgaccaagcacaagatcatccacaccggcgagaagccctacaagtgcgagaagtgcggcaaggccttcaaccagagcagcatcctgaccaaccacaagaagatccacaccatcacccccgtgatccccctgctgtgggaggccgaggccggcggcagcagaggccaggagatggagaccatcctggccaacaccgtgaagcccctgctgtactag

SEQ ID NO: 106244 - DNA, 3480 bp, synthetic construct
  misc_feature 1..3480: note = Description of Artificial Sequence: Synthetic coding sequence
  source 1..3480: mol_type = other DNA
atgcccggcacccccggcagcctggagatgggcctgctgaccttcagagacgtggccatcgagttcagccccgaggagtggcagtgcctggacaccgcccagcagaacctgtacagaaacgtgatgctggagaactacagaaacctggccttcctgggcatctgcccccacttcccccaggacttctggcccgagcagagcatggaggacagcttccagaaggtgctgctgagaaagtacgagaagtgcggccacgagaacctgcagctgagaaagggctgcaagagcgtggacgagtgcaaggtgcacaaggagggctacaacaagctgaaccagtgcctgaccaccgcccagagcaaggtgttccagtgcggcaagtacctgaaggtgttctacaagttcctgaacagcaacagacacaccatcagacacaccggcaagaagtgcttcaagtgcaagaagtgcgtgaagagcttctgcatcagactgcacaagacccagcacaagtgcgtgtacatcaccgagaagagctgcaagtgcaaggagtgcgagaagaccttccactggagcagcaccctgaccaaccacaaggagatccacaccgaggacaagccctacaagtgcgaggagtgcggcaaggccttcaagcagctgagcaccctgaccacccacaagatcatctgcgccaaggagaagatctacaagtgcgaggagtgcggcaaggccttcctgtggagcagcaccctgaccagacacaagagaatccacaccggcgagaagccctacaagtgcgaggagtgcggcaaggccttcagccacagcagcaccctggccaagcacaagagaatccacaccggcgagaagccctacaagtgcgaggagtgcggcaaggccttcagcagaagcagcaccctggccaagcacaagagaatccacaccggcgagaagccctacaagtgcaaggagtgcggcaaggccttcagcaacagcagcaccctggccaaccacaagatcacccacaccgaggagaagccctacaagtgcaaggagtgcgacaaggccttcaagagactgagcaccctgaccaagcacaagatcatccacgccggcgagaagctgtacaagtgcgaggagtgcggcaaggccttcaacagaagcagcaacctgaccatccacaagttcatccacaccggcgagaagccctacaagtgcgaggagtgcggcaaggccttcaactggagcagcagcctgaccaagcacaagagattccacaccagagagaagcccttcaagtgcaaggagtgcggcaaggccttcatctggagcagcaccctgaccagacacaagagaatccacaccggcgagaagccctacaagtgcgaggagtgcggcaaggccttcagacagagcagcaccctgaccaagcacaagatcatccacaccggcgagaagccctacaagttcgaggagtgcggcaaggccttcagacagagcctgaccctgaacaagcacaagatcatccacagcagagagaagccctacaagtgcaaggagtgcggcaaggccttcaagcagttcagcaccctgaccacccacaagatcatccacgccggcaagaagctgtacaagtgcgaggagtgcggcaaggccttcaaccacagcagcagcctgagcacccacaagatcatccacaccggcgagaagagctacaagtgcgaggagtgcggcaaggccttcctgtggagcagcaccctgagaagacacaagagaatccacaccggcgagaagccctacaagtgcgaggagtgcggcaaggccttcagccacagcagcgccctggccaagcacaagagaatccacaccggcgagaagccctacaagtgcaaggagtgcggcaaggccttcagcaacagcagcaccctggccaaccacaagatcacccacaccgaggagaagccctacaagtgcaaggagtgcgacaagaccttcaagagactgagcaccctgaccaagcacaagatcatccacgccggcgagaagctgtacaagtgcgaggagtgcggcaaggccttcaacagaagcagcaacctgaccatccacaagttcatccacaccggcgagaagccctacaagtgcgaggagtgcggcaaggccttcaactggagcagcagcctgaccaagcacaagagaatccacaccagagagaagcccttcaagtgcaaggagtgcggcaaggccttcatctggagcagcaccctgaccagacacaagagaatccacaccggcgagaagccctacaagtgcgaggagtgcggcaaggccttcagcagaagcagcaccctgaccaagcacaagaccatccacaccggcgagaagccctacaagtgcaaggagtgcggcaaggccttcaagcacagcagcgccctggccaagcacaagatcatccacgccggcgagaagctgtacaagtgcgaggagtgcggcaaggccttcaaccagagcagcaacctgaccacccacaagatcatccacaccaaggagaagcccagcaagagcgaggagtgcgacaaggccttcatctggagcagcaccctgaccgagcacaagagaatccacaccagagagaagacctacaagtgcgaggagtgcggcaaggccttcagccagcccagccacctgaccacccacaagagaatgcacaccggcgagaagccctacaagtgcgaggagtgcggcaaggccttcagccagagcagcaccctgaccacccacaagatcatccacaccggcgagaagccctacaagtgcgaggagtgcggcaaggccttcagaaagagcagcaccctgaccgagcacaagatcatccacaccggcgagaagccctacaagtgcgaggagtgcggcaaggccttcagccagagcagcaccctgaccagacacaccagaatgcacaccggcgagaagccctacaagtgcgaggagtgcggcaaggccttcaacagaagcagcaagctgaccacccacaagatcatccacaccggcgagaagccctacaagtgcgaggagtgcggcaaggccttcatcagcagcagcaccctgaacggccacaagagaatccacaccagagagaagccctacaagtgcgaggagtgcggcaaggccttcagccagagcagcaccctgaccagacacaagagactgcacaccggcgagaagccctacaagtgcggcgagtgcggcaaggccttcaaggagagcagcgccctgaccaagcacaagatcatccacaccggcgagaagccctacaagtgcgagaagtgcggcaaggccttcaaccagagcagcatcctgaccaaccacaagaagatccacaccatcacccccgtgatccccctgctgtgggaggccgaggccggcggcagcagaggccaggagatggagaccatcctggccaacaccgtgaagcccctgctgtactag

SEQ ID NO: 106245 - DNA, 1761 bp, synthetic construct
  misc_feature 1..1761: note = Description of Artificial Sequence: Synthetic coding sequence
  source 1..1761: mol_type = other DNA
atgggccccctgaccttcagagacgtgaagatcgagttcagcctggaggagtggcagtgcctggacaccgcccagagaaacctgtacagagacgtgatgctggagaactacagaaacctggtgttcctgggcatcgccgtgagcaagcccgacctgatcacctggctggagcagggcaaggagccctggaacctgaagagacacgagatggtggacaagacccccgtgatgtgcagccacttcgcccaggacgtgtggcccgagcacagcatcaaggacagcttccagaaggtgatcctgagaacctacggcaagtacggccacgagaacctgcagctgagaaaggaccacaagagcgtggacgcctgcaaggtgtacaagggcggctacaacggcctgaaccagtgcctgaccaccaccgacagcaagatcttccagtgcgacaagtacgtgaaggtgttccacaagttccccaacgtgaacagaaacaagatcagacacaccggcaagaagcccttcaagtgcaagaacagaggcaagagcttctgcatgctgagccagctgacccagcacaagaagatccacaccagagagtacagctacaagtgcgaggagtgcggcaaggccttcaactggagcagcaccctgaccaagcacaagatcatccacaccggcgagaagccctacaagtgcgaggagtgcggcaaggccttcaacagaagcagcaacctgaccaagcacaagatcatccacaccggcgagaagccctacaagtgcgaggagtgcggcaaggccttcaacagaagcagcaccctgaccaagcacaagagaatccacaccgaggagaagccctacaagtgcgaggagtgcggcaaggccttcaaccagttcagcatcctgaacaagcacaagagaatccacatggaggacaagccctacaagtgcgaggagtgcggcaaggccttcagagtgttcagcatcctgaagaagcacaagatcatccacaccggcgagaagccctacaagtgcgaggagtgcggcaaggccttcaaccagttcagcaacctgaccaagcacaagatcatccacaccggcgagaagccctacaagtgcgacgagtgcggcaaggccttcaaccagagcagcaccctgaccaagcacaagagaatccacaccggcgagaagccctacaagtgcgaggagtgcggcaaggccttcaagcagagcagcaccctgaccgagcacaagatcatccacaccggcgagaagccctacaagtgcgagaagtgcggcaaggccttcagctggagcagcgccttcaccaagcacaagagaaaccacatggaggacaagccctacaagtgcgaggagtgcggcaaggccttcagcgtgttcagcaccctgaccaagcacaagatcatccacaccagagagaagccctacaagtgcgaggagtgcggcaaggccttcaaccagagcagcatcttcaccaagcacaagatcatccacaccgagggcaagagctacaagtgcgagaagtgcggcaacgccttcaaccagagcagcaacctgaccgccagaaagatcatctacaccggcgagaagccctacaagtacgaggagtgcgacaaggccttcaacaagttcagcaccctgatcacccaccagatcatctacaccggcgagaagccctgcaagcacgagtgcggcagagccttcaacaagagcagcaactacaccaaggagaagctgcagacctag

SEQ ID NO: 106246 - DNA, 1665 bp, synthetic construct
  misc_feature 1..1665: note = Description of Artificial Sequence: Synthetic coding sequence
  source 1..1665: mol_type = other DNA
atgggccccctgaccttcagagacgtgaagatcgagttcagcctggaggagtggcagtgcctggacaccgcccagagaaacctgtacagagacgtgatgctggagaactacagaaacctggtgttcctggtgatgtgcagccacttcgcccaggacgtgtggcccgagcacagcatcaaggacagcttccagaaggtgatcctgagaacctacggcaagtacggccacgagaacctgcagctgagaaaggaccacaagagcgtggacgcctgcaaggtgtacaagggcggctacaacggcctgaaccagtgcctgaccaccaccgacagcaagatcttccagtgcgacaagtacgtgaaggtgttccacaagttccccaacgtgaacagaaacaagatcagacacaccggcaagaagcccttcaagtgcaagaacagaggcaagagcttctgcatgctgagccagctgacccagcacaagaagatccacaccagagagtacagctacaagtgcgaggagtgcggcaaggccttcaactggagcagcaccctgaccaagcacaagatcatccacaccggcgagaagccctacaagtgcgaggagtgcggcaaggccttcaacagaagcagcaacctgaccaagcacaagatcatccacaccggcgagaagccctacaagtgcgaggagtgcggcaaggccttcaacagaagcagcaccctgaccaagcacaagagaatccacaccgaggagaagccctacaagtgcgaggagtgcggcaaggccttcaaccagttcagcatcctgaacaagcacaagagaatccacatggaggacaagccctacaagtgcgaggagtgcggcaaggccttcagagtgttcagcatcctgaagaagcacaagatcatccacaccggcgagaagccctacaagtgcgaggagtgcggcaaggccttcaaccagttcagcaacctgaccaagcacaagatcatccacaccggcgagaagccctacaagtgcgacgagtgcggcaaggccttcaaccagagcagcaccctgaccaagcacaagagaatccacaccggcgagaagccctacaagtgcgaggagtgcggcaaggccttcaagcagagcagcaccctgaccgagcacaagatcatccacaccggcgagaagccctacaagtgcgagaagtgcggcaaggccttcagctggagcagcgccttcaccaagcacaagagaaaccacatggaggacaagccctacaagtgcgaggagtgcggcaaggccttcagcgtgttcagcaccctgaccaagcacaagatcatccacaccagagagaagccctacaagtgcgaggagtgcggcaaggccttcaaccagagcagcatcttcaccaagcacaagatcatccacaccgagggcaagagctacaagtgcgagaagtgcggcaacgccttcaaccagagcagcaacctgaccgccagaaagatcatctacaccggcgagaagccctacaagtacgaggagtgcgacaaggccttcaacaagttcagcaccctgatcacccaccagatcatctacaccggcgagaagccctgcaagcacgagtgcggcagagccttcaacaagagcagcaactacaccaaggagaagctgcagacctag

SEQ ID NO: 106247 - DNA, 1554 bp, synthetic construct
  misc_feature 1..1554: note = Description of Artificial Sequence: Synthetic coding sequence
  source 1..1554: mol_type = other DNA
atggtggacaagacccccgtgatgtgcagccacttcgcccaggacgtgtggcccgagcacagcatcaaggacagcttccagaaggtgatcctgagaacctacggcaagtacggccacgagaacctgcagctgagaaaggaccacaagagcgtggacgcctgcaaggtgtacaagggcggctacaacggcctgaaccagtgcctgaccaccaccgacagcaagatcttccagtgcgacaagtacgtgaaggtgttccacaagttccccaacgtgaacagaaacaagatcagacacaccggcaagaagcccttcaagtgcaagaacagaggcaagagcttctgcatgctgagccagctgacccagcacaagaagatccacaccagagagtacagctacaagtgcgaggagtgcggcaaggccttcaactggagcagcaccctgaccaagcacaagatcatccacaccggcgagaagccctacaagtgcgaggagtgcggcaaggccttcaacagaagcagcaacctgaccaagcacaagatcatccacaccggcgagaagccctacaagtgcgaggagtgcggcaaggccttcaacagaagcagcaccctgaccaagcacaagagaatccacaccgaggagaagccctacaagtgcgaggagtgcggcaaggccttcaaccagttcagcatcctgaacaagcacaagagaatccacatggaggacaagccctacaagtgcgaggagtgcggcaaggccttcagagtgttcagcatcctgaagaagcacaagatcatccacaccggcgagaagccctacaagtgcgaggagtgcggcaaggccttcaaccagttcagcaacctgaccaagcacaagatcatccacaccggcgagaagccctacaagtgcgacgagtgcggcaaggccttcaaccagagcagcaccctgaccaagcacaagagaatccacaccggcgagaagccctacaagtgcgaggagtgcggcaaggccttcaagcagagcagcaccctgaccgagcacaagatcatccacaccggcgagaagccctacaagtgcgagaagtgcggcaaggccttcagctggagcagcgccttcaccaagcacaagagaaaccacatggaggacaagccctacaagtgcgaggagtgcggcaaggccttcagcgtgttcagcaccctgaccaagcacaagatcatccacaccagagagaagccctacaagtgcgaggagtgcggcaaggccttcaaccagagcagcatcttcaccaagcacaagatcatccacaccgagggcaagagctacaagtgcgagaagtgcggcaacgccttcaaccagagcagcaacctgaccgccagaaagatcatctacaccggcgagaagccctacaagtacgaggagtgcgacaaggccttcaacaagttcagcaccctgatcacccaccagatcatctacaccggcgagaagccctgcaagcacgagtgcggcagagccttcaacaagagcagcaactacaccaaggagaagctgcagacctag

SEQ ID NO: 106248 - DNA, 1863 bp, synthetic construct
  misc_feature 1..1863: note = Description of Artificial Sequence: Synthetic coding sequence
  source 1..1863: mol_type = other DNA
atgggccccctgcagttcagagacgtggccatcgagttcagcctggaggagtggcactgcctggacaccgcccagagaaacctgtacagaaacgtgatgctggagaactacagcaacctggtgttcctgggcatcgtggtgagcaagcccgacctgatcgcccacctggagcagggcaagaagcccctgaccatgaagagacacgagatggtggccaaccccagcgtgatctgcagccacttcgcccaggacctgtggcccgagcagaacatcaaggacagcttccagaaggtgatcctgagaagatacgagaagagaggccacggcaacctgcagctgatcaagagatgcgagagcgtggacgagtgcaaggtgcacaccggcggctacaacggcctgaaccagtgcagcaccaccacccagagcaaggtgttccagtgcgacaagtacggcaaggtgttccacaagttcagcaacagcaacagacacaacatcagacacaccgagaagaagcccttcaagtgcatcgagtgcggcaaggccttcaaccagttcagcaccctgatcacccacaagaagatccacaccggcgagaagccctacatctgcgaggagtgcggcaaggccttcaagtacagcagcgccctgaacacccacaagagaatccacaccggcgagaagccctacaagtgcgacaagtgcgacaaggccttcatcgccagcagcaccctgagcaagcacgagatcatccacaccggcaagaagccctacaagtgcgaggagtgcggcaaggccttcaaccagagcagcaccctgaccaagcacaagaagatccacaccggcgagaagccctacaagtgcgaggagtgcggcaaggccttcaaccagagcagcaccctgaccaagcacaagaagatccacaccggcgagaagccctacgtgtgcgaggagtgcggcaaggccttcaagtacagcagaatcctgaccacccacaagagaatccacaccggcgagaagccctacaagtgcaacaagtgcggcaaggccttcatcgccagcagcaccctgagcagacacgagttcatccacatgggcaagaagcactacaagtgcgaggagtgcggcaaggccttcatctggagcagcgtgctgaccagacacaagagagtgcacaccggcgagaagccctacaagtgcgaggagtgcggcaaggccttcaagtacagcagcaccctgagcagccacaagagaagccacaccggcgagaagccctacaagtgcgaggagtgcggcaaggccttcgtggccagcagcaccctgagcaagcacgagatcatccacaccggcaagaagccctacaagtgcgaggagtgcggcaaggccttcaaccagagcagcagcctgaccaagcacaagaagatccacaccggcgagaagccctacaagtgcgaggagtgcggcaaggccttcaaccagagcagcagcctgaccaagcacaagaagatccacaccggcgagaagccctacaagtgcgaggagtgcggcaaggccttcaaccagagcagcaccctgatcaagcacaagaagatccacaccagagagaagccctacaagtgcgaggagtgcggcaaggccttccacctgagcacccacctgaccacccacaagatcctgcacaccggcgagaagccctacagatgcagagagtgcggcaaggccttcaaccacagcgccaccctgagcagccacaagaagatccacagcggcgagaagccctacgagtgcgacaagtgcggcaaggccttcatcagccccagcagcctgagcagacacgagatcatccacaccggcgagaagccctag

SEQ ID NO: 106249 - DNA, 1779 bp, synthetic construct
  misc_feature 1..1779: note = Description of Artificial Sequence: Synthetic coding sequence
  source 1..1779: mol_type = other DNA
atgggccccctgcagttcagagacgtggccatcgagttcagcctggaggagtggcactgcctggacaccgcccagagaaacctgtacagaaacgtgatgctggagaactacagcaacctggtgttcctgggcatcgtggtgagcaagcccgacctgatcgcccacctggagcagggcaagaagcccctgaccatgaagagacacgagatggtggccaaccccagcgtgatctgcagccacttcgcccaggacctgtggcccgagcagaacatcaaggacagcttccagaaggtgatcctgagaagatacgagaagagaggccacggcaacctgcagctgatcaagagatgcgagagcgtggacgagtgcaaggtgcacaccggcggctacaacggcctgaaccagtgcagcaccaccacccagagcaaggtgttccagtgcgacaagtacggcaaggtgttccacaagttcagcaacagcaacagacacaacatcagacacaccgagaagaagcccttcaagtgcatcgagtgcggcaaggccttcaaccagttcagcaccctgatcacccacaagaagatccacaccggcgagaagccctacatctgcgaggagtgcggcaaggccttcaagtacagcagcgccctgaacacccacaagagaatccacaccggcgagaagccctacaagtgcgacaagtgcgacaaggccttcatcgccagcagcaccctgagcaagcacgagatcatccacaccggcaagaagccctacaagtgcgaggagtgcggcaaggccttcaaccagagcagcaccctgaccaagcacaagaagatccacaccggcgagaagccctacaagtgcgaggagtgcggcaaggccttcaaccagagcagcaccctgaccaagcacaagaagatccacaccggcgagaagccctacgtgtgcgaggagtgcggcaaggccttcaagtacagcagaatcctgaccacccacaagagaatccacaccggcgagaagccctacaagtgcaacaagtgcggcaaggccttcatcgccagcagcaccctgagcagacacgagttcatccacatgggcaagaagcactacaagtgcgaggagtgcggcaaggccttcatctggagcagcgtgctgaccagacacaagagagtgcacaccggcgagaagccctacaagtgcgaggagtgcggcaaggccttcgtggccagcagcaccctgagcaagcacgagatcatccacaccggcaagaagccctacaagtgcgaggagtgcggcaaggccttcaaccagagcagcagcctgaccaagcacaagaagatccacaccggcgagaagccctacaagtgcgaggagtgcggcaaggccttcaaccagagcagcagcctgaccaagcacaagaagatccacaccggcgagaagccctacaagtgcgaggagtgcggcaaggccttcaaccagagcagcaccctgatcaagcacaagaagatccacaccagagagaagccctacaagtgcgaggagtgcggcaaggccttccacctgagcacccacctgaccacccacaagatcctgcacaccggcgagaagccctacagatgcagagagtgcggcaaggccttcaaccacagcgccaccctgagcagccacaagaagatccacagcggcgagaagccctacgagtgcgacaagtgcggcaaggccttcatcagccccagcagcctgagcagacacgagatcatccacaccggcgagaagccctag

SEQ ID NO: 106250 - DNA, 183 bp, synthetic construct
  misc_feature 1..183: note = Description of Artificial Sequence: Synthetic coding sequence
  source 1..183: mol_type = other DNA
atggtggccaaccccagcgtgatctgcagccacttcgcccaggacctgtggcccgagcagaacatcaaggacagcttccagaaggtgatcctgagaagatacgagaagagaggccacggcaacctgcagctgatcaagagatgcgagagcacccccagcgagaaggagaagaagaagaagtag

SEQ ID NO: 106251 - DNA, 1719 bp, synthetic construct
  misc_feature 1..1719: note = Description of Artificial Sequence: Synthetic coding sequence
  source 1..1719: mol_type = other DNA
atgcccggccccctgggcagcctggagatgggcgtgctgaccttcagagacgtggccctggagttcagcctggaggagtggcagtgcctggacaccgcccagcagaacctgtacagaaacgtgatgctggagaactacagaaacctggtgttcgtgggcatcgccgccagcaagcccgacctgatcacctgcctggagcagggcaaggagccctggaacgtgaagagacacgagatggtgaccgagccccccgtggtgtacagctacttcgcccaggacctgtggcccaagcagggcaagaagaactacttccagaaggtgatcctgagaacctacaagaagtgcggcagagagaacctgcagctgagaaagtactgcaagagcatggacgagtgcaaggtgcacaaggagtgctacaacggcctgaaccagtgcctgaccaccacccagaacaagatcttccagtacgacaagtacgtgaaggtgttccacaagttcagcaacagcaacagacacaagatcggccacaccggcaagaagagcttcaagtgcaaggagtgcgagaagagcttctgcatgctgagccacctggcccagcacaagagaatccacagcggcgagaagccctacaagtgcaaggagtgcggcaaggcctacaacgaggccagcaacctgagcacccacaagagaatccacaccggcaagaagccctacaagtgcgaggagtgcggcaaggccttcaacagactgagccacctgaccacccacaagatcatccacaccggcaagaagccctacaagtgcgaggagtgcggcaaggccttcaaccagagcgccaacctgaccacccacaagagaatccacaccggcgagaagccctacaagtgcgaggagtgcggcagagccttcagccagagcagcaccctgaccgcccacaagatcatccacgccggcgagaagccctacaagtgcgaggagtgcggcaaggccttcagccagagcagcaccctgaccacccacaagatcatccacaccggcgagaagttctacaagtgcgaggagtgcggcaaggccttcagcagactgagccacctgaccacccacaagagaatccacagcggcgagaagccctacaagtgcgaggagtgcggcaaggccttcaagcagagcagcaccctgaccacccacaagagaatccacgccggcgagaagttctacaagtgcgaggtgtgcagcaaggccttcagcagattcagccacctgaccacccacaagagaatccacaccggcgagaagccctacaagtgcgaggagtgcggcaaggccttcaacctgagcagccagctgaccacccacaagatcatccacaccggcgagaagccctacaagtgcgaggagtgcggcaaggccttcaaccagagcagcaccctgagcaagcacaaggtgatccacaccggcgagaagccctacaagtgcgaggagtgcggcaaggccttcaaccagagcagccacctgaccacccacaagatgatccacaccggcgagaagccctacaagtgcgaggagtgcggcaaggccttcaacaacagcagcatcctgaacagacacaagatgatccacaccggcgagaagctgtacaagcccgagagctgcaacaacgcctgcgacaacatcgccaagatcagcaagtacaagagaaactgcgccggcgagaagtag

SEQ ID NO: 106252 - DNA, 3114 bp, synthetic construct
  misc_feature 1..3114: note = Description of Artificial Sequence: Synthetic coding sequence
  source 1..3114: mol_type = other DNA
atgagcttctggagcgagaagtgcaccagactgatcctgtacgacctgaagatcgccctgaagaacggcagcctgaccttctgggacgtgaccatcgagttcgccctggaggagtggcagtgcctggacatggcccagcagaacctgtacagaaacgtgatgctggagaactacagaaacctggtgttcctgggcatcgccgtgagcaagctggacctgatcacctgcctgaagcagggcaaggagccctggaacatgaagagacacgagatggtgaccaagccccccgtgatcagcagccacttcacccaggacttctggcccgaccagagcatcaaggacagcttccaggagatcatcctgagaacctacgccagatgcggccacaagaacctgagactgagaaaggactgcgagagcgtgaacgagggcaagatgcacgaggaggcctacaacaagctgaaccagtgctggaccaccacccagggcaagatcttccagtgcaacaagtacgtgaaggtgttccacaagtacagcaacagcaacagatacaagatcatccacaccggcaagaagccctacaagtgcgaggagtgcggcaaggccttcaagcagagcagccacctgaccagacacaaggccatccacaccggcgagaagccctacaagtgcgaggagtgcggcaaggccttcaaccacttcagcgccctgagaaagcaccagatcatccacaccggcaagaagccctacaagtgcgaggagtgcggcaaggccttcagccagagcagcaccctgagaaagcacgagatcatccacaccgaggagaagccctacaagtacgaggagtgcggcaaggccttcagcaacctgagcgccctgagaaagcacgagatcatccacaccggccagaagccctacaagtgcgaggagtgcggcaaggccttcaagtggagcagcaagctgaccgtgcacaaggtgatccacaccgccgagaagccctgcaagtgcgaggagtgcggcaaggccttcaagagattcagcgccctgagaaagcacaagatcatccacaccggcaagcagccctacaagtgcgaggagtgcagcaaggccttcagcaacttcagcgccctgagaaagcacgagatcatccacaccggcgagaagccctacaagtgcgaggagtgcggcaaggccttcaagtggagcagcaagctgaccgtgcacaaggtgatccacatggaggagaagccctgcaagtgcgaggagtgcggcaaggccttcaagcacttcagcgccctgagaaagcacaagatcatccacaccggcaagaagccctacaagtgcgaggagtgcggcaaggccttcaacaacagcagcaccctgatgaagcacaagatcatccacaccggcaagaagccctacaagtgcgaggagtgcggcaaggccttcaagcagagcagccacctgaccagacacaaggccatccacaccggcgagaagccctacaagtgcgaggagtgcggcaaggccttcaaccacttcagcgccctgagaaagcaccagatcatccacaccggcaagaagccctacaagtgcgaggagtgcggcaaggccttcagccagagcagcaccctgagaaagcacgagatcatccacaccggcgagaagccctacaagtgcgaggagtgcggcaaggccttcaagtggagcagccacctgaccagacacaaggtgatccacaccgaggagaagccctacaagtgcgaggagtgcggcaaggccttcaaccacttcagcgccctgagaaagcacaagatcatccacaccggcaagaagccctacaagtgcgaggagtgcggcaaggccttcagccagagcagcaccctgagaaagcacgagatcatccacaccggcgagaagccctacaagtgcgaggagtgcggcaaggccttcaagtggagcagcaagctgaccgtgcacaaggtgatccacaccgccgagaagccctgcaagtgcgaggagtgcggcaaggccttcaagcacttcagcgccctgagaaagcacaagatcatccacaccggcaagaagccctacaagtgcgaggagtgcggcaaggccttcaacaacagcagcaccctgagaaagcacgagatcatccacaccggcgagaagagctacaagtgcgaggagtgcgccctgagaaagcacgagatcatccacaccggcaagaagccctacaagtgcgaggagtgcggcaaggccttcaacaacagcagcaccctgagaaagcacaagatcatctacaccggcaagaagccctacaagtgcgaggagtgcggcaaggccttcaagcagagcagccacctgaccagacacaaggccgtgcacaccggcgagaagccctacaagtgcggcgagtgcggcaaggccttcaacaacagcagcaccctgaagaagcacaagctgatccacaccagagagaagagctacaagtgcgaggagtgcggcaaggccttcagcaacttcagcgccctgagaaagcacaagatcatccacaccggcgagaagccctacaagtgcgaggagtgcgagtgcggcaaggccttcaacaacagcagcaccctgatgaagcacaagatcatccacaccggcgagaagccctacaagtgcgaggagtgcggcaagggcttcaacaacttcagcaccctgatgaagcacaagatcatccacaccggcgagaagccctacaagtgcgaggagtgcggcaaggccttcaagcagagcagccacctgaccaagcacaagagcatccacaccggcgagaagccctacaagtgcgaggagagaggcaaggccttcagccacttcagcagactgaccaagcacagaatcatccacaccggcaagaagccctacaagtgcgaggagtgcggcgagaagccctacaagtgcgaggagtgcggcaaggccttcaaccagagcagccacctgacccagcacaagaccatccacaccggcggcaagacctacaagtgcgaggagtgcggcaaggccttcaaccacctgagcgccctgaccaagcacaagatcatccacaccggcgagaagccctag

SEQ ID NO: 106253 - DNA, 3021 bp, synthetic construct
  misc_feature 1..3021: note = Description of Artificial Sequence: Synthetic coding sequence
  source 1..3021: mol_type = other DNA
atgagcagaagaaagcagagcaaccccagacagatcaagagaagcctgggcgacatggaggccagagaggaggtgcagctggtgggcgccagccacatggagcagaaggccaccgcccccgaggcccccagcccccccagcgccgacgtgaacagccccccccccctgcccccccccaccagccccggcggccccaaggagctggagggccaggagcccgagcccagacccaccgaggaggagcccggcagcccctggagcggccccgacgagctggagcccgtggtgcaggacggccagagaagaatcagagccagactgagcctggccaccggcctgagctggggccccttccacggcagcgtgcagaccagagccagcagccccagacaggccgagcccagccccgccctgaccctgctgctggtggacgaggcctgctggctgagaaccctgccccaggccctgaccgaggccgaggccaacaccgagatccacagaaaggacgacgccctgtggtgcagagtgaccaagcccgtgcccgccggcggcctgctgagcgtgctgctgaccgccgagccccacagcacccccggccaccccgtgaagaaggagcccgccgagcccacctgccccgcccccgcccacgacctgcagctgctgccccagcaggccggcatggccagcatcctggccaccgccgtgatcaacaaggacgtgttcccctgcaaggactgcggcatctggtacagaagcgagagaaacctgcaggcccacctgctgtactactgcgccagcagacagggcaccggcagccccgccgccgccgccaccgacgagaagcccaaggagacctaccccaacgagagagtgtgccccttcccccagtgcagaaagagctgccccagcgccagcagcctggagatccacatgagaagccacagcggcgagagacccttcgtgtgcctgatctgcctgagcgccttcaccaccaaggccaactgcgagagacacctgaaggtgcacaccgacaccctgagcggcgtgtgccacagctgcggcttcatcagcaccaccagagacatcctgtacagccacctggtgaccaaccacatggtgtgccagcccggcagcaagggcgagatctacagccccggcgccggccaccccgccaccaagctgccccccgacagcctgggcagcttccagcagcagcacaccgccctgcagggccccctggccagcgccgacctgggcctggcccccacccccagccccggcctggacagaaaggccctggccgaggccaccaacggcgaggccagagccgagcccctggcccagaacggcggcagcagcgagccccccgccgcccccagaagcatcaaggtggaggccgtggaggagcccgaggccgcccccatcctgggccccggcgagcccggcccccaggcccccagcagaacccccagccccagaagccccgcccccgccagagtgaaggccgagctgagcagccccacccccggcagcagccccgtgcccggcgagctgggcctggccggcgccctgttcctgccccagtacgtgttcggccccgacgccgccccccccgccagcgagatcctggccaagatgagcgagctggtgcacagcagactgcagcagggcgccggcgccggcgccggcggcgcccagaccggcctgttccccggcgcccccaagggcgccacctgcttcgagtgcgagatcaccttcagcaacgtgaacaactactacgtgcacaagagactgtactgcagcggcagaagagcccccgaggacgcccccgccgccagaagacccaaggccccccccggccccgccagagccccccccggccagcccgccgagcccgacgcccccagaagcagccccggccccggcgccagagaggagggcgccggcggcgccgccacccccgaggacggcgccggcggcagaggcagcgagggcagccagagccccggcagcagcgtggacgacgccgaggacgaccccagcagaaccctgtgcgaggcctgcaacatcagattcagcagacacgagacctacaccgtgcacaagagatactactgcgccagcagacacgaccccccccccagaagacccgccgccccccccggcccccccggccccgccgccccccccgcccccagccccgccgcccccgtgagaaccagaagaagaagaaagctgtacgagctgcacgccgccggcgccccccccccccccccccccggccacgcccccgcccccgagagccccagacccggcagcggcagcggcagcggccccggcctggcccccgccagaagccccggccccgccgccgacggccccatcgacctgagcaagaagcccagaagacccctgcccggcgcccccgcccccgccctggccgactaccacgagtgcaccgcctgcagagtgagcttccacagcctggaggcctacctggcccacaagaagtacagctgccccgccgcccccccccccggcgccctgggcctgcccgccgccgcctgcccctactgcccccccaacggccccgtgagaggcgacctgctggagcacttcagactggcccacggcctgctgctgggcgcccccctggccggccccggcgtggaggccagaacccccgccgacagaggccccagccccgcccccgcccccgccgccagcccccagcccggcagcagaggccccagagacggcctgggccccgagccccaggagcccccccccggccccccccccagccccgccgccgcccccgaggccgtgccccccccccccgccccccccagctacagcgacaagggcgtgcagacccccagcaagggcacccccgcccccctgcccaacggcaaccacagatactgcagactgtgcaacatcaagttcagcagcctgagcaccttcatcgcccacaagaagtactactgcagcagccacgccgccgagcacgtgaagtag

SEQ ID NO: 106254 - DNA, 2649 bp, synthetic construct
  misc_feature 1..2649: note = Description of Artificial Sequence: Synthetic coding sequence
  source 1..2649: mol_type = other DNA
atgtactactgcagcggcagacagagagaggccgcccccgtgagcgaggagaacgaggacagcgcccaccagatcagcagcctgtgccccttcccccagtgcaccaagagcttcagcaacgccagagccctggagatgcacctgaacagccacagcggcgtgaagatggaggagttcctgccccccggcgccagcctgaagtgcaccgtgtgcagctacaccgccgacagcgtgatcaacttccaccagcacctgttcagccacctgacccaggccgccttcagatgcaaccactgccacttcggcttccagacccagagagagctgctgcagcaccaggagctgcacgtgcccagcggcaagctgcccagagagagcgacatggagcacagccccagcgccaccgaggacagcctgcagcccgccaccgacctgctgaccagaagcgagctgccccagagccagaaggccatgcagaccaaggacgccagcagcgacaccgagctggacaagtgcgagaagaagacccagctgttcctgaccaaccagagacccgagatccagcccaccaccaacaagcagagcttcagctacaccaagatcaagagcgagcccagcagccccagactggccagcagccccgtgcagcccaacatcggccccagcttccccgtgggccccttcctgagccagttcagcttcccccaggacatcaccatggtgccccaggccagcgagatcctggccaagatgagcgagctggtgcacagaagactgagacacggcagcagcagctacccccccgtgatctacagccccctgatgcccaagggcgccacctgcttcgagtgcaacatcaccttcaacaacctggacaactacctggtgcacaagaagcactactgcagcagcagatggcagcagatggccaagagccccgagttccccagcgtgagcgagaagatgcccgaggccctgagccccaacaccggccagaccagcatcaacctgctgaaccccgccgcccacagcgccgaccccgagaaccccctgctgcagaccagctgcatcaacagcagcaccgtgctggacctgatcggccccaacggcaagggccacgacaaggacttcagcacccagaccaagaagctgagcaccagcagcaacaacgacgacaagatcaacggcaagcccgtggacgtgaagaaccccagcgtgcccctggtggacggcgagagcgaccccaacaagaccacctgcgaggcctgcaacatcaccttcagcagacacgagacctacatggtgcacaagcagtactactgcgccaccagacacgacccccccctgaagagaagcgccagcaacaaggtgcccgccatgcagagaaccatgagaaccagaaagagaagaaagatgtacgagatgtgcctgcccgagcaggagcagagaccccccctggtgcagcagagattcctggacgtggccaacctgaacaacccctgcaccagcacccaggagcccaccgagggcctgggcgagtgctaccaccccagatgcgacatcttccccggcatcgtgagcaagcacctggagaccagcctgaccatcaacaagtgcgtgcccgtgagcaagtgcgacaccacccacagcagcgtgagctgcctggagatggacgtgcccatcgacctgagcaagaagtgcctgagccagagcgagagaaccaccaccagccccaagagactgctggactaccacgagtgcaccgtgtgcaagatcagcttcaacaaggtggagaactacctggcccacaagcagaacttctgccccgtgaccgcccaccagagaaacgacctgggccagctggacggcaaggtgttccccaaccccgagagcgagagaaacagccccgacgtgagctacgagagaagcatcatcaagtgcgagaagaacggcaacctgaagcagcccagccccaacggcaacctgttcagcagccacctggccaccctgcagggcctgaaggtgttcagcgaggccgcccagctgatcgccaccaaggaggagaacagacacctgttcctgccccagtgcctgtaccccggcgccatcaagaaggccaagggcgccgaccagctgagcccctactacggcatcaagcccagcgactacatcagcggcagcctggtgatccacaacaccgacatcgagcagagcagaaacgccgagaacgagagccccaagggccaggccagcagcaacggctgcgccgccctgaagaaggacagcctgcccctgctgcccaagaacagaggcatggtgatcgtgaacggcggcctgaagcaggacgagagacccgccgccaacccccagcaggagaacatcagccagaacccccagcacgaggacgaccacaagagccccagctggatcagcgagaaccccctggccgccaacgagaacgtgagccccggcatccccagcgccgaggagcagctgagcagcatcgccaagggcgtgaacggcagcagccaggcccccaccagcggcaagtactgcagactgtgcgacatccagttcaacaacctgagcaacttcatcacccacaagaagttctactgcagcagccacgccgccgagcacgtgaagtag

SEQ ID NO: 106255 - DNA, 3456 bp, synthetic construct
  misc_feature 1..3456: note = Description of Artificial Sequence: Synthetic coding sequence
  source 1..3456: mol_type = other DNA
atgagcagaagaaagcagagcaagcccagacagatcaagagacccctggaggacgccatcgaggacgaggaggaggagtgccccagcgaggagaccgacatcatcagcaagggcgacttccccctggaggagagcttcagcaccgagttcggccccgagaacctgagctgcgaggaggtggagtacttctgcaacaagggcgacgacgagggcatccaggagaccgccgagagcgacggcgacacccagagcgagaagcccggccagcccggcgtggagaccgacgactgggacggccccggcgagctggaggtgttccagaaggacggcgagagaaagatccagagcagacagcagctgcccgtgggcaccacctggggccccttccccggcaagatggacctgaacaacaacagcctgaagaccaaggcccaggtgcccatggtgctgaccgccggccccaagtggctgctggacgtgacctggcagggcgtggaggacaacaagaacaactgcatcgtgtacagcaagggcggccagctgtggtgcaccaccaccaaggccatcagcgagggcgaggagctgatcgccttcgtggtggacttcgacagcagactgcaggccgccagccagatgaccctgaccgagggcatgtaccccgccagactgctggacagcatccagctgctgccccagcaggccgccatggccagcatcctgcccaccgccatcgtgaacaaggacatcttcccctgcaagagctgcggcatctggtacagaagcgagagaaacctgcaggcccacctgatgtactactgcagcggcagacagagagaggccgcccccgtgagcgaggagaacgaggacagcgcccaccagatcagcagcctgtgccccttcccccagtgcaccaagagcttcagcaacgccagagccctggagatgcacctgaacagccacagcggcgtgaagatggaggagttcctgccccccggcgccagcctgaagtgcaccgtgtgcagctacaccgccgacagcgtgatcaacttccaccagcacctgttcagccacctgacccaggccgccttcagatgcaaccactgccacttcggcttccagacccagagagagctgctgcagcaccaggagctgcacgtgcccagcggcaagctgcccagagagagcgacatggagcacagccccagcgccaccgaggacagcctgcagcccgccaccgacctgctgaccagaagcgagctgccccagagccagaaggccatgcagaccaaggacgccagcagcgacaccgagctggacaagtgcgagaagaagacccagctgttcctgaccaaccagagacccgagatccagcccaccaccaacaagcagagcttcagctacaccaagatcaagagcgagcccagcagccccagactggccagcagccccgtgcagcccaacatcggccccagcttccccgtgggccccttcctgagccagttcagcttcccccaggacatcaccatggtgccccaggccagcgagatcctggccaagatgagcgagctggtgcacagaagactgagacacggcagcagcagctacccccccgtgatctacagccccctgatgcccaagggcgccacctgcttcgagtgcaacatcaccttcaacaacctggacaactacctggtgcacaagaagcactactgcagcagcagatggcagcagatggccaagagccccgagttccccagcgtgagcgagaagatgcccgaggccctgagccccaacaccggccagaccagcatcaacctgctgaaccccgccgcccacagcgccgaccccgagaaccccctgctgcagaccagctgcatcaacagcagcaccgtgctggacctgatcggccccaacggcaagggccacgacaaggacttcagcacccagaccaagaagctgagcaccagcagcaacaacgacgacaagatcaacggcaagcccgtggacgtgaagaaccccagcgtgcccctggtggacggcgagagcgaccccaacaagaccacctgcgaggcctgcaacatcaccttcagcagacacgagacctacatggtgcacaagcagtactactgcgccaccagacacgacccccccctgaagagaagcgccagcaacaaggtgcccgccatgcagagaaccatgagaaccagaaagagaagaaagatgtacgagatgtgcctgcccgagcaggagcagagaccccccctggtgcagcagagattcctggacgtggccaacctgaacaacccctgcaccagcacccaggagcccaccgagggcctgggcgagtgctaccaccccagatgcgacatcttccccggcatcgtgagcaagcacctggagaccagcctgaccatcaacaagtgcgtgcccgtgagcaagtgcgacaccacccacagcagcgtgagctgcctggagatggacgtgcccatcgacctgagcaagaagtgcctgagccagagcgagagaaccaccaccagccccaagagactgctggactaccacgagtgcaccgtgtgcaagatcagcttcaacaaggtggagaactacctggcccacaagcagaacttctgccccgtgaccgcccaccagagaaacgacctgggccagctggacggcaaggtgttccccaaccccgagagcgagagaaacagccccgacgtgagctacgagagaagcatcatcaagtgcgagaagaacggcaacctgaagcagcccagccccaacggcaacctgttcagcagccacctggccaccctgcagggcctgaaggtgttcagcgaggccgcccagctgatcgccaccaaggaggagaacagacacctgttcctgccccagtgcctgtaccccggcgccatcaagaaggccaagggcgccgaccagctgagcccctactacggcatcaagcccagcgactacatcagcggcagcctggtgatccacaacaccgacatcgagcagagcagaaacgccgagaacgagagccccaagggccaggccagcagcaacggctgcgccgccctgaagaaggacagcctgcccctgctgcccaagaacagaggcatggtgatcgtgaacggcggcctgaagcaggacgagagacccgccgccaacccccagcaggagaacatcagccagaacccccagcacgaggacgaccacaagagccccagctggatcagcgagaaccccctggccgccaacgagaacgtgagccccggcatccccagcgccgaggagcagctgagcagcatcgccaagggcgtgaacggcagcagccaggcccccaccagcggcaagtactgcagactgtgcgacatccagttcaacaacctgagcaacttcatcacccacaagaagttctactgcagcagccacgccgccgagcacgtgaagtag

SEQ ID NO: 106256 - DNA, 3060 bp, synthetic construct
  misc_feature 1..3060: note = Description of Artificial Sequence: Synthetic coding sequence
  source 1..3060: mol_type = other DNA
atggacctgaacaacaacagcctgaagaccaaggcccaggtgcccatggtgctgaccgccggccccaagtggctgctggacgtgacctggcagggcgtggaggacaacaagaacaactgcatcgtgtacagcaagggcggccagctgtggtgcaccaccaccaaggccatcagcgagggcgaggagctgatcgccttcgtggtggacttcgacagcagactgcaggccgccagccagatgaccctgaccgagggcatgtaccccgccagactgctggacagcatccagctgctgccccagcaggccgccatggccagcatcctgcccaccgccatcgtgaacaaggacatcttcccctgcaagagctgcggcatctggtacagaagcgagagaaacctgcaggcccacctgatgtactactgcagcggcagacagagagaggccgcccccgtgagcgaggagaacgaggacagcgcccaccagatcagcagcctgtgccccttcccccagtgcaccaagagcttcagcaacgccagagccctggagatgcacctgaacagccacagcggcgtgaagatggaggagttcctgccccccggcgccagcctgaagtgcaccgtgtgcagctacaccgccgacagcgtgatcaacttccaccagcacctgttcagccacctgacccaggccgccttcagatgcaaccactgccacttcggcttccagacccagagagagctgctgcagcaccaggagctgcacgtgcccagcggcaagctgcccagagagagcgacatggagcacagccccagcgccaccgaggacagcctgcagcccgccaccgacctgctgaccagaagcgagctgccccagagccagaaggccatgcagaccaaggacgccagcagcgacaccgagctggacaagtgcgagaagaagacccagctgttcctgaccaaccagagacccgagatccagcccaccaccaacaagcagagcttcagctacaccaagatcaagagcgagcccagcagccccagactggccagcagccccgtgcagcccaacatcggccccagcttccccgtgggccccttcctgagccagttcagcttcccccaggacatcaccatggtgccccaggccagcgagatcctggccaagatgagcgagctggtgcacagaagactgagacacggcagcagcagctacccccccgtgatctacagccccctgatgcccaagggcgccacctgcttcgagtgcaacatcaccttcaacaacctggacaactacctggtgcacaagaagcactactgcagcagcagatggcagcagatggccaagagccccgagttccccagcgtgagcgagaagatgcccgaggccctgagccccaacaccggccagaccagcatcaacctgctgaaccccgccgcccacagcgccgaccccgagaaccccctgctgcagaccagctgcatcaacagcagcaccgtgctggacctgatcggccccaacggcaagggccacgacaaggacttcagcacccagaccaagaagctgagcaccagcagcaacaacgacgacaagatcaacggcaagcccgtggacgtgaagaaccccagcgtgcccctggtggacggcgagagcgaccccaacaagaccacctgcgaggcctgcaacatcaccttcagcagacacgagacctacatggtgcacaagcagtactactgcgccaccagacacgacccccccctgaagagaagcgccagcaacaaggtgcccgccatgcagagaaccatgagaaccagaaagagaagaaagatgtacgagatgtgcctgcccgagcaggagcagagaccccccctggtgcagcagagattcctggacgtggccaacctgaacaacccctgcaccagcacccaggagcccaccgagggcctgggcgagtgctaccaccccagatgcgacatcttccccggcatcgtgagcaagcacctggagaccagcctgaccatcaacaagtgcgtgcccgtgagcaagtgcgacaccacccacagcagcgtgagctgcctggagatggacgtgcccatcgacctgagcaagaagtgcctgagccagagcgagagaaccaccaccagccccaagagactgctggactaccacgagtgcaccgtgtgcaagatcagcttcaacaaggtggagaactacctggcccacaagcagaacttctgccccgtgaccgcccaccagagaaacgacctgggccagctggacggcaaggtgttccccaaccccgagagcgagagaaacagccccgacgtgagctacgagagaagcatcatcaagtgcgagaagaacggcaacctgaagcagcccagccccaacggcaacctgttcagcagccacctggccaccctgcagggcctgaaggtgttcagcgaggccgcccagctgatcgccaccaaggaggagaacagacacctgttcctgccccagtgcctgtaccccggcgccatcaagaaggccaagggcgccgaccagctgagcccctactacggcatcaagcccagcgactacatcagcggcagcctggtgatccacaacaccgacatcgagcagagcagaaacgccgagaacgagagccccaagggccaggccagcagcaacggctgcgccgccctgaagaaggacagcctgcccctgctgcccaagaacagaggcatggtgatcgtgaacggcggcctgaagcaggacgagagacccgccgccaacccccagcaggagaacatcagccagaacccccagcacgaggacgaccacaagagccccagctggatcagcgagaaccccctggccgccaacgagaacgtgagccccggcatccccagcgccgaggagcagctgagcagcatcgccaagggcgtgaacggcagcagccaggcccccaccagcggcaagtactgcagactgtgcgacatccagttcaacaacctgagcaacttcatcacccacaagaagttctactgcagcagccacgccgccgagcacgtgaagtag

SEQ ID NO: 106257 - DNA, 3060 bp, synthetic construct; identical to SEQ ID NO: 106256
  misc_feature 1..3060: note = Description of Artificial Sequence: Synthetic coding sequence
  source 1..3060: mol_type = other DNA

SEQ ID NO: 106258 - DNA, 2418 bp, synthetic construct
  misc_feature 1..2418: note = Description of Artificial Sequence: Synthetic coding sequence
  source 1..2418: mol_type = other DNA
atggacgaggacggcctggagctgcagcaggagcccaacagcttcttcgacgccaccggcgccgacggcacccacatggacggcgaccagatcgtggtggaggtgcaggagaccgtgttcgtgagcgacgtggtggacagcgacatcaccgtgcacaacttcgtgcccgacgaccccgacagcgtggtgatccaggacgtgatcgaggacgtggtgatcgaggacgtgcagtgccccgacatcatggaggaggccgacgtgagcgagaccgtgatcatccccgagcaggtgctggacagcgacgtgaccgaggaggtgagcctggcccactgcaccgtgcccgacgacgtgctggccagcgacatcaccagcgccagcatgagcatgcccgagcacgtgctgaccggcgacagcatccacgtgagcgacgtgggccacgtgggccacgtgggccacgtggagcacgtggtgcacgacagcgtggtggaggccgagatcgtgaccgaccccctgaccaccgacgtggtgagcgaggaggtgctggtggccgactgcgccagcgaggccgtgatcgacgccaacggcatccccgtggaccagcaggacgacgacaagggcaactgcgaggactacctgatgatcagcctggacgacgccggcaagatcgagcacgacggcagcagcggcatgaccatggacaccgagagcgagatcgacccctgcaaggtggacggcacctgccccgaggtgatcaaggtgtacatcttcaaggccgaccccggcgaggacgacctgggcggcaccgtggacatcgtggagagcgagcccgagaacgaccacggcgtggagctgctggaccagaacagcagcatcagagtgcccagagagaagatggtgtacatgaccgtgaacgacagccagcccgaggacgaggacctgaacgtggccgagatcgccgacgaggtgtacatggaggtgatcgtgggcgaggaggacgccgccgccgccgccgccgccgccgccgtgcacgagcagcagatggacgacaacgagatcaagaccttcatgcccatcgcctgggccgccgcctacggcaacaacagcgacggcatcgagaacagaaacggcaccgccagcgccctgctgcacatcgacgagagcgccggcctgggcagactggccaagcagaagcccaagaagagaagaagacccgacagcagacagtaccagaccgccatcatcatcggccccgacggccaccccctgaccgtgtacccctgcatgatctgcggcaagaagttcaagagcagaggcttcctgaagagacacatgaagaaccaccccgagcacctggccaagaagaagtacagatgcaccgactgcgactacaccaccaacaagaagatcagcctgcacaaccacctggagagccacaagctgaccagcaaggccgagaaggccatcgagtgcgacgagtgcggcaagcacttcagccacgccggcgccctgttcacccacaagatggtgcacaaggagaagggcgccaacaagatgcacaagtgcaagttctgcgagtacgagaccgccgagcagggcctgctgaacagacacctgctggccgtgcacagcaagaacttcccccacatctgcgtggagtgcggcaagggcttcagacaccccagcgagctgaagaagcacatgagaatccacaccggcgagaagccctaccagtgccagtactgcgagtacagaagcgccgacagcagcaacctgaagacccacgtgaagaccaagcacagcaaggagatgcccttcaagtgcgacatctgcctgctgaccttcagcgacaccaaggaggtgcagcagcacgccctgatccaccaggagagcaagacccaccagtgcctgcactgcgaccacaagagcagcaacagcagcgacctgaagagacacatcatcagcgtgcacaccaaggactacccccacaagtgcgacatgtgcgacaagggcttccacagacccagcgagctgaagaagcacgtggccgcccacaagggcaagaagatgcaccagtgcagacactgcgacttcaagatcgccgaccccttcgtgctgagcagacacatcctgagcgtgcacaccaaggacctgcccttcagatgcaagagatgcagaaagggcttcagacagcagagcgagctgaagaagcacatgaagacccacagcggcagaaaggtgtaccagtgcgagtactgcgagtacagcaccaccgacgccagcggcttcaagagacacgtgatcagcatccacaccaaggactacccccacagatgcgagtactgcaagaagggcttcagaagacccagcgagaagaaccagcacatcatgagacaccacaaggaggtgggcctgccctag

SEQ ID NO: 106259 - DNA, 2268 bp, synthetic construct
  misc_feature 1..2268: note = Description of Artificial Sequence: Synthetic coding sequence
  source 1..2268: mol_type = other DNA
atggacgaggacggcctggagctgcagcaggagcccaacagcttcttcgacgccaccggcgccgacggcacccacatggacggcgaccagatcgtggtggaggtgcaggagaccgtgttcgtgagcgacgtggtggacagcgacatcaccgtgcacaacttcgtgcccgacgaccccgacagcgtggtgatccaggacgtgatcgaggacgtggtgatcgaggacgtgcagtgccccgacatcatggaggaggccgacgtgagcgagaccgtgatcatccccgagcaggtgctggacagcgacgtgaccgaggaggtgagcctggcccactgcaccgtgcccgacgacgtgctggccagcgacatcaccagcgccagcatgagcatgcccgagcacgtgctgaccggcgacagcatccacgtgagcgacgtgggccacgtgggccacgtgggccacgtggagcacgtggtgcacgacagcgtggtggaggccgagatcgtgaccgaccccctgaccaccgacgtggtgagcgaggaggtgctggtggccgactgcgccagcgaggccgtgatcgacgccaacggcatccccgtggaccagcaggacgacgacaagggcaactgcgaggactacctgatgatcagctgcggcaccgtggacatcgtggagagcgagcccgagaacgaccacggcgtggagctgctggaccagaacagcagcatcagagtgcccagagagaagatggtgtacatgaccgtgaacgacagccagcccgaggacgaggacctgaacgtggccgagatcgccgacgaggtgtacatggaggtgatcgtgggcgaggaggacgccgccgccgccgccgccgccgccgccgtgcacgagcagcagatggacgacaacgagatcaagaccttcatgcccatcgcctgggccgccgcctacggcaacaacagcgacggcatcgagaacagaaacggcaccgccagcgccctgctgcacatcgacgagagcgccggcctgggcagactggccaagcagaagcccaagaagagaagaagacccgacagcagacagtaccagaccgccatcatcatcggccccgacggccaccccctgaccgtgtacccctgcatgatctgcggcaagaagttcaagagcagaggcttcctgaagagacacatgaagaaccaccccgagcacctggccaagaagaagtacagatgcaccgactgcgactacaccaccaacaagaagatcagcctgcacaaccacctggagagccacaagctgaccagcaaggccgagaaggccatcgagtgcgacgagtgcggcaagcacttcagccacgccggcgccctgttcacccacaagatggtgcacaaggagaagggcgccaacaagatgcacaagtgcaagttctgcgagtacgagaccgccgagcagggcctgctgaacagacacctgctggccgtgcacagcaagaacttcccccacatctgcgtggagtgcggcaagggcttcagacaccccagcgagctgaagaagcacatgagaatccacaccggcgagaagccctaccagtgccagtactgcgagtacagaagcgccgacagcagcaacctgaagacccacgtgaagaccaagcacagcaaggagatgcccttcaagtgcgacatctgcctgctgaccttcagcgacaccaaggaggtgcagcagcacgccctgatccaccaggagagcaagacccaccagtgcctgcactgcgaccacaagagcagcaacagcagcgacctgaagagacacatcatcagcgtgcacaccaaggactacccccacaagtgcgacatgtgcgacaagggcttccacagacccagcgagctgaagaagcacgtggccgcccacaagggcaagaagatgcaccagtgcagacactgcgacttcaagatcgccgaccccttcgtgctgagcagacacatcctgagcgtgcacaccaaggacctgcccttcagatgcaagagatgcagaaagggcttcagacagcagagcgagctgaagaagcacatgaagacccacagcggcagaaaggtgtaccagtgcgagtactgcgagtacagcaccaccgacgccagcggcttcaagagacacgtgatcagcatccacaccaaggactacccccacagatgcgagtactgcaagaagggcttcagaagacccagcgagaagaaccagcacatcatgagacaccacaaggaggtgggcctgccctag

SEQ ID NO: 106260 - DNA, 2418 bp, synthetic construct; identical to SEQ ID NO: 106258
  misc_feature 1..2418: note = Description of Artificial Sequence: Synthetic coding sequence
  source 1..2418: mol_type = other DNA

SEQ ID NO: 106261 - DNA, 2418 bp, synthetic construct; identical to SEQ ID NO: 106258
  misc_feature 1..2418: note = Description of Artificial Sequence: Synthetic coding sequence
  source 1..2418: mol_type = other DNA

SEQ ID NO: 106262 - DNA, 99 bp, synthetic construct
  misc_feature 1..99: note = Description of Artificial Sequence: Synthetic coding sequence
  source 1..99: mol_type = other DNA
atggacgaggacggcctggagctgcagcaggagcccaacagcttcttcgacgccaccggcgccgacggcacccacatggacggcgaccagatcgtgtag

SEQ ID NO: 106263 - DNA, 408 bp, synthetic construct
  misc_feature 1..408: note = Description of Artificial Sequence: Synthetic coding sequence
  source 1..408: mol_type = other DNA
atggacgaggacggcctggagctgcagcaggagcccaacagcttcttcgacgccaccggcgccgacggcacccacatggacggcgaccagatcgtggtggaggtgcaggagaccgtgttcgtgagcgacgtggtggacagcgacatcaccgtgcacaacttcgtgcccgacgaccccgacagcgtggtgatccaggacgtgatcgaggacgtggtgatcgaggacgtgcagtgccccgacatcatggaggaggccgacgtgagcgagaccgtgatcatccccgagcaggtgctggacagcgacgtgaccgaggaggtgagcctggcccactgcaccgtgcccgacgacgtgctggccagcgacatcaccagcgccagcatgagcatgcccgagcacgtgctgacctag

SEQ ID NO: 106264 - DNA, 1584 bp, synthetic construct
  misc_feature 1..1584: note = Description of Artificial Sequence: Synthetic coding sequence
  source 1..1584: mol_type = other DNA
atggacaccgagagcgagatcgacccctgcaaggtggacggcacctgccccgaggtgatcaaggtgtacatcttcaaggccgaccccggcgaggacgacctgggcggcaccgtggacatcgtggagagcgagcccgagaacgaccacggcgtggagctgctggaccagaacagcagcatcagagtgcccagagagaagatggtgtacatgaccgtgaacgacagccagcccgaggacgaggacctgaacgtggccgagatcgccgacgaggtgtacatggaggtgatcgtgggcgaggaggacgccgccgccgccgccgccgccgccgccgtgcacgagcagcagatggacgacaacgagatcaagaccttcatgcccatcgcctgggccgccgcctacgccatcatcatcggccccgacggccaccccctgaccgtgtacccctgcatgatctgcggcaagaagttcaagagcagaggcttcctgaagagacacatgaagaaccaccccgagcacctggccaagaagaagtacagatgcaccgactgcgactacaccaccaacaagaagatcagcctgcacaaccacctggagagccacaagctgaccagcaaggccgagaaggccatcgagtgcgacgagtgcggcaagcacttcagccacgccggcgccctgttcacccacaagatggtgcacaaggagaagggcgccaacaagatgcacaagtgcaagttctgcgagtacgagaccgccgagcagggcctgctgaacagacacctgctggccgtgcacagcaagaacttcccccacatctgcgtggagtgcggcaagggcttcagacaccccagcgagctgaagaagcacatgagaatccacaccggcgagaagccctaccagtgccagtactgcgagtacagaagcgccgacagcagcaacctgaagacccacgtgaagaccaagcacagcaaggagatgcccttcaagtgcgacatctgcctgctgaccttcagcgacaccaaggaggtgcagcagcacgccctgatccaccaggagagcaagacccaccagtgcctgcactgcgaccacaagagcagcaacagcagcgacctgaagagacacatcatcagcgtgcacaccaaggactacccccacaagtgcgacatgtgcgacaagggcttccacagacccagcgagctgaagaagcacgtggccgcccacaagggcaagaagatgcaccagtgcagacactgcgacttcaagatcgccgaccccttcgtgctgagcagacacatcctgagcgtgcacaccaaggacctgcccttcagatgcaagagatgcagaaagggcttcagacagcagagcgagctgaagaagcacatgaagacccacagcggcagaaaggtgtaccagtgcgagtactgcgagtacagcaccaccgacgccagcggcttcaagagacacgtgatcagcatccacaccaaggactacccccacagatgcgagtactgcaagaagggcttcagaagacccagcgagaagaaccagcacatcatgagacaccacaaggaggtgggcctgccctag

SEQ ID NO: 106265 - DNA, 789 bp, synthetic construct
  misc_feature 1..789: note = Description of Artificial Sequence: Synthetic coding sequence
  source 1..789: mol_type = other DNA
atggacgaggacggcctggagctgcagcaggagcccaacagcttcttcgacgccaccggcgccgacggcacccacatggacggcgaccagatcgtggtggaggtgcaggagaccgtgttcgtgagcgacgtggtggacagcgacatcaccgtgcacaacttcgtgcccgacgaccccgacagcgtggtgatccaggacgtgatcgaggacgtggtgatcgaggacgtgcagtgccccgacatcatggaggaggccgacgtgagcgagaccgtgatcatccccgagcaggtgctggacagcgacgtgaccgaggaggtgagcctggcccactgcaccgtgcccgacgacgtgctggccagcgacatcaccagcgccagcatgagcatgcccgagcacgtgctgaccggcgacagcatccacgtgagcgacgtgggccacgtgggccacgtgggccacgtggagcacgtggtgcacgacagcgtggtggaggccgagatcgtgaccgaccccctgaccaccgacgtggtgagcgaggaggtgctggtggccgactgcgccagcgaggccgtgatcgacgccaacggcatccccgtggaccagcaggacgacgacaagggcaactgcgaggactacctgatgatcagctgcaacaacagcgacggcatcgagaacagaaacggcaccgccagcgccctgctgcacatcgacgagagcgccggcctgggcagactggccaagcagaagcccaagaagagaagaagacccgacagcagacagtaccagacctag

SEQ ID NO: 106266 - DNA, 1731 bp, synthetic construct
  misc_feature 1..1731: note = Description of Artificial Sequence: Synthetic coding sequence
  source 1..1731: mol_type = other DNA
atgaccatggacaccgagagcgagatcgacccctgcaaggtggacggcacctgccccgaggtgatcaaggtgtacatcttcaaggccgaccccggcgaggacgacctgggcggcaccgtggacatcgtggagagcgagcccgagaacgaccacggcgtggagctgctggaccagaacagcagcatcagagtgcccagagagaagatggtgtacatgaccgtgaacgacagccagcccgaggacgaggacctgaacgtggccgagatcgccgacgaggtgtacatggaggtgatcgtgggcgaggaggacgccgccgccgccgccgccgccgccgccgtgcacgagcagcagatggacgacaacgagatcaagaccttcatgcccatcgcctgggccgccgcctacggcaacaacagcgacggcatcgagaacagaaacggcaccgccagcgccctgctgcacatcgacgagagcgccggcctgggcagactggccaagcagaagcccaagaagagaagaagacccgacagcagacagtaccagaccgccatcatcatcggccccgacggccaccccctgaccgtgtacccctgcatgatctgcggcaagaagttcaagagcagaggcttcctgaagagacacatgaagaaccaccccgagcacctggccaagaagaagtacagatgcaccgactgcgactacaccaccaacaagaagatcagcctgcacaaccacctggagagccacaagctgaccagcaaggccgagaaggccatcgagtgcgacgagtgcggcaagcacttcagccacgccggcgccctgttcacccacaagatggtgcacaaggagaagggcgccaacaagatgcacaagtgcaagttctgcgagtacgagaccgccgagcagggcctgctgaacagacacctgctggccgtgcacagcaagaacttcccccacatctgcgtggagtgcggcaagggcttcagacaccccagcgagctgaagaagcacatgagaatccacaccggcgagaagccctaccagtgccagtactgcgagtacagaagcgccgacagcagcaacctgaagacccacgtgaagaccaagcacagcaaggagatgcccttcaagtgcgacatctgcctgctgaccttcagcgacaccaaggaggtgcagcagcacgccctgatccaccaggagagcaagacccaccagtgcctgcactgcgaccacaagagcagcaacagcagcgacctgaagagacacatcatcagcgtgcacaccaaggactacccccacaagtgcgacatgtgcgacaagggcttccacagacccagcgagctgaagaagcacgtggccgcccacaagggcaagaagatgcaccagtgcagacactgcgacttcaagatcgccgaccccttcgtgctgagcagacacatcctgagcgtgcacaccaaggacctgcccttcagatgcaagagatgcagaaagggcttcagacagcagagcgagctgaagaagcacatgaagacccacagcggcagaaaggtgtaccagtgcgagtactgcgagtacagcaccaccgacgccagcggcttcaagagacacgtgatcagcatccacaccaaggactacccccacagatgcgagtactgcaagaagggcttcagaagacccagcgagaagaaccagcacatcatgagacaccacaaggaggtgggcctgccctag

SEQ ID NO: 106267 - DNA, 2535 bp, synthetic construct
  misc_feature 1..2535: note = Description of Artificial Sequence: Synthetic coding sequence
  source 1..2535: mol_type = other DNA
atggacgaggacggcctggagctgcagcaggagcccaacagcttcttcgacgccaccgacagagtgagcttctgccaccccggctggagcaccgtggcccccagcggcagcaccgccaccagcgccagccaggcccaggtgatctgcagcgccagcagagtgaccggcgccaccggcgccgacggcacccacatggacggcgaccagatcgtggtggaggtgcaggagaccgtgttcgtgagcgacgtggtggacagcgacatcaccgtgcacaacttcgtgcccgacgaccccgacagcgtggtgatccaggacgtgatcgaggacgtggtgatcgaggacgtgcagtgccccgacatcatggaggaggccgacgtgagcgagaccgtgatcatccccgagcaggtgctggacagcgacgtgaccgaggaggtgagcctggcccactgcaccgtgcccgacgacgtgctggccagcgacatcaccagcgccagcatgagcatgcccgagcacgtgctgaccggcgacagcatccacgtgagcgacgtgggccacgtgggccacgtgggccacgtggagcacgtggtgcacgacagcgtggtggaggccgagatcgtgaccgaccccctgaccaccgacgtggtgagcgaggaggtgctggtggccgactgcgccagcgaggccgtgatcgacgccaacggcatccccgtggaccagcaggacgacgacaagggcaactgcgaggactacctgatgatcagcctggacgacgccggcaagatcgagcacgacggcagcagcggcatgaccatggacaccgagagcgagatcgacccctgcaaggtggacggcacctgccccgaggtgatcaaggtgtacatcttcaaggccgaccccggcgaggacgacctgggcggcaccgtggacatcgtggagagcgagcccgagaacgaccacggcgtggagctgctggaccagaacagcagcatcagagtgcccagagagaagatggtgtacatgaccgtgaacgacagccagcccgaggacgaggacctgaacgtggccgagatcgccgacgaggtgtacatggaggtgatcgtgggcgaggaggacgccgccgccgccgccgccgccgccgccgtgcacgagcagcagatggacgacaacgagatcaagaccttcatgcccatcgcctgggccgccgcctacggcaacaacagcgacggcatcgagaacagaaacggcaccgccagcgccctgctgcacatcgacgagagcgccggcctgggcagactggccaagcagaagcccaagaagagaagaagacccgacagcagacagtaccagaccgccatcatcatcggccccgacggccaccccctgaccgtgtacccctgcatgatctgcggcaagaagttcaagagcagaggcttcctgaagagacacatgaagaaccaccccgagcacctggccaagaagaagtacagatgcaccgactgcgactacaccaccaacaagaagatcagcctgcacaaccacctggagagccacaagctgaccagcaaggccgagaaggccatcgagtgcgacgagtgcggcaagcacttcagccacgccggcgccctgttcacccacaagatggtgcacaaggagaagggcgccaacaagatgcacaagtgcaagttctgcgagtacgagaccgccgagcagggcctgctgaacagacacctgctggccgtgcacagcaagaacttcccccacatctgcgtggagtgcggcaagggcttcagacaccccagcgagctgaagaagcacatgagaatccacaccggcgagaagccctaccagtgccagtactgcgagtacagaagcgccgacagcagcaacctgaagacccacgtgaagaccaagcacagcaaggagatgcccttcaagtgcgacatctgcctgctgaccttcagcgacaccaaggaggtgcagcagcacgccctgatccaccaggagagcaagacccaccagtgcctgcactgcgaccacaagagcagcaacagcagcgacctgaagagacacatcatcagcgtgcacaccaaggactacccccacaagtgcgacatgtgcgacaagggcttccacagacccagcgagctgaagaagcacgtggccgcccacaagggcaagaagatgcaccagtgcagacactgcgacttcaagatcgccgaccccttcgtgctgagcagacacatcctgagcgtgcacaccaaggacctgcccttcagatgcaagagatgcagaaagggcttcagacagcagagcgagctgaagaagcacatgaagacccacagcggcagaaaggtgtaccagtgcgagtactgcgagtacagcaccaccgacgccagcggcttcaagagacacgtgatcagcatccacaccaaggactacccccacagatgcgagtactgcaagaagggcttcagaagacccagcgagaagaaccagcacatcatgagacaccacaaggaggtgggcctgccctag

SEQ ID NO: 106268 - DNA, 522 bp, synthetic construct
  misc_feature 1..522: note = Description of Artificial Sequence: Synthetic coding sequence
  source 1..522: mol_type = other DNA
ggcggctgcagccagtacctgctgctgttcgtggacgacgccggcaagatcgagcacgacggcagcagcggcatgaccatggacaccgagagcgagatcgacccctgcaaggtggacggcacctgccccgaggtgatcaaggtgtacatcttcaaggccgaccccggcgaggacgacctgggcggcaccgtggacatcgtggagagcgagcccgagaacgaccacggcgtggagctgctggaccagaacagcagcatcagagtgcccagagagaagatggtgtacatgaccgtgaacgacagccagcccgaggacgaggacctgaacgtggccgagatcgccgacgaggtgtacatggaggtgatcgtgggcgaggaggacgccgccgccgccgccgccgccgccgccgtgcacgagcagcagatggacgacaacgagatcaagaccttcatgcccatcgcctgggccgccgcctacggcaacaacagcgacggcatcgagaacagaaacggcaccgcctag

SEQ ID NO: 106269 - DNA, 2406 bp, synthetic construct
  misc_feature 1..2406: note = Description of Artificial Sequence: Synthetic coding sequence
  source 1..2406: mol_type = other DNA
atggacgaggacgagttcgagctgcagccccaggagcccaacagcttcttcgacggcatcggcgccgacgccacccacatggacggcgaccagatcgtggtggagatccaggaggccgtgttcgtgagcaacatcgtggacagcgacatcaccgtgcacaacttcgtgcccgacgaccccgacagcgtggtgatccaggacgtggtggaggacgtggtgatcgaggaggacgtgcagtgcagcgacatcctggaggaggccgacgtgagcgagaacgtgatcatccccgagcaggtgctggacagcgacgtgaccgaggaggtgagcctgccccactgcaccgtgcccgacgacgtgctggccagcgacatcaccagcaccagcatgagcatgcccgagcacgtgctgaccagcgagagcatgcacgtgtgcgacatcggccacgtggagcacatggtgcacgacagcgtggtggaggccgagatcatcaccgaccccctgaccagcgacatcgtgagcgaggaggtgctggtggccgactgcgcccccgaggccgtgatcgacgccagcggcatcagcgtggaccagcaggacaacgacaaggccagctgcgaggactacctgatgatcagcctggacgacgccggcaagatcgagcacgacggcagcaccggcgtgaccatcgacgccgagagcgagatggacccctgcaaggtggacagcacctgccccgaggtgatcaaggtgtacatcttcaaggccgaccccggcgaggacgacctgggcggcaccgtggacatcgtggagagcgagcccgagaacgaccacggcgtggagctgctggaccagaacagcagcatcagagtgcccagagagaagatggtgtacatgaccgtgaacgacagccagcaggaggacgaggacctgaacgtggccgagatcgccgacgaggtgtacatggaggtgatcgtgggcgaggaggacgccgccgtggccgccgccgccgccgccgtgcacgagcagcagatcgacgaggacgagatgaagaccttcgtgcccatcgcctgggccgccgcctacggcaacaacagcgacggcatcgagaacagaaacggcaccgccagcgccctgctgcacatcgacgagagcgccggcctgggcagactggccaagcagaagcccaagaagaagagaagacccgacagcagacagtaccagaccgccatcatcatcggccccgacggccaccccctgaccgtgtacccctgcatgatctgcggcaagaagttcaagagcagaggcttcctgaagagacacatgaagaaccaccccgagcacctggccaagaagaagtaccactgcaccgactgcgactacaccaccaacaagaagatcagcctgcacaaccacctggagagccacaagctgaccagcaaggccgagaaggccatcgagtgcgacgagtgcggcaagcacttcagccacgccggcgccctgttcacccacaagatggtgcacaaggagaagggcgccaacaagatgcacaagtgcaagttctgcgagtacgagaccgccgagcagggcctgctgaacagacacctgctggccgtgcacagcaagaacttcccccacatctgcgtggagtgcggcaagggcttcagacaccccagcgagctgagaaagcacatgagaatccacaccggcgagaagccctaccagtgccagtactgcgagtacagaagcgccgacagcagcaacctgaagacccacatcaagaccaagcacagcaaggagatgcccttcaagtgcgacatctgcctgctgaccttcagcgacaccaaggaggtgcagcagcacaccctggtgcaccaggagagcaagacccaccagtgcctgcactgcgaccacaagagcagcaacagcagcgacctgaagagacacgtgatcagcgtgcacaccaaggactacccccacaagtgcgagatgtgcgagaagggcttccacagacccagcgagctgaagaagcacgtggccgtgcacaagggcaagaagatgcaccagtgcagacactgcgacttcaagatcgccgaccccttcgtgctgagcagacacatcctgagcgtgcacaccaaggacctgcccttcagatgcaagagatgcagaaagggcttcagacagcagaacgagctgaagaagcacatgaagacccacagcggcagaaaggtgtaccagtgcgagtactgcgagtacagcaccaccgacgccagcggcttcaagagacacgtgatcagcatccacaccaaggactacccccacagatgcgagtactgcaagaagggcttcagaagacccagcgagaagaaccagcacatcatgagacaccacaaggaggtgggcctgccctag

SEQ ID NO: 106270 - DNA, 2406 bp, synthetic construct; identical to SEQ ID NO: 106269
  misc_feature 1..2406: note = Description of Artificial Sequence: Synthetic coding sequence
  source 1..2406: mol_type = other DNA

SEQ ID NO: 106271 - DNA, 1833 bp, synthetic construct
  misc_feature 1..1833: note = Description of Artificial Sequence: Synthetic coding sequence
  source 1..1833: mol_type = other DNA
atggacgaggacgagttcgagctgcagccccaggagcccaacagcttcttcgacggcatcgtggacgacgccggcaagatcgagcacgacggcagcaccggcgtgaccatcgacgccgagagcgagatggacccctgcaaggtggacagcacctgccccgaggtgatcaaggtgtacatcttcaaggccgaccccggcgaggacgacctgggcggcaccgtggacatcgtggagagcgagcccgagaacgaccacggcgtggagctgctggaccagaacagcagcatcagagtgcccagagagaagatggtgtacatgaccgtgaacgacagccagcaggaggacgaggacctgaacgtggccgagatcgccgacgaggtgtacatggaggtgatcgtgggcgaggaggacgccgccgtggccgccgccgccgccgccgtgcacgagcagcagatcgacgaggacgagatgaagaccttcgtgcccatcgcctgggccgccgcctacggcaacaacagcgacggcatcgagaacagaaacggcaccgccagcgccctgctgcacatcgacgagagcgccggcctgggcagactggccaagcagaagcccaagaagaagagaagacccgacagcagacagtaccagaccgccatcatcatcggccccgacggccaccccctgaccgtgtacccctgcatgatctgcggcaagaagttcaagagcagaggcttcctgaagagacacatgaagaaccaccccgagcacctggccaagaagaagtaccactgcaccgactgcgactacaccaccaacaagaagatcagcctgcacaaccacctggagagccacaagctgaccagcaaggccgagaaggccatcgagtgcgacgagtgcggcaagcacttcagccacgccggcgccctgttcacccacaagatggtgcacaaggagaagggcgccaacaagatgcacaagtgcaagttctgcgagtacgagaccgccgagcagggcctgctgaacagacacctgctggccgtgcacagcaagaacttcccccacatctgcgtggagtgcggcaagggcttcagacaccccagcgagctgagaaagcacatgagaatccacaccggcgagaagccctaccagtgccagtactgcgagtacagaagcgccgacagcagcaacctgaagacccacatcaagaccaagcacagcaaggagatgcccttcaagtgcgacatctgcctgctgaccttcagcgacaccaaggaggtgcagcagcacaccctggtgcaccaggagagcaagacccaccagtgcctgcactgcgaccacaagagcagcaacagcagcgacctgaagagacacgtgatcagcgtgcacaccaaggactacccccacaagtgcgagatgtgcgagaagggcttccacagacccagcgagctgaagaagcacgtggccgtgcacaagggcaagaagatgcaccagtgcagacactgcgacttcaagatcgccgaccccttcgtgctgagcagacacatcctgagcgtgcacaccaaggacctgcccttcagatgcaagagatgcagaaagggcttcagacagcagaacgagctgaagaagcacatgaagacccacagcggcagaaaggtgtaccagtgcgagtactgcgagtacagcaccaccgacgccagcggcttcaagagacacgtgatcagcatccacaccaaggactacccccacagatgcgagtactgcaagaagggcttcagaagacccagcgagaagaaccagcacatcatgagacaccacaaggaggtgggcctgccctag

SEQ ID NO: 106272 - DNA, 276 bp, synthetic construct
  misc_feature 1..276: note = Description of Artificial Sequence: Synthetic coding sequence
  source 1..276: mol_type = other DNA
atggacgaggacgagttcgagctgcagccccaggagcccaacagcttcttcgacggcatcggcgccgacgccacccacatggacggcgaccagatcgtggtggagatccaggaggccgtgttcgtgagcaacatcgtggacagcgacatcaccgtgcacaacttcgtgcccgacgaccccgacagcgtggtgatccaggacgtggtggaggacgtggtgatcgaggaggacgtgcagtgcagcgacatcctggaggaggccgacgtgagcgagtag

SEQ ID NO: 106273 - DNA, 2175 bp, synthetic construct
  misc_feature 1..2175: note = Description of Artificial Sequence: Synthetic coding sequence
  source 1..2175: mol_type = other DNA
atggacggcgaccagatcgtggtggagatccaggaggccgtgttcgtgagcaacatcgtggacagcgacatcaccgtgcacaacttcgtgcccgacgaccccgacagcgtggtgatccaggacgtggtggaggacgtggtgatcgaggaggacgtgcagtgcagcgacatcctggaggaggccgacgtgagcgagaacgtgatcatccccgagcaggtgctggacagcgacgtgaccgaggaggtgagcctgccccactgcaccgtgcccgacgacgtgctggccagcgacatcaccagcaccagcatgagcatgcccgagcacgtgctgaccagcgagagcatgcacgtgtgcgacatcggccacgtggagcacatggtgcacgacagcgtggtggaggccgagatcatcaccgaccccctgaccagcgacatcgtgagcgaggaggtgctggtggccgactgcgcccccgaggccgtgatcgacgccagcggcatcagcgtggaccagcaggacaacgacaaggccagctgcgaggactacctgatgatcagcctggacgacgccggcaagatcgagcacgacggcagcaccggcgtgaccatcgacgccgagagcgagatggacccctgcaaggtggacagcacctgccccgaggtgatcaaggtgtacatcttcaaggccgaccccggcgaggacgacctgggcggcaccgtggacatcgtggagagcgagcccgagaacgaccacggcgtggagctgctggaccagaacagcagcatcagagtgcccagagagaagatggtgtacatgaccgtgaacgacagccagcaggaggacgaggacctgagcaacaacagcgacggcatcgagaacagaaacggcaccgccagcgccctgctgcacatcgacgagagcgccggcctgggcagactggccaagcagaagcccaagaagaagagaagacccgacagcagacagtaccagaccgccatcatcatcggccccgacggccaccccctgaccgtgtacccctgcatgatctgcggcaagaagttcaagagcagaggcttcctgaagagacacatgaagaaccaccccgagcacctggccaagaagaagtaccactgcaccgactgcgactacaccaccaacaagaagatcagcctgcacaaccacctggagagccacaagctgaccagcaaggccgagaaggccatcgagtgcgacgagtgcggcaagcacttcagccacgccggcgccctgttcacccacaagatggtgcacaaggagaagggcgccaacaagatgcacaagtgcaagttctgcgagtacgagaccgccgagcagggcctgctgaacagacacctgctggccgtgcacagcaagaacttcccccacatctgcgtggagtgcggcaagggcttcagacaccccagcgagctgagaaagcacatgagaatccacaccggcgagaagccctaccagtgccagtactgcgagtacagaagcgccgacagcagcaacctgaagacccacatcaagaccaagcacagcaaggagatgcccttcaagtgcgacatctgcctgctgaccttcagcgacaccaaggaggtgcagcagcacaccctggtgcaccaggagagcaagacccaccagtgcctgcactgcgaccacaagagcagcaacagcagcgacctgaagagacacgtgatcagcgtgcacaccaaggactacccccacaagtgcgagatgtgcgagaagggcttccacagacccagcgagctgaagaagcacgtggccgtgcacaagggcaagaagatgcaccagtgcagacactgcgacttcaagatcgccgaccccttcgtgctgagcagacacatcctgagcgtgcacaccaaggacctgcccttcagatgcaagagatgcagaaagggcttcagacagcagaacgagctgaagaagcacatgaagacccacagcggcagaaaggtgtaccagtgcgagtactgcgagtacagcaccaccgacgccagcggcttcaagagacacgtgatcagcatccacaccaaggactacccccacagatgcgagtactgcaagaagggcttcagaagacccagcgagaagaaccagcacatcatgagacaccacaaggaggtgggcctgccctag

SEQ ID NO: 106274 - DNA, 1617 bp, synthetic construct
  misc_feature 1..1617: note = Description of Artificial Sequence: Synthetic coding sequence
  source 1..1617: mol_type = other DNA
atggccagagagctgagcgagagcaccgccctggacgcccagagcaccgaggaccagatggagctgctggtgatcaaggtggaggaggaggaggccggcttccccagcagccccgacctgggcagcgagggcagcagagagagattcagaggcttcagataccccgaggccgccggccccagagaggccctgagcagactgagagagctgtgcagacagtggctgcagcccgagatgcacagcaaggagcagatcctggagctgctggtgctggagcagttcctgaccatcctgcccggcaacctgcagagctgggtgagagagcagcaccccgagagcggcgaggaggtggtggtgctgctggagtacctggagagacagctggacgagcccgccccccaggtgagcggcgtggaccagggccaggagctgctgtgctgcaagatggccctgctgacccccgcccccggcagccagagcagccagttccagctgatgaaggccctgctgaagcacgagagcgtgggcagccagcccctgcaggacagagtgctgcaggtgcccgtgctggcccacggcggctgctgcagagaggacaaggtggtggccagcagactgacccccgagagccagggcctgctgaaggtggaggacgtggccctgaccctgacccccgagtggacccagcaggacagcagccagggcaacctgtgcagagacgagaagcaggagaaccacggcagcctggtgagcctgggcgacgagaagcagaccaagagcagagacctgccccccgccgaggagctgcccgagaaggagcacggcaagatcagctgccacctgagagaggacatcgcccagatccccacctgcgccgaggccggcgagcaggagggcagactgcagagaaagcagaagaacgccaccggcggcagaagacacatctgccacgagtgcggcaagagcttcgcccagagcagcggcctgagcaagcacagaagaatccacaccggcgagaagccctacgagtgcgaggagtgcggcaaggccttcatcggcagcagcgccctggtgatccaccagagagtgcacaccggcgagaagccctacgagtgcgaggagtgcggcaaggccttcagccacagcagcgacctgatcaagcaccagagaacccacaccggcgagaagccctacgagtgcgacgactgcggcaagaccttcagccagagctgcagcctgctggagcaccacagaatccacaccggcgagaagccctaccagtgcagcatgtgcggcaaggccttcagaagaagcagccacctgctgagacaccagagaatccacaccggcgacaagaacgtgcaggagcccgagcagggcgaggcctggaagagcagaatggagagccagctggagaacgtggagacccccatgagctacaagtgcaacgagtgcgagagaagcttcacccagaacaccggcctgatcgagcaccagaagatccacaccggcgagaagccctaccagtgcaacgcctgcggcaagggcttcaccagaatcagctacctggtgcagcaccagagaagccacgtgggcaagaacatcctgagccagtag

SEQ ID NO: 106275 - DNA, 1173 bp, synthetic construct
  misc_feature 1..1173: note = Description of Artificial Sequence: Synthetic coding sequence
  source 1..1173: mol_type = other DNA
atggccctgctgacccccgcccccggcagccagagcagccagttccagctgatgaaggccctgctgaagcacgagagcgtgggcagccagcccctgcaggacagagtgctgcaggtgcccgtgctggcccacggcggctgctgcagagaggacaaggtggtggccagcagactgacccccgagagccagggcctgctgaaggtggaggacgtggccctgaccctgacccccgagtggacccagcaggacagcagccagggcaacctgtgcagagacgagaagcaggagaaccacggcagcctggtgagcctgggcgacgagaagcagaccaagagcagagacctgccccccgccgaggagctgcccgagaaggagcacggcaagatcagctgccacctgagagaggacatcgcccagatccccacctgcgccgaggccggcgagcaggagggcagactgcagagaaagcagaagaacgccaccggcggcagaagacacatctgccacgagtgcggcaagagcttcgcccagagcagcggcctgagcaagcacagaagaatccacaccggcgagaagccctacgagtgcgaggagtgcggcaaggccttcatcggcagcagcgccctggtgatccaccagagagtgcacaccggcgagaagccctacgagtgcgaggagtgcggcaaggccttcagccacagcagcgacctgatcaagcaccagagaacccacaccggcgagaagccctacgagtgcgacgactgcggcaagaccttcagccagagctgcagcctgctggagcaccacagaatccacaccggcgagaagccctaccagtgcagcatgtgcggcaaggccttcagaagaagcagccacctgctgagacaccagagaatccacaccggcgacaagaacgtgcaggagcccgagcagggcgaggcctggaagagcagaatggagagccagctggagaacgtggagacccccatgagctacaagtgcaacgagtgcgagagaagcttcacccagaacaccggcctgatcgagcaccagaagatccacaccggcgagaagccctaccagtgcaacgcctgcggcaagggcttcaccagaatcagctacctggtgcagcaccagagaagccacgtgggcaagaacatcctgagccagtag

SEQ ID NO: 106276 - DNA, 1617 bp, synthetic construct; identical to SEQ ID NO: 106274
  misc_feature 1..1617: note = Description of Artificial Sequence: Synthetic coding sequence
  source 1..1617: mol_type = other DNA

SEQ ID NO: 106277 - DNA, 537 bp, synthetic construct
  misc_feature 1..537: note = Description of Artificial Sequence: Synthetic coding sequence
  source 1..537: mol_type = other DNA
atggccagagagctgagcgagagcaccgccctggacgcccagagcaccgaggaccagatggagctgctggtgatcaaggtggaggaggaggaggccggcttccccagcagccccgacctgggcagcgagggcagcagagagagattcagaggcttcagataccccgaggccgccggccccagagaggccctgagcagactgagagagctgtgcagacagtggctgcagcccgagatgcacagcaaggagcagatcctggagctgctggtgctggagcagttcctgaccatcctgcccggcaacctgcagagctgggtgagagagcagcaccccgagagcggcgaggaggtggtggtgctgctggagtacctggagagacagctggacgagcccgccccccaggtggagagaaccggcctggtgagcgagagatgcggcctgttcccccccgagatccccgaccagagcgagggccacagcttcaacatccaggagttcttcatcagcttcctgtacagagagcccccctggcagtag

SEQ ID NO: 106278 - DNA, 993 bp, synthetic construct
  misc_feature 1..993: note = Description of Artificial Sequence: Synthetic coding sequence
  source 1..993: mol_type = other DNA
agacagagattcagaggcttcagataccccgaggccgccggccccagagaggccctgagcagactgagagagctgtgcggccagtggctgcagcccgagatgcacagcaaggagcagatcctggagctgctggtgctggagcagttcctgaccatcctgcccggcaacctgcagagctgggtgagagagcagcaccccgagagcggcgaggaggtggtggtgctgctggagtacctggagagacagctggacgagcccgccccccaggtggagagaaccggcctggtgagcgagagatgcgccagaggcatccccctgagaagcagaagcagcagcagcctgttcgtgctggccttcctgccctggcagggcatcacccacagctgcagacccttcgtggtgagcggcggcgagatccagaccaagagcagagacctgccccccgtgaagaagctgcccgagaaggagcacggcaagatctgccacctgagagaggacatcgcccagatccccacccacgccgaggccggcgagcaggagggcagactgcagagaaagcagaagaacgccatcggcagcagaagacactactgccacgagtgcggcaagagcttcgcccagagcagcggcctgaccaagcacagaagaatccacaccggcgagaagccctacgagtgcgaggactgcggcaagaccttcatcggcagcagcgccctggtgatccaccagagagtgcacaccggcgagaagccctacgagtgcgaggagtgcggcaaggtgttcagccacagcagcaacctgatcaagcaccagagaacccacaccggcgagaagccctacgagtgcgacgactgcggcaagaccttcagccagagctgcagcctgctggagcaccacaagatccacaccggcgagaagccctaccagtgcaacatgtgcggcaaggccttcagaagaaacagccacctgctgagacaccagagaatccactag

SEQ ID NO: 106279 - DNA, 1638 bp, synthetic construct
  misc_feature 1..1638: note = Description of Artificial Sequence: Synthetic coding sequence
  source 1..1638: mol_type = other DNA
atggccagagagcccagaaagaacgccgccctggacgcccagagcgccgaggaccagaccggcctgctgaccgtgaaggtggagaaggaggaggccagcgccctgaccgccgaggtgagagccccctgcagccccgccagaggccccgagagaagcagacagagattcagaggcttcagataccccgaggccgccggccccagagaggccctgagcagactgagagagctgtgcggccagtggctgcagcccgagatgcacagcaaggagcagatcctggagctgctggtgctggagcagttcctgaccatcctgcccggcaacctgcagagctgggtgagagagcagcaccccgagagcggcgaggaggtggtggtgctgctggagtacctggagagacagctggacgagcccgccccccaggtgcccgtgggcgaccagggccaggagctgctgtgctgcaagatggccctgctgacccagacccagggcagccagagcagccagtgccagcccatgaaggccctgttcaagcacgagagcctgggcagccagcccctgcacgacagagtgctgcaggtgcccggcctggcccagggcggctgctgcagagaggacgccatggtggccagcagactgacccccggcagccagggcctgctgaagatggaggacgtggccctgaccctgacccccggctggacccagctggacagcagccaggtgaacctgtacagagacgagaagcaggagaaccacagcagcctggtgagcctgggcggcgagatccagaccaagagcagagacctgccccccgtgaagaagctgcccgagaaggagcacggcaagatctgccacctgagagaggacatcgcccagatccccacccacgccgaggccggcgagcaggagggcagactgcagagaaagcagaagaacgccatcggcagcagaagacactactgccacgagtgcggcaagagcttcgcccagagcagcggcctgaccaagcacagaagaatccacaccggcgagaagccctacgagtgcgaggactgcggcaagaccttcatcggcagcagcgccctggtgatccaccagagagtgcacaccggcgagaagccctacgagtgcgaggagtgcggcaaggtgttcagccacagcagcaacctgatcaagcaccagagaacccacaccggcgagaagccctacgagtgcgacgactgcggcaagaccttcagccagagctgcagcctgctggagcaccacaagatccacaccggcgagaagccctaccagtgcaacatgtgcggcaaggccttcagaagaaacagccacctgctgagacaccagagaatccacggcgacaagaacgtgcagaaccccgagcacggcgagagctgggagagccagggcagaaccgagagccagtgggagaacaccgaggcccccgtgagctacaagtgcaacgagtgcgagagaagcttcaccagaaacagaagcctgatcgagcaccagaagatccacaccggcgagaagccctaccagtgcgacacctgcggcaagggcttcaccagaaccagctacctggtgcagcaccagagaagccacgtgggcaagaagaccctgagccagtag

SEQ ID NO: 106280 - DNA, 1173 bp, synthetic construct
  misc_feature 1..1173: note = Description of Artificial Sequence: Synthetic coding sequence
  source 1..1173: mol_type = other DNA
atggccctgctgacccagacccagggcagccagagcagccagtgccagcccatgaaggccctgttcaagcacgagagcctgggcagccagcccctgcacgacagagtgctgcaggtgcccggcctggcccagggcggctgctgcagagaggacgccatggtggccagcagactgacccccggcagccagggcctgctgaagatggaggacgtggccctgaccctgacccccggctggacccagctggacagcagccaggtgaacctgtacagagacgagaagcaggagaaccacagcagcctggtgagcctgggcggcgagatccagaccaagagcagagacctgccccccgtgaagaagctgcccgagaaggagcacggcaagatctgccacctgagagaggacatcgcccagatccccacccacgccgaggccggcgagcaggagggcagactgcagagaaagcagaagaacgccatcggcagcagaagacactactgccacgagtgcggcaagagcttcgcccagagcagcggcctgaccaagcacagaagaatccacaccggcgagaagccctacgagtgcgaggactgcggcaagaccttcatcggcagcagcgccctggtgatccaccagagagtgcacaccggcgagaagccctacgagtgcgaggagtgcggcaaggtgttcagccacagcagcaacctgatcaagcaccagagaacccacaccggcgagaagccctacgagtgcgacgactgcggcaagaccttcagccagagctgcagcctgctggagcaccacaagatccacaccggcgagaagccctaccagtgcaacatgtgcggcaaggccttcagaagaaacagccacctgctgagacaccagagaatccacggcgacaagaacgtgcagaaccccgagcacggcgagagctgggagagccagggcagaaccgagagccagtgggagaacaccgaggcccccgtgagctacaagtgcaacgagtgcgagagaagcttcaccagaaacagaagcctgatcgagcaccagaagatccacaccggcgagaagccctaccagtgcgacacctgcggcaagggcttcaccagaaccagctacctggtgcagcaccagagaagccacgtgggcaagaagaccctgagccagtag

SEQ ID NO: 106281 - DNA, 501 bp, synthetic construct
  misc_feature 1..501: note = Description of Artificial Sequence: Synthetic coding sequence
  source 1..501: mol_type = other DNA
cccacccacgccgaggccggcgagcaggagggcagactgcagagaaagcagaagaacgccatcggcagcagaagacactactgccacgagtgcggcaagagcttcgcccagagcagcggcctgaccaagcacagaagaatccacaccggcgagaagccctacgagtgcgaggactgcggcaagaccttcatcggcagcagcgccctggtgatccaccagagagtgcacaccggcgagaagccctacgagtgcgaggagtgcggcaaggtgttcagccacagcagcaacctgatcaagcaccagagaacccacaccggcgagaagccctacgagtgcgacgactgcggcaagaccttcagccagagctgcagcctgctggagcaccacaagatccacaccggcgagaagccctaccagtgcaacatgtgcggcaaggccttcagaagaaacagccacctgctgagacaccagagaatccacgtggtgaccgagatcgtgtag

SEQ ID NO: 106282 - DNA, 438 bp, synthetic construct
  misc_feature 1..438: note = Description of Artificial Sequence: Synthetic coding sequence
  source 1..438: mol_type = other DNA
atggagttccccgacctgggcaagcactgcagcgagaagacctgcaagcagctggacttcctgcccgtgaagtgcgacgcctgcaagcaggacttctgcaaggaccacttcccctacgccgcccacaagtgccccttcgccttccagaaggacgtgcacgtgcccgtgtgccccctgtgcaacacccccatccccgtgaagaagggccagatccccgacgtggtggtgggcgaccacatcgacagagactgcgacagccaccccggcaagaagaaggagaagatcttcacctacagatgcagcaaggagggctgcaagaagaaggagatgctgcagatggtgtgcgcccagtgccacggcaacttctgcatccagcacagacaccccctggaccacagctgcagacacggcagcagacccaccatcaaggccggctag

SEQ ID NO: 106283 - DNA, 543 bp, synthetic construct
  misc_feature 1..543: note = Description of Artificial Sequence: Synthetic coding sequence
  source 1..543: mol_type = other DNA
atggagttccccgacctgggcaagcactgcagcgagaagacctgcaagcagctggacttcctgcccgtgaagtgcgacgcctgcaagcaggacttctgcaaggaccacttcccctacgccgcccacaagtgccccttcgccttccagaaggacgtgcacgtgcccgtgtgccccctgtgcaacacccccatccccgtgaagaagggccagatccccgacgtggtggtgggcgaccacatcgacagagactgcgacagccaccccggcaagaagaaggagaagatcttcacctacagatgcagcaaggagggctgcaagaagaaggagatgctgcagatggtgtgcgcccagtgccacggcaacttctgcatccagcacagacaccccctggaccacagctgcagacacggcagcagacccaccatcaaggccggctgcagccccatgaccgtgagcgagagcagacccctgggcgacttcctgaccctggcccccggcggcctggcccagagactgggctactggttcaccagactgatgtag

SEQ ID NO: 106284 - DNA, 774 bp, synthetic construct
  misc_feature 1..774: note = Description of Artificial Sequence: Synthetic coding sequence
  source 1..774: mol_type = other DNA
atggagttccccgacctgggcgcccactgcagcgagcccagctgccagagactggacttcctgcccctgaagtgcgacgcctgcagcggcatcttctgcgccgaccacgtggcctacgcccagcaccactgcggcagcgcctaccagaaggacatccaggtgcccgtgtgccccctgtgcaacgtgcccgtgcccgtggccagaggcgagccccccgacagagccgtgggcgagcacatcgacagagactgcagaagcgaccccgcccagcagaagagaaagatcttcaccaacaagtgcgagagagccggctgcagacagagagagatgatgaagctgacctgcgagagatgcagcagaaacttctgcatcaagcacagacaccccctggaccacgactgcagcggcgagggccaccccaccagcagagccggcctggccgccatcagcagagcccaggccgtggccagcaccagcaccgtgcccagccccagccagaccatgcccagctgcaccagccccagcagagccaccaccagaagccccagctggaccgccccccccgtgatcgccctgcagaacggcctgagcgaggacgaggccctgcagagagccctggagatgagcctggccgagaccaagccccaggtgcccagctgccaggaggaggaggacctggccctggcccaggccctgagcgccagcgaggccgagtaccagagacagcaggcccagagcagaagcagcaagcccagcaactgcagcctgtgctag

SEQ ID NO: 106285 - DNA, 531 bp, synthetic construct
  misc_feature 1..531: note = Description of Artificial Sequence: Synthetic coding sequence
  source 1..531: mol_type = other DNA
atggagttccccgacctgggcgcccactgcagcgagcccagctgccagagactggacttcctgcccctgaagtgcgacgcctgcagcggcatcttctgcgccgaccacgtggcctacgcccagcaccactgcggcagcgcctaccagaaggacatccaggtgcccgtgtgccccctgtgcaacgtgcccgtgcccgtggccagaggcgagccccccgacagagccgtgggcgagcacatcgacagagactgcagaagcgaccccgcccagcagaagagaaagatcttcaccaacaagtgcgagagagccggctgcagacagagagagatgatgaagctgacctgcgagagatgcagcagaaacttctgcatcaagcacagacaccccctggaccacgactgcagcggcgagggccaccccaccagcagagccggcctggccgccatcagcagagcccaggccgtggccagcaccagcaccgtgcccagccccagccagaccatgcccagctgcaccagccccagcagatag

SEQ ID NO: 106286 - DNA, 774 bp, synthetic construct; identical to SEQ ID NO: 106284
  misc_feature 1..774: note = Description of Artificial Sequence: Synthetic coding sequence
  source 1..774: mol_type = other DNA

SEQ ID NO: 106287 - DNA, 531 bp, synthetic construct; identical to SEQ ID NO: 106285
  misc_feature 1..531: note = Description of Artificial Sequence: Synthetic coding sequence
  source 1..531: mol_type = other DNA

SEQ ID NO: 106288 - DNA, 153 bp, synthetic construct
  misc_feature 1..153: note = Description of Artificial Sequence: Synthetic coding sequence
  source 1..153: mol_type = other DNA
atggagttccccgacctgggcgcccactgcagcgagcccagctgccagagactggacttcctgcccctgaagtgcgacgcctgcagcggcatcttctgcgccgaccacgtggcctacgcccagcaccactgcggcagcgcctaccagaagtag

SEQ ID NO: 106289 - DNA, 678 bp, synthetic construct
  misc_feature 1..678: note = Description of Artificial Sequence: Synthetic coding sequence
  source 1..678: mol_type = other DNA
atggagttccccgacctgggcgcccactgcagcgagcccagctgccagagactggacttcctgcccctgaagtgcgacgcctgcagcggcatcttctgcgccgaccacgtggcctacgcccagcaccactgcggcagcgcctaccagaaggacatccaggtgcccgtgtgccccctgtgcaacgtgcccgtgcccgtggccagaggcgagccccccgacagagccgtgggcgagcacatcgacagagactgcagaagcgaccccgcccagcagaagagaaagatcttcaccaacaagtgcgagagagccggctgcagacagagagagatgatgaagctgacctgcgagagatgcagcagaaacttctgcatcaagcacagacaccccctggaccacgactgcagcggcgagggccaccccaccagcagagccggcctggccgccatcagcagagcccaggccgtggccagcaccagcaccgtgcccagccccagccagaccatgcccagctgcaccagccccagcagagccaccaccagaagccccagctggaccgccccccccgtgatcgccctgcagaacggcctggtgagctgggccgaggtgggctggaccgagaccaacacccagagagtgaagagcaaggacgccggcctgctgagccccttcgtggagtag

SEQ ID NO: 106290 - DNA, 684 bp, synthetic construct
  misc_feature 1..684: note = Description of Artificial Sequence: Synthetic coding sequence
  source 1..684: mol_type = other DNA
atgggcgacgccggcagcgagagaagcaaggcccccagcctgccccccagatgcccctgcggcttctggggcagcagcaagaccatgaacctgtgcagcaagtgcttcgccgacttccagaagaagcagcccgacgacgacagcgcccccagcaccagcaacagccagagcgacctgttcagcgaggagaccaccagcgacaacaacaacaccagcatcaccacccccaccctgagccccagccagcagcccctgcccaccgagctgaacgtgaccagccccagcaaggaggagtgcggcccctgcaccgacaccgcccacgtgagcctgatcacccccaccaagagaagctgcggcaccgacagccagagcgagaacgaggccagccccgtgaagagacccagactgctggagaacaccgagagaagcgaggagaccagcagaagcaagcagaagagcagaagaagatgcttccagtgccagaccaagctggagctggtgcagcaggagctgggcagctgcagatgcggctacgtgttctgcatgctgcacagactgcccgagcagcacgactgcaccttcgaccacatgggcagaggcagagaggaggccatcatgaagatggtgaagctggacagaaaggtgggcagaagctgccagagaatcggcgagggctgcagctag

SEQ ID NO: 106291 - DNA, 642 bp, synthetic construct
  misc_feature 1..642: note = Description of Artificial Sequence: Synthetic coding sequence
  source 1..642: mol_type = other DNA
atggcccaggagaccaaccagacccccggccccatgctgtgcagcaccggctgcggcttctacggcaaccccagaaccaacggcatgtgcagcgtgtgctacaaggagcacctgcagagacagcagaacagcggcagaatgagccccatgggcaccgccagcggcagcaacagccccaccagcgacagcgccagcgtgcagagagccgacaccagcctgaacaactgcgagggcgccgccggcagcaccagcgagaagagcagaaacgtgcccgtggccgccctgcccgtgacccagcagatgaccgagatgagcatcagcagagaggacaagatcaccacccccaagaccgaggtgagcgagcccgtggtgacccagcccagccccagcgtgagccagcccagcaccagccagagcgaggagaaggcccccgagctgcccaagcccaagaagaacagatgcttcatgtgcagaaagaaggtgggcctgaccggcttcgactgcagatgcggcaacctgttctgcggcctgcacagatacagcgacaagcacaactgcccctacgactacaaggccgaggccgccgccaagatcagaaaggagaaccccgtggtggtggccgagaagatccagagaatctag

SEQ ID NO: 106292 - DNA, 642 bp, synthetic construct; identical to SEQ ID NO: 106291
  misc_feature 1..642: note = Description of Artificial Sequence: Synthetic coding sequence
  source 1..642: mol_type = other DNA

SEQ ID NO: 106293 - DNA, 636 bp, synthetic construct
  misc_feature 1..636: note = Description of Artificial Sequence: Synthetic coding sequence
  source 1..636: mol_type = other DNA
atggccaagcccgagcaggccgccgacggcggcgtgagaggcagaggcgccagaccccccgcccaggaggcccagagaagaagaagacaccccgtggtggtggccagagacctggcccccggcgtgcccggcagcctgcacagcacccagaagaacatggcccaggagaccaaccagacccccggccccatgctgtgcagcaccggctgcggcttctacggcaaccccagaaccaacggcatgtgcagcgtgtgctacaaggagcacctgcagagacagcagaacagcggcagaatgagccccatgggcaccgccagcggcagcaacagccccaccagcgacagcgccagcgtgcagagagccgacaccagcctgaacaactgcgagggcgccgccggcagcaccagcgagaagagcagaaacgtgcccgtggccgccctgcccgtgacccagcagatgaccgagatgagcatcagcagagaggacaagatcaccacccccaagaccgaggtgagcgagcccgtggtgacccagcccagccccagcgtgagccagcccagcaccagccagagcgaggagaaggcccccgagctgcccaagcccaagaagaacagatgcttcatgtgcagaaagtag

SEQ ID NO: 106294 - DNA, 642 bp, synthetic construct; identical to SEQ ID NO: 106291
  misc_feature 1..642: note = Description of Artificial Sequence: Synthetic coding sequence
  source 1..642: mol_type = other DNA

SEQ ID NO: 106295 - DNA, 642 bp, synthetic construct; identical to SEQ ID NO: 106291
  misc_feature 1..642: note = Description of Artificial Sequence: Synthetic coding sequence
  source 1..642: mol_type = other DNA

SEQ ID NO: 106296 - DNA, 627 bp, synthetic construct
  misc_feature 1..627: note = Description of Artificial Sequence: Synthetic coding sequence
  source 1..627: mol_type = other DNA
atggcccaggagaccaaccacagccaggtgcccatgctgtgcagcaccggctgcggcttctacggcaaccccagaaccaacggcatgtgcagcgtgtgctacaaggagcacctgcagagacagaacagcagcaacggcagaatcagcccccccgccaccagcgtgagcagcctgagcgagagcctgcccgtgcagtgcaccgacggcagcgtgcccgaggcccagagcgccctggacagcaccagcagcagcatgcagcccagccccgtgagcaaccagagcctgctgagcgagagcgtggccagcagccagctggacagcaccagcgtggacaaggccgtgcccgagaccgaggacgtgcaggccagcgtgagcgacaccgcccagcagcccagcgaggagcagagcaagagcctggagaagcccaagcagaagaagaacagatgcttcatgtgcagaaagaaggtgggcctgaccggcttcgagtgcagatgcggcaacgtgtactgcggcgtgcacagatacagcgacgtgcacaactgcagctacaactacaaggccgacgccgccgagaagatcagaaaggagaaccccgtggtggtgggcgagaagatccagaagatctag

SEQ ID NO: 106297 - DNA, 627 bp, synthetic construct; identical to SEQ ID NO: 106296
  misc_feature 1..627: note = Description of Artificial Sequence: Synthetic coding sequence
  source 1..627: mol_type = other DNA

SEQ ID NO: 106298 - DNA, 591 bp, synthetic construct
  misc_feature 1..591: note = Description of Artificial Sequence: Synthetic coding sequence
  source 1..591: mol_type = other DNA
atggcccaggagaccaaccacagccaggtgcccatgctgtgcagcaccggctgcggcttctacggcaaccccagaaccaacggcatgtgcagcgtgtgctacaaggagcacctgcagagacagaacagcagcaacggcagaatcagcccccccgtgcagtgcaccgacggcagcgtgcccgaggcccagagcgccctggacagcaccagcagcagcatgcagcccagccccgtgagcaaccagagcctgctgagcgagagcgtggccagcagccagctggacagcaccagcgtggacaaggccgtgcccgagaccgaggacgtgcaggccagcgtgagcgacaccgcccagcagcccagcgaggagcagagcaagagcctggagaagcccaagcagaagaagaacagatgcttcatgtgcagaaagaaggtgggcctgaccggcttcgagtgcagatgcggcaacgtgtactgcggcgtgcacagatacagcgacgtgcacaactgcagctacaactacaaggccgacgccgccgagaagatcagaaaggagaaccccgtggtggtgggcgagaagatccagaagatctag

SEQ ID NO: 106299 - DNA, 627 bp, synthetic construct; identical to SEQ ID NO: 106296
  misc_feature 1..627: note = Description of Artificial Sequence: Synthetic coding sequence
  source 1..627: mol_type = other DNA

SEQ ID NO: 106300 - DNA, 627 bp, synthetic construct; identical to SEQ ID NO: 106296
  misc_feature 1..627: note = Description of Artificial Sequence: Synthetic coding sequence
  source 1..627: mol_type = other DNA

SEQ ID NO: 106301 - DNA, 627 bp, synthetic construct; identical to SEQ ID NO: 106296
  misc_feature 1..627: note = Description of Artificial Sequence: Synthetic coding sequence
  source 1..627: mol_type = other DNA

SEQ ID NO: 106302 - DNA, 2085 bp, synthetic construct
  misc_feature 1..2085: note = Description of Artificial Sequence: Synthetic coding sequence
  source 1..2085: mol_type = other DNA
atggagaacaagagcctggagagcagccagaccgacctgaagctggtggcccaccccagagccaagagcaaggtgtggaagtacttcggcttcgacaccaacgccgagggctgcatcctgcagtggaagaagatctactgcagaatctgcatggcccagatcgcctacagcggcaacaccagcaacctgagctaccacctggagaagaaccaccccgaggagttctgcgagttcgtgaagagcaacaccgagcagatgagagaggccttcgccaccgccttcagcaagctgaagcccgagagcagccagcagcccggccaggacgccctggccgtgaaggccggccacggctacgacagcaagaagcagcaggagctgaccgccgccgtgctgggcctgatctgcgagggcctgtaccccgccagcatcgtggacgagcccaccttcaaggtgctgctgaagaccgccgaccccagatacgagctgcccagcagaaagtacatcagcaccaaggccatccccgagaagtacggcgccgtgagagaggtgatcctgaaggagctggccgaggccacctggtgcggcatcagcaccgacatgtggagaagcgagaaccagaacagagcctacgtgaccctggccgcccacttcctgggcctgggcgcccccaactgcctgagcatgggcagcagatgcctgaagaccttcgaggtgcccgaggagaacaccgccgagaccatcaccagagtgctgtacgaggtgttcatcgagtggggcatcagcgccaaggtgttcggcgccaccaccaactacggcaaggacatcgtgaaggcctgcagcctgctggacgtggccgtgcacatgccctgcctgggccacaccttcaacgccggcatccagcaggccttccagctgcccaagctgggcgccctgctgagcagatgcagaaagctggtggagtacttccagcagagcgccgtggccatgtacatgctgtacgagaagcagaagcagcagaacgtggcccactgcatgctggtgagcaacagagtgagctggtggggcagcaccctggccatgctgcagagactgaaggagcagcagttcgtgatcgccggcgtgctggtggaggacagcaacaaccaccacctgatgctggaggccagcgagtgggccaccatcgagggcctggtggagctgctgcagcccttcaagcaggtggccgagatgctgagcgccagcagataccccaccatcagcatggtgaagcccctgctgcacatgctgctgaacaccaccctgaacatcaaggagaccgacagcaaggagctgagcatggccaaggaggtgatcgccaaggagctgagcaagacctaccaggagacccccgagatcgacatgttcctgaacgtggccaccttcctggaccccagatacaagagactgcccttcctgagcgccttcgagagacagcaggtggagaacagagtggtggaggaggccaagggcctgctggacaaggtgaaggacggcggctacagacccgccgaggacaagatcttccccgtgcccgaggagccccccgtgaagaagctgatgagaaccagcacccccccccccgccagcgtgatcaacaacatgctggccgagatcttctgccagaccggcggcgtggaggaccaggaggagtggcacgcccaggtggtggaggagctgagcaacttcaagagccagaaggtgctgggcctgaacgaggaccccctgaagtggtggagcgacagactggccctgttccccctgctgcccaaggtgctgcagaagtactggtgcgtgaccgccaccagagtggcccccgagagactgttcggcagcgccgccaacgtggtgagcgccaagagaaacagactggcccccgcccacgtggacgagcaggtgttcctgtacgagaacgccagaagcggcgccgaggccgagcccgaggaccaggacgagggcgagtggggcctggaccaggagcaggtgttcagcctgggcgacggcgtgagcggcggcttcttcggcatcagagacagcagcttcctgtag

SEQ ID NO: 106303 - DNA, 2085 bp, synthetic construct; identical to SEQ ID NO: 106302
  misc_feature 1..2085: note = Description of Artificial Sequence: Synthetic coding sequence
  source 1..2085: mol_type = other DNA

SEQ ID NO: 106304 - DNA, 2085 bp, synthetic construct; identical to SEQ ID NO: 106302
  misc_feature 1..2085: note = Description of Artificial Sequence: Synthetic coding sequence
  source 1..2085: mol_type = other DNA

SEQ ID NO: 106305 - DNA, 819 bp, synthetic construct
  misc_feature 1..819: note = Description of Artificial Sequence: Synthetic coding sequence
  source 1..819: mol_type = other DNA
atggagaacaagagcctggagagcagccagaccgacctgaagctggtggcccaccccagagccaagagcaaggtgtggaagtacttcggcttcgacaccaacgccgagggctgcatcctgcagtggaagaagatctactgcagaatctgcatggcccagatcgcctacagcggcaacaccagcaacctgagctaccacctggagaagaaccaccccgaggagttctgcgagttcgtgaagagcaacaccgagcagatgagagaggccttcgccaccgccttcagcaagctgaagcccgagagcagccagcagcccggccaggacgccctggccgtgaaggccggccacggctacgacagcaagaagcagcaggagctgaccgccgccgtgctgggcctgatctgcgagggcctgtaccccgccagcatcgtggacgagcccaccttcaaggtgctgctgaagaccgccgaccccagatacgagctgcccagcagaaagtacatcagcaccaaggccatccccgagaagtacggcgccgtgagagaggtgatcctgaaggagctggccgaggccacctggtgcggcatcagcaccgacatgtggagaagcgagaaccagaacagagcctacgtgaccctggccgcccacttcctgggcctgggcgcccccaactgcctgagcatgggcagcagatgcctgaagaccttcgaggtgcccgaggagaacaccgccgagaccatcaccagagtgctgtacgaggtgttcatcgagtggggcatcagcgccaaggtgttcggcgccaccaccaactacggctag

SEQ ID NO: 106306 - DNA, 3177 bp, synthetic construct
  misc_feature 1..3177: note = Description of Artificial Sequence: Synthetic coding sequence
  source 1..3177: mol_type = other DNA
atgagaagaaagggcagatgccacagaggcagcgccgccagacaccccagcagcccctgcagcgtgaagcacagccccaccagagagaccctgacctacgcccaggcccagagaatggtggagatcgagatcgagggcagactgcacagaatcagcatcttcgaccccctggagatcatcctggaggacgacctgaccgcccaggagatgagcgagtgcaacagcaacaaggagaacagcgagagaccccccgtgtgcctgagaaccaagagacacaagaacaacagagtgaagaagaagaacgaggccctgcccagcgcccacggcacccccgccagcgccagcgccctgcccgagcccaaggtgagaatcgtggagtacagcccccccagcgcccccagaagaccccccgtgtactacaagttcatcgagaagagcgccgaggagctggacaacgaggtggagtacgacatggacgaggaggactacgcctggctggagatcgtgaacgagaagagaaagggcgactgcgtgcccgccgtgagccagagcatgttcgagttcctgatggacagattcgagaaggagagccactgcgagaaccagaagcagggcgagcagcagagcctgatcgacgaggacgccgtgtgctgcatctgcatggacggcgagtgccagaacagcaacgtgatcctgttctgcgacatgtgcaacctggccgtgcaccaggagtgctacggcgtgccctacatccccgagggccagtggctgtgcagacactgcctgcagagcagagccagacccgccgactgcgtgctgtgccccaacaagggcggcgccttcaagaagaccgacgacgacagatggggccacgtggtgtgcgccctgtggatccccgaggtgggcttcgccaacaccgtgttcatcgagcccatcgacggcgtgagaaacatcccccccgccagatggaagctgacctgctacctgtgcaagcagaagggcgtgggcgcctgcatccagtgccacaaggccaactgctacaccgccttccacgtgacctgcgcccagaaggccggcctgtacatgaagatggagcccgtgaaggagctgaccggcggcggcaccaccttcagcgtgagaaagaccgcctactgcgacgtgcacaccccccccggctgcaccagaagacccctgaacatctacggcgacgtggagatgaagaacggcgtgtgcagaaaggagagcagcgtgaagaccgtgagaagcaccagcaaggtgagaaagaaggccaagaaggccaagaaggccctggccgagccctgcgccgtgctgcccaccgtgtgcgccccctacatccccccccagagactgaacagaatcgccaaccaggtggccatccagagaaagaagcagttcgtggagagagcccacagctactggctgctgaagagactgagcagaaacggcgcccccctgctgagaagactgcagagcagcctgcagagccagagaagcagccagcagagagagaacgacgaggagatgaaggccgccaaggagaagctgaagtactggcagagactgagacacgacctggagagagccagactgctgatcgagctgctgagaaagagagagaagctgaagagagagcaggtgaaggtggagcaggtggccatggagctgagactgacccccctgaccgtgctgctgagaagcgtgctggaccagctgcaggacaaggaccccgccagaatcttcgcccagcccgtgagcctgaaggaggtgcccgactacctggaccacatcaagcaccccatggacttcgccaccatgagaaagagactggaggcccagggctacaagaacctgcacgagttcgaggaggacttcgacctgatcatcgacaactgcatgaagtacaacgccagagacaccgtgttctacagagccgccgtgagactgagagaccagggcggcgtggtgctgagacaggccagaagagaggtggacagcatcggcctggaggaggccagcggcatgcacctgcccgagagacccgccgccgcccccagaagacccttcagctgggaggacgtggacagactgctggaccccgccaacagagcccacctgggcctggaggagcagctgagagagctgctggacatgctggacctgacctgcgccatgaagagcagcggcagcagaagcaagagagccaagctgctgaagaaggagatcgccctgctgagaaacaagctgagccagcagcacagccagcccctgcccaccggccccggcctggagggcttcgaggaggacggcgccgccctgggccccgaggccggcgaggaggtgctgcccagactggagaccctgctgcagcccagaaagagaagcagaagcacctgcggcgacagcgaggtggaggaggagagccccggcaagagactggacgccggcctgaccaacggcttcggcggcgccagaagcgagcaggagcccggcggcggcctgggcagaaaggccacccccagaagaagatgcgccagcgagagcagcatcagcagcagcaacagccccctgtgcgacagcagcttcaacgcccccaagtgcggcagaggcaagcccgccctggtgagaagacacaccctggaggacagaagcgagctgatcagctgcatcgagaacggcaactacgccaaggccgccagaatcgccgccgaggtgggccagagcagcatgtggatcagcaccgacgccgccgccagcgtgctggagcccctgaaggtggtgtgggccaagtgcagcggctaccccagctaccccgccctgatcatcgaccccaagatgcccagagtgcccggccaccacaacggcgtgaccatccccgccccccccctggacgtgctgaagatcggcgagcacatgcagaccaagagcgacgagaagctgttcctggtgctgttcttcgacaacaagagaagctggcagtggctgcccaagagcaagatggtgcccctgggcatcgacgagaccatcgacaagctgaagatgatggagggcagaaacagcagcatcagaaaggccgtgagaatcgccttcgacagagccatgaaccacctgagcagagtgcacggcgagcccaccagcgacctgagcgacatcgactag

SEQ ID NO: 106307 - DNA, 2940 bp, synthetic construct
  misc_feature 1..2940: note = Description of Artificial Sequence: Synthetic coding sequence
  source 1..2940: mol_type = other DNA
atgagcgtgtgcaccctgagcgtgcccgtgagcagcctgagccccggcagaagatgcaacaccttcagcgacagcggcatcctgggctgcgtgcccatcaacagcaacaccgacgaggaggacgtggtggaggagaagatggtggccgagggcgtgaacaaggaggccaagcagcccgccaagaagaagagaaagaagggcctgagaatcaagggcaagagaagaagaaagaagctgatcctggccaagaagttcagcaaggacctgggcagcggcagacccgtggccgacgcccccgccctgctggccagcaacgaccccgagcaggacgaggagagcctgttcgagagcaacatcgagaagcagatctacctgcccagcaccagagccaagaccagcatcgtgtggcacttcttccacgtggacccccagtacacctggagagccatctgcaacctgtgcgagaagagcgtgagcagaggcaagcccggcagccacctgggcaccagcaccctgcagagacacctgcaggccagacacagcccccactggaccagagccaacaagttcggcgtggccagcggcgaggaggacttcaccctggacgtgagcctgagccccagcagcggcagcaacggcagcttcgagtacatccccaccgaccccctggacgacaacagaatgggcaagaagcacgacaagagcgccagcgacgccctgagagccgagagaggcagattcctgatcaagagcaacatcgtgaagcacgccctgatccccggcaccagagccaagaccagcgccgtgtggaacttcttctacaccgacccccagcacatcagcagagccgtgtgcaacatctgcaagagaagcgtgagcagaggcagacccggcagccacctgggcaccagcaccctgcagagacacctgcaggccacccaccccatccactgggccgtggccaacaaggacagcggcgccgtggccaacggcctggacgaggccgagaccgagagaagcgacctgctgagcgacaccctgcacggcgagaagagcaccggcagccaggacctgaccgccgaggacctgagcgacagcgacagcgacgagcccatgctggaggtggagaacagaagcgagagccccatccccgtggccgagcagggcaccctgatgagagcccaggagagagagaccacctgctgcggcaaccccgtgagcagccacatcagccaggccatcatccagatgatcgtggaggacatgcacccctacaactacttcagcacccccgccttccagagattcatgcagatcgtggcccccgactacagactgcccagcgagacctacttcttcaccaaggccgtgccccagctgtacgactgcgtgagagagaagatcttcctgaccctggagaacgtgcagagccagaagatccacctgaccgtggacatctggacccacgaccccagcaccgactacttcatcgtgaccgtgcactgggtgagcctggagaccgccagcttcctgaacaacggcagaatccccgacttcagaaagtgggccgtgctgtgcgtgaccggcctggccaaggactgcctgatcaccaacatcctgcaggagctgaacgaccagatcggcctgtggctgagccccaacttcctgatccccagcttcatcgtgagcgacaacagcagcaacgtggtgcacgccatcaaggacggcggcttcacccacgtgccctgcttcctgcactgcctgaacatggtgatccaggacttcttctgcgagcacaagagcatcgagaacatgctggtggccgccagaaagacctgccaccacttcagccacagcgtgaaggccagacagatcctgcaggagttccagaacgaccaccagctgccctggaagaacctgaagcaggacgagaccggccactggatcagcaccttctacatgctgaagtggctgctggagcactgctacagcgtgcaccacagcctgggcagagccagcggcgtggtgctgaccagcctgcagtggaccctgatgacctacgtgtgcgacatcctgaagcccttcgaggaggccacccagaaggtgagcgtgaagaccgccggcctgaaccaggtgctgcccctgatccaccacctgctgctgagcctgcagaagctgagagaggacttccaggtgagaggcatcacccaggccctgaacctggtggacagcctgagcctgaagctggagaccgacaccctgctgagcgccatgctgaagagcaagccctgcatcctggccaccctgctggacccctgcttcaagaacagcctggaggacttcttcccccagggcgccgacctggagacctacaagcagttcctggccgaggaggtgtgcaactacatggagagcagccccgagatctgccagatccccaccagcgaggccagctgccccagcgtgaccgtgggcgccgacagcttcaccagcagcctgaaggagggcaccagcagcagcggcagcgtggacagcagcgccgtggacaacgtggccctgggcagcaagagcttcatgttccccagcgccgtggccgtggtggacgagtacttcaaggagaagtacagcgagttcagcggcggcgacgaccccctgatctactggcagagaaagatcagcatctggcccgccctgacccaggtggccatccagtacctgagctgccccatgtgcagctggcagagcgagtgcatcttcaccaagaacagccacttccaccccaagcagatcatgagcctggacttcgacaacatcgagcagctgatgttcctgaagatgaacctgaagaacgtgaactacgactacagcaccctggtgctgagctgggaccccgagcagaacgaggtggtgcagagcagcgagaaggagatcctgccctag

SEQ ID NO: 106308 - DNA, 4938 bp, synthetic construct
  misc_feature 1..4938: note = Description of Artificial Sequence: Synthetic coding sequence
  source 1..4938: mol_type = other DNA
atggaggagagcaagaccctgaagagcgagaaccacgagcccaagaagaacgtgatctgcgaggagagcaaggccgtgcaggtgatcggcaaccagaccctgaaggccagaaacgacaagagcgtgaaggagatcgagaacagcagccccaacagaaacagcagcaagaagaacaagcagaacgacatctgcatcgagaagaccgaggtgaagagctgcaaggtgaacgccgccaacctgcccggccccaaggacctgggcctggtgctgagagaccagagccactgcaaggccaagaagttccccaacagccccgtgaaggccgagaaggccaccatcagccaggccaagagcgagaaggccaccagcctgcaggccaaggccgagaagagccccaagagccccaacagcgtgaaggccgagaaggccagcagctaccagatgaagagcgagaaggtgcccagcagccccgccgaggccgagaagggccccagcctgctgctgaaggacatgagacagaagaccgagctgcagcagatcggcaagaagatccccagcagcttcaccagcgtggacaaggtgaacatcgaggccgtgggcggcgagaagtgcgccctgcagaacagccccagaagccagaagcagcagacctgcaccgacaacaccggcgacagcgacgacagcgccagcggcatcgaggacgtgagcgacgacctgagcaagatgaagaacgacgagagcaacaaggagaacagcagcgagatggactacctggagaacgccaccgtgatcgacgagagcgccctgacccccgagcagagactgggcctgaagcaggccgaggagagactggagagagaccacatcttcagactggagaagagaagccccgagtacaccaactgcagatacctgtgcaagctgtgcctgatccacatcgagaacatccagggcgcccacaagcacatcaaggagaagagacacaagaagaacatcctggagaagcaggaggagagcgagctgagaagcctgcccccccccagccccgcccacctggccgccctgagcgtggccgtgatcgagctggccaaggagcacggcatcaccgacgacgacctgagagtgagacaggagatcgtggaggagatgagcaaggtgatcaccaccttcctgcccgagtgcagcctgagactgtacggcagcagcctgaccagattcgccctgaagagcagcgacgtgaacatcgacatcaagttcccccccaagatgaaccaccccgacctgctgatcaaggtgctgggcatcctgaagaagaacgtgctgtacgtggacgtggagagcgacttccacgccaaggtgcccgtggtggtgtgcagagacagaaagagcggcctgctgtgcagagtgagcgccggcaacgacatggcctgcctgaccaccgacctgctgaccgccctgggcaagatcgagcccgtgttcatccccctggtgctggccttcagatactgggccaagctgtgctacatcgacagccagaccgacggcggcatccccagctactgcttcgccctgatggtgatgttcttcctgcagcagagaaagccccccctgctgccctgcctgctgggcagctggatcgagggcttcgaccccaagagaatggacgacttccagctgaagggcatcgtggaggagaagttcgtgaagtgggagtgcaacagcagcagcgccaccgagaagaacagcatcgccgaggagaacaaggccaaggccgaccagcccaaggacgacaccaagaagaccgagaccgacaaccagagcaacgccatgaaggagaagcacggcaagagccccctggccctggagacccccaacagagtgagcctgggccagctgtggctggagctgctgaagttctacaccctggacttcgccctggaggagtacgtgatctgcgtgagaatccaggacatcctgaccagagagaacaagaactggcccaagagaagaatcgccatcgaggaccccttcagcgtgaagagaaacgtggccagaagcctgaacagccagctggtgtacgagtacgtggtggagagattcagagccgcctacagatacttcgcctgcccccagaccaagggcggcaacaagagcaccgtggacttcaagaagagagagaagggcaagatcagcaacaagaagcccgtgaagagcaacaacatggccaccaacggctgcatcctgctgggcgagaccaccgagaagatcaacgccgagagagagcagcccgtgcagtgcgacgagatggactgcaccagccagagatgcatcatcgacaacaacaacctgctggtgaacgagctggacttcgccgaccacggccaggacagcagcagcctgagcaccagcaagagcagcgagatcgagcccaagctggacaagaagcaggacgacctggcccccagcgagacctgcctgaagaaggagctgagccagtgcaactgcatcgacctgagcaagagccccgaccccgacaagagcaccggcaccgactgcagaagcaacctggagaccgagagcagccaccagagcgtgtgcaccgacaccagcgccaccagctgcaactgcaaggccaccgaggacgccagcgacctgaacgacgacgacaacctgcccacccaggagctgtactacgtgttcgacaagttcatcctgaccagcggcaagccccccaccatcgtgtgcagcatctgcaagaaggacggccacagcaagaacgactgccccgaggacttcagaaagatcgacctgaagcccctgccccccatgaccaacagattcagagagatcctggacctggtgtgcaagagatgcttcgacgagctgagccccccctgcagcgagcagcacaacagagagcagatcctgatcggcctggagaagttcatccagaaggagtacgacgagaaggccagactgtgcctgttcggcagcagcaagaacggcttcggcttcagagacagcgacctggacatctgcatgaccctggagggccacgagaacgccgagaagctgaactgcaaggagatcatcgagaacctggccaagatcctgaagagacaccccggcctgagaaacatcctgcccatcaccaccgccaaggtgcccatcgtgaagttcgagcacagaagaagcggcctggagggcgacatcagcctgtacaacaccctggcccagcacaacaccagaatgctggccacctacgccgccatcgaccccagagtgcagtacctgggctacaccatgaaggtgttcgccaagagatgcgacatcggcgacgccagcagaggcagcctgagcagctacgcctacatcctgatggtgctgtacttcctgcagcagagaaagccccccgtgatccccgtgctgcaggagatcttcgacggcaagcagatcccccagagaatggtggacggctggaacgccttcttcttcgacaagaccgaggagctgaagaagagactgcccagcctgggcaagaacaccgagagcctgggcgagctgtggctgggcctgctgagattctacaccgaggagttcgacttcaaggagtacgtgatcagcatcagacagaagaagctgctgaccaccttcgagaagcagtggaccagcaagtgcatcgccatcgaggaccccttcgacctgaaccacaacctgggcgccggcgtgagcagaaagatgaccaacttcatcatgaaggccttcatcaacggcagaaagctgttcggcacccccttctaccccctgatcggcagagaggccgagtacttcttcgacagcagagtgctgaccgacggcgagctggcccccaacgacagatgctgcagagtgtgcggcaagatcggccactacatgaaggactgccccaagagaaagagcagcctgctgttcagactgaagaagaaggacagcgaggaggagaaggagggcaacgaggaggagaaggacagcagagacgtgctggaccccagagacctgcacgacaccagagacttcagagaccccagagacctgagatgcttcatctgcggcgacgccggccacgtgagaagagagtgccccgaggtgaagctggccagacagagaaacagcagcgtggccgccgcccagctggtgagaaacctggtgaacgcccagcaggtggccggcagcgcccagcagcagggcgaccagagcatcagaaccagacagagcagcgagtgcagcgagagccccagctacagcccccagccccagcccttcccccagaacagcagccagagcgccgccatcacccagcccagcagccagcccggcagccagcccaagctgggccccccccagcagggcgcccagcccccccaccaggtgcagatgcccctgtacaacttcccccagagcccccccgcccagtacagccccatgcacaacatgggcctgctgcccatgcaccccctgcagatccccgcccccagctggcccatccacggccccgtgatccacagcgcccccggcagcgcccccagcaacatcggcctgaacgaccccagcatcatcttcgcccagcccgccgccagacccgtggccatccccaacaccagccacgacggccactggcccagaaccgtggcccccaacagcctggtgaacagcggcgccgtgggcaacagcgagcccggcttcagaggcctgaccccccccatcccctgggagcacgcccccagaccccacttccccctggtgcccgccagctggccctacggcctgcaccagaacttcatgcaccagggcaacgccagattccagcccaacaagcccttctacacccaggacagatgcgccaccagaagatgcagagagagatgcccccacccccccagaggcaacgtgagcgagtag

SEQ ID NO: 106309 - DNA, 4935 bp, synthetic construct
  misc_feature 1..4935: note = Description of Artificial Sequence: Synthetic coding sequence
  source 1..4935: mol_type = other DNA
atggaggagagcaagaccctgaagagcgagaaccacgagcccaagaagaacgtgatctgcgaggagagcaaggccgtgcaggtgatcggcaaccagaccctgaaggccagaaacgacaagagcgtgaaggagatcgagaacagcagccccaacagaaacagcagcaagaagaacaagcagaacgacatctgcatcgagaagaccgaggtgaagagctgcaaggtgaacgccgccaacctgcccggccccaaggacctgggcctggtgctgagagaccagagccactgcaaggccaagaagttccccaacagccccgtgaaggccgagaaggccaccatcagccaggccaagagcgagaaggccaccagcctgcaggccaaggccgagaagagccccaagagccccaacagcgtgaaggccgagaaggccagcagctaccagatgaagagcgagaaggtgcccagcagccccgccgaggccgagaagggccccagcctgctgctgaaggacatgagacagaagaccgagctgcagcagatcggcaagaagatccccagcagcttcaccagcgtggacaaggtgaacatcgaggccgtgggcggcgagaagtgcgccctgcagaacagccccagaagccagaagcagcagacctgcaccgacaacaccggcgacagcgacgacagcgccagcggcatcgaggacgtgagcgacgacctgagcaagatgaagaacgacgagagcaacaaggagaacagcagcgagatggactacctggagaacgccaccgtgatcgacgagagcgccctgacccccgagcagagactgggcctgaagcaggccgaggagagactggagagagaccacatcttcagactggagaagagaagccccgagtacaccaactgcagatacctgtgcaagctgtgcctgatccacatcgagaacatccagggcgcccacaagcacatcaaggagaagagacacaagaagaacatcctggagaagcaggaggagagcgagctgagaagcctgcccccccccagccccgcccacctggccgccctgagcgtggccgtgatcgagctggccaaggagcacggcatcaccgacgacgacctgagagtgagacaggagatcgtggaggagatgagcaaggtgatcaccaccttcctgcccgagtgcagcctgagactgtacggcagcagcctgaccagattcgccctgaagagcagcgacgtgaacatcgacatcaagttcccccccaagatgaaccaccccgacctgctgatcaaggtgctgggcatcctgaagaagaacgtgctgtacgtggacgtggagagcgacttccacgccaaggtgcccgtggtggtgtgcagagacagaaagagcggcctgctgtgcagagtgagcgccggcaacgacatggcctgcctgaccaccgacctgctgaccgccctgggcaagatcgagcccgtgttcatccccctggtgctggccttcagatactgggccaagctgtgctacatcgacagccagaccgacggcggcatccccagctactgcttcgccctgatggtgatgttcttcctgcagcagagaaagccccccctgctgccctgcctgctgggcagctggatcgagggcttcgaccccaagagaatggacgacttccagctgaagggcatcgtggaggagaagttcgtgaagtgggagtgcaacagcagcagcgccaccgagaagaacagcatcgccgaggagaacaaggccaaggccgaccagcccaaggacgacaccaagaagaccgagaccgacaaccagagcaacgccatgaaggagaagcacggcaagagccccctggccctggagacccccaacagagtgagcctgggccagctgtggctggagctgctgaagttctacaccctggacttcgccctggaggagtacgtgatctgcgtgagaatccaggacatcctgaccagagagaacaagaactggcccaagagaagaatcgccatcgaggaccccttcagcgtgaagagaaacgtggccagaagcctgaacagccagctggtgtacgagtacgtggtggagagattcagagccgcctacagatacttcgcctgcccccagaccaagggcggcaacaagagcaccgtggacttcaagaagagagagaagggcaagatcagcaacaagaagcccgtgaagagcaacaacatggccaccaacggctgcatcctgctgggcgagaccaccgagaagatcaacgccgagagagagcagcccgtgcagtgcgacgagatggactgcaccagccagagatgcatcatcgacaacaacaacctgctggtgaacgagctggacttcgccgaccacggccaggacagcagcagcctgagcaccagcaagagcagcgagatcgagcccaagctggacaagaagcaggacgacctggcccccagcgagacctgcctgaagaaggagctgagccagtgcaactgcatcgacctgagcaagagccccgaccccgacaagagcaccggcaccgactgcagaagcaacctggagaccgagagcagccaccagagcgtgtgcaccgacaccagcgccaccagctgcaactgcaaggccaccgaggacgccagcgacctgaacgacgacgacaacctgcccacccaggagctgtactacgtgttcgacaagttcatcctgaccagcggcaagccccccaccatcgtgtgcagcatctgcaagaaggacggccacagcaagaacgactgccccgaggacttcagaaagatcgacctgaagcccctgccccccatgaccaacagattcagagagatcctggacctggtgtgcaagagatgcttcgacgagctgagccccccctgcagcgagcagcacaacagagagcagatcctgatcggcctggagaagttcatccagaaggagtacgacgagaaggccagactgtgcctgttcggcagcagcaagaacggcttcggcttcagagacagcgacctggacatctgcatgaccctggagggccacgagaacgccgagaagctgaactgcaaggagatcatcgagaacctggccaagatcctgaagagacaccccggcctgagaaacatcctgcccatcaccaccgccaaggtgcccatcgtgaagttcgagcacagaagaagcggcctggagggcgacatcagcctgtacaacaccctggcccagcacaacaccagaatgctggccacctacgccgccatcgaccccagagtgcagtacctgggctacaccatgaaggtgttcgccaagagatgcgacatcggcgacgccagcagaggcagcctgagcagctacgcctacatcctgatggtgctgtacttcctgcagcagagaaagccccccgtgatccccgtgctgcaggagatcttcgacggcaagcagatcccccagagaatggtggacggctggaacgccttcttcttcgacaagaccgaggagctgaagaagagactgcccagcctgggcaagaacaccgagagcctgggcgagctgtggctgggcctgctgagattctacaccgaggagttcgacttcaaggagtacgtgatcagcatcagacagaagaagctgctgaccaccttcgagaagcagtggaccagcaagtgcatcgccatcgaggaccccttcgacctgaaccacaacctgggcgccggcgtgagcagaaagatgaccaacttcatcatgaaggccttcatcaacggcagaaagctgttcggcacccccttctaccccctgatcggcagagaggccgagtacttcttcgacagcagagtgctgaccgacggcgagctggcccccaacgacagatgctgcagagtgtgcggcaagatcggccactacatgaaggactgccccaagagaaagagcctgctgttcagactgaagaagaaggacagcgaggaggagaaggagggcaacgaggaggagaaggacagcagagacgtgctggaccccagagacctgcacgacaccagagacttcagagaccccagagacctgagatgcttcatctgcggcgacgccggccacgtgagaagagagtgccccgaggtgaagctggccagacagagaaacagcagcgtggccgccgcccagctggtgagaaacctggtgaacgcccagcaggtggccggcagcgcccagcagcagggcgaccagagcatcagaaccagacagagcagcgagtgcagcgagagccccagctacagcccccagccccagcccttcccccagaacagcagccagagcgccgccatcacccagcccagcagccagcccggcagccagcccaagctgggccccccccagcagggcgcccagcccccccaccaggtgcagatgcccctgtacaacttcccccagagcccccccgcccagtacagccccatgcacaacatgggcctgctgcccatgcaccccctgcagatccccgcccccagctggcccatccacggccccgtgatccacagcgcccccggcagcgcccccagcaacatcggcctgaacgaccccagcatcatcttcgcccagcccgccgccagacccgtggccatccccaacaccagccacgacggccactggcccagaaccgtggcccccaacagcctggtgaacagcggcgccgtgggcaacagcgagcccggcttcagaggcctgaccccccccatcccctgggagcacgcccccagaccccacttccccctggtgcccgccagctggccctacggcctgcaccagaacttcatgcaccagggcaacgccagattccagcccaacaagcccttctacacccaggacagatgcgccaccagaagatgcagagagagatgcccccacccccccagaggcaacgtgagcgagtag

SEQ ID NO: 106310 - DNA, 264 bp, synthetic construct
  misc_feature 1..264: note = Description of Artificial Sequence: Synthetic coding sequence
  source 1..264: mol_type = other DNA
atggaggagagcaagaccctgaagagcgagaaccacgagcccaagaagaacgtgatctgcgaggagagcaaggccgtgcaggtgatcggcaaccagaccctgaaggccagaaacgacaagagcgtgaaggagatcgagaacagcagccccaacagaaacagcagcaagaagaacaagcagaacgacatctgcatcgagaagaccgaggtgaagagctgcaaggtgaacgccgccaacctgcccggccccaaggacctgggctag

SEQ ID NO: 106311 - DNA, 234 bp, synthetic construct
  misc_feature 1..234: note = Description of Artificial Sequence: Synthetic coding sequence
  source 1..234: mol_type = other DNA
atggaggagagcaagaccctgaagagcgagaaccacgagcccaagaagaacgtgatctgcgaggagagcaaggccgtgcaggtgatcggcaaccagaccctgaaggccagaaacgacaagagcgtgaaggagatcgagaacagcagccccaacagaaacagcagcaagaagaacaagcagaacgacatctgcatcgagaagaccgaggtgaagagctgcaaggtgaacgcctag

SEQ ID NO: 106312 - DNA, 1209 bp, synthetic construct
  misc_feature 1..1209: note = Description of Artificial Sequence: Synthetic coding sequence
  source 1..1209: mol_type = other DNA
atggccagcatcatcgccagagtgggcaacagcagaagactgaacgcccccctgcccccctgggcccacagcatgctgagaagcctgggcagaagcctgggccccatcatggccagcatggccgacagaaacatgaagctgttcagcggcagagtggtgcccgcccagggcgaggagaccttcgagaactggctgacccaggtgaacggcgtgctgcccgactggaacatgagcgaggaggagaagctgaagagactgatgaagaccctgagaggccccgccagagaggtgatgagagtgctgcaggccaccaaccccaacctgagcgtggccgacttcctgagagccatgaagctggtgttcggcgagagcgagagcagcgtgaccgcccacggcaagttcttcaacaccctgcaggcccagggcgagaaggccagcctgtacgtgatcagactggaggtgcagctgcagaacgccatccaggccggcatcatcgccgagaaggacgccaacagaaccagactgcagcagctgctgctgggcggcgagctgagcagagacctgagactgagactgaaggacttcctgagaatgtacgccaacgagcaggagagactgcccaacttcctggagctgatcagaatggtgagagaggaggaggactgggacgacgccttcatcaagagaaagagacccaagagaagcgagagcatggtggagagagccgtgagccccgtggccttccagggcagcccccccatcgtgatcggcagcgccgactgcaacgtgatcgagatcgacgacaccctggacgacagcgacgaggacgtgatcctggtggagagccaggacccccccctgcccagctggggcgccccccccctgagagacagagccagaccccaggacgaggtgctggtgatcgacagcccccacaacagcagagcccagttccccagcaccagcggcggcagcggctacaagaacaacggccccggcgagatgagaagagccagaaagagaaagcacaccatcagatgcagctactgcggcgaggagggccacagcaaggagacctgcgacaacgagagcgacaaggcccaggtgttcgagaacctgatcatcaccctgcaggagctgacccacaccgagatggagagaagcagagtggcccccggcgagtacaacgacttcagcgagcccctgtag

SEQ ID NO: 106313 - DNA, 1542 bp, synthetic construct
  misc_feature 1..1542: note = Description of Artificial Sequence: Synthetic coding sequence
  source 1..1542: mol_type = other DNA
atggccgccagcagaaacggcttcgaggccgtggaggccgagggcagcgccggctgcagaggcagcagcggcatggaggtggtgctgcccctggaccccgccgtgcccgcccccctgtgcccccacggccccaccctgctgttcgtgaaggtgacccagggcaaggaggagaccagaagattctacgcctgcagcgcctgcagagacagaaaggactgcaacttcttccagtgggaggacgagaagctgagcggcgccagactggccgccagagaggcccacaacagaagatgccagccccccctgagcagaacccagtgcgtggagagatacctgaagttcatcgagctgcccctgacccagagaaagttctgccagacctgccagcagctgctgctgcccgacgactggggccagcacagcgagcaccaggtgctgggcaacgtgagcatcacccagctgagaagacccagccagctgctgtaccccctggagaacaagaagaccaacgcccagtacctgttcgccgacagaagctgccagttcctggtggacctgctgagcgccctgggcttcagaagagtgctgtgcgtgggcacccccagactgcacgagctgatcaagctgaccgccagcggcgacaagaagagcaacatcaagagcctgctgctggacatcgacttcagatacagccagttctacatggaggacagcttctgccactacaacatgttcaaccaccacttcttcgacggcaagaccgccctggaggtgtgcagagccttcctgcaggaggacaagggcgagggcatcatcatggtgaccgacccccccttcggcggcctggtggagcccctggccatcaccttcaagaagctgatcgccatgtggaaggagggccagagccaggacgacagccacaaggagctgcccatcttctggatcttcccctacttcttcgagagcagaatctgccagttcttccccagcttccagatgctggactaccaggtggactacgacaaccacgccctgtacaagcacggcaagaccggcagaaagcagagccccgtgagaatcttcaccaacatcccccccaacaagatcatcctgcccaccgaggagggctacagattctgcagcccctgccagagatacgtgagcctggagaaccagcactgcgagctgtgcaacagctgcaccagcaaggacggcagaaagtggaaccactgcttcctgtgcaagaagtgcgtgaagcccagctggatccactgcagcatctgcaaccactgcgccgtgcccgaccacagctgcgagggccccaagcacggctgcttcatctgcggcgagctggaccacaagagaagcacctgccccaacatcgccaccagcaagagagccaacaaggccgtgagaaagcagaagcagagaaagagcaacaagatgaagatggagaccaccaagggccagagcatgaaccacaccagcgccaccagaagaaagaagagaagagagagagcccaccagtacctgggcagctag

SEQ ID NO: 106314 - DNA, 384 bp, synthetic construct
  misc_feature 1..384: note = Description of Artificial Sequence: Synthetic coding sequence
  source 1..384: mol_type = other DNA
atggaggtggtgctgcccctggaccccgccgtgcccgcccccctgtgcccccacggccccaccctgctgttcgtgaaggtgacccagggcaaggaggagaccagaagattctacgcctgcagcgcctgcagagacagaaaggactgcaacttcttccagtgggaggacgagaagctgagcggcgccagactggccgccagagaggcccacaacagaagatgccagccccccctgagcagaacccagtgcggcagatacctgaagttcatcgagctgcccctgacccagagaaagttctgccagacctgccagcagctgctgctgcccgacgactggggccagcacagcgagcaccagttctgggtgtgcgtgatcaccagctag

SEQ ID NO: 106315 - DNA, 1479 bp, synthetic construct
  misc_feature 1..1479: note = Description of Artificial Sequence: Synthetic coding sequence
  source 1..1479: mol_type = other DNA
atggtgatcctgctgctgcagcacggcgccgaccccaccctgatcgacggcgagggcttcagcagcatccacctggccgtgctgttccagcacatgcccatcatcgcctacctgatcagcaagggccagagcgtgaacatgaccgacgtgaacggccagacccccctgatgctgagcgcccacaaggtgatcggccccgagcccaccggcttcctgctgaagttcaaccccagcctgaacgtggtggacaagatccaccagaacacccccctgcactgggccgtggccgccggcaacgtgaacgccgtggacaagctgctggaggccggcagcagcctggacatccagaacgtgaagggcgagacccccctggacatggccctgcagaacaagaaccagctgatcatccacatgctgaagaccgaggccaagatgagagccaaccagaagttcagactgtggagatggctgcagaagtgcgagctgttcctgctgctgatgctgagcgtgatcaccatgtgggccatcggctacatcctggacttcaacagcgacagctggctgctgaagggctgcctgctggtgaccctgttcttcctgaccagcctgttccccagattcctggtgggctacaagaacctggtgtacctgcccaccgccttcctgctgagcagcgtgttctggatcttcatgacctggttcatcctgttcttccccgacctggccggcgcccccttctacttcagcttcatcttcagcatcgtggccttcctgtacttcttctacaagacctgggccaccgaccccggcttcaccaaggccagcgaggaggagaagaaggtgaacatcatcaccctggccgagaccggcagcctggacttcagaaccttctgcaccagctgcctgatcagaaagcccctgagaagcctgcactgccacgtgtgcaactgctgcgtggccagatacgaccagcactgcctgtggaccggcagatgcatcggcttcggcaaccaccactactacatcttcttcctgttcttcctgagcatggtgtgcggctggatcatctacggcagcttcatctacctgagcagccactgcgccaccaccttcaaggaggacggcctgtggacctacctgaaccagatcgtggcctgcagcccctgggtgctgtacatcctgatgctggccaccttccacttcagctggagcaccttcctgctgctgaaccagctgttccagatcgccttcctgggcctgaccagccacgagagaatcagcctgcagaagcagagcaagcacatgaagcagaccctgagcctgagaaagaccccctacaacctgggcttcatgcagaacctggccgacttcttccagtgcggctgcttcggcctggtgaagccctgcgtggtggactggaccagccagtacaccatggtgttccaccccgccagagagaaggtgctgagaagcgtgtag

SEQ ID NO: 106316 - DNA, 1869 bp, synthetic construct
  misc_feature 1..1869: note = Description of Artificial Sequence: Synthetic coding sequence
  source 1..1869: mol_type = other DNA
atggagggccccggcctgggcagccagtgcagaaaccacagccacggcccccacccccccggcttcggcagatacggcatctgcgcccacgagaacaaggagctggccaacgccagagaggccctgcccctgatcgaggacagcagcaactgcgacatcgtgaaggccacccagtacggcatcttcgagagatgcaaggagctggtggaggccggctacgacgtgagacagcccgacaaggagaacgtgagcctgctgcactgggccgccatcaacaacagactggacctggtgaagttctacatcagcaagggcgccgtggtggaccagctgggcggcgacctgaacagcacccccctgcactgggccatcagacagggccacctgcccatggtgatcctgctgctgcagcacggcgccgaccccaccctgatcgacggcgagggcttcagcagcatccacctggccgtgctgttccagcacatgcccatcatcgcctacctgatcagcaagggccagagcgtgaacatgaccgacgtgaacggccagacccccctgatgctgagcgcccacaaggtgatcggccccgagcccaccggcttcctgctgaagttcaaccccagcctgaacgtggtggacaagatccaccagaacacccccctgcactgggccgtggccgccggcaacgtgaacgccgtggacaagctgctggaggccggcagcagcctggacatccagaacgtgaagggcgagacccccctggacatggccctgcagaacaagaaccagctgatcatccacatgctgaagaccgaggccaagatgagagccaaccagaagttcagactgtggagatggctgcagaagtgcgagctgttcctgctgctgatgctgagcgtgatcaccatgtgggccatcggctacatcctggacttcaacagcgacagctggctgctgaagggctgcctgctggtgaccctgttcttcctgaccagcctgttccccagattcctggtgggctacaagaacctggtgtacctgcccaccgccttcctgctgagcagcgtgttctggatcttcatgacctggttcatcctgttcttccccgacctggccggcgcccccttctacttcagcttcatcttcagcatcgtggccttcctgtacttcttctacaagacctgggccaccgaccccggcttcaccaaggccagcgaggaggagaagaaggtgaacatcatcaccctggccgagaccggcagcctggacttcagaaccttctgcaccagctgcctgatcagaaagcccctgagaagcctgcactgccacgtgtgcaactgctgcgtggccagatacgaccagcactgcctgtggaccggcagatgcatcggcttcggcaaccaccactactacatcttcttcctgttcttcctgagcatggtgtgcggctggatcatctacggcagcttcatctacctgagcagccactgcgccaccaccttcaaggaggacggcctgtggacctacctgaaccagatcgtggcctgcagcccctgggtgctgtacatcctgatgctggccaccttccacttcagctggagcaccttcctgctgctgaaccagctgttccagatcgccttcctgggcctgaccagccacgagagaatcagcctgcagaagcagagcaagcacatgaagcagaccctgagcctgagaaagaccccctacaacctgggcttcatgcagaacctggccgacttcttccagtgcggctgcttcggcctggtgaagccctgcgtggtggactggaccagccagtacaccatggtgttccaccccgccagagagaaggtgctgagaagcgtgtag

SEQ ID NO: 106317 - DNA, 564 bp, synthetic construct
  misc_feature 1..564: note = Description of Artificial Sequence: Synthetic coding sequence
  source 1..564: mol_type = other DNA
atgagaagaggctggaagatggccctgagcggcggcctgagatgctgcagaagagtgctgagctgggtgcccgtgctggtgatcgtgctggtggtgctgtggagctactacgcctacgtgttcgagctgtgcctggtgaccgtgctgagccccgccgagaaggtgatctacctgatcctgtaccacgccatcttcgtgttcttcacctggacctactggaagagcatcttcaccctgccccagcagcccaaccagaagttccacctgagctacaccgacaaggagagatacgagaacgaggagagacccgaggtgcagaagcagatgctggtggacatggccaagaagctgcccgtgtacaccagaaccggcagcggcgccgtgagattctgcgacagatgccacctgatcaagcccgacagatgccaccactgcagcgtgtgcgccatgtgcgtgctgaagatggaccaccactgcccctggggcaactaccccgtgttcgccctgagcagcatgagcttcttcttcagcctgtggcccgcctgcttcctgagcgccctgtag

SEQ ID NO: 106318 - DNA, 1014 bp, synthetic construct
  misc_feature 1..1014: note = Description of Artificial Sequence: Synthetic coding sequence
  source 1..1014: mol_type = other DNA
atgagaagaggctggaagatggccctgagcggcggcctgagatgctgcagaagagtgctgagctgggtgcccgtgctggtgatcgtgctggtggtgctgtggagctactacgcctacgtgttcgagctgtgcctggtgaccgtgctgagccccgccgagaaggtgatctacctgatcctgtaccacgccatcttcgtgttcttcacctggacctactggaagagcatcttcaccctgccccagcagcccaaccagaagttccacctgagctacaccgacaaggagagatacgagaacgaggagagacccgaggtgcagaagcagatgctggtggacatggccaagaagctgcccgtgtacaccagaaccggcagcggcgccgtgagattctgcgacagatgccacctgatcaagcccgacagatgccaccactgcagcgtgtgcgccatgtgcgtgctgaagatggaccaccactgcccctgggtgaacaactgcatcggcttcagcaactacaagttcttcctgcagttcctggcctacagcgtgctgtactgcctgtacatcgccaccaccgtgttcagctacttcatcaagtactggagaggcgagctgcccagcgtgagaagcaagttccacgtgctgttcctgctgttcgtggcctgcatgttcttcgtgagcctggtgatcctgttcggctaccactgctggctggtgagcagaaacaagaccaccctggaggccttctgcacccccgtgttcaccagcggccccgagaagaacggcttcaacctgggcttcatcaagaacatccagcaggtgttcggcgacaagaagaagttctggctgatccccatcggcagcagccccggcgacggccacagcttccccatgagaagcatgaacgagagccagaaccccctgctggccaacgaggagacctgggaggacaacgaggacgacaaccaggactaccccgagggcagcagcagcctggccgtggagaccgagacctag

SEQ ID NO: 106319 - DNA, 987 bp, synthetic construct
  misc_feature 1..987: note = Description of Artificial Sequence: Synthetic coding sequence
  source 1..987: mol_type = other DNA
atgagaagaggctggaagatggccctgagcggcggcctgagatgctgcagaagagtgctgagctgggtgcccgtgctggtgatcgtgctggtggtgctgtggagctactacgcctacgtgttcgagctgtgcctggtgatctacctgatcctgtaccacgccatcttcgtgttcttcacctggacctactggaagagcatcttcaccctgccccagcagcccaaccagaagttccacctgagctacaccgacaaggagagatacgagaacgaggagagacccgaggtgcagaagcagatgctggtggacatggccaagaagctgcccgtgtacaccagaaccggcagcggcgccgtgagattctgcgacagatgccacctgatcaagcccgacagatgccaccactgcagcgtgtgcgccatgtgcgtgctgaagatggaccaccactgcccctgggtgaacaactgcatcggcttcagcaactacaagttcttcctgcagttcctggcctacagcgtgctgtactgcctgtacatcgccaccaccgtgttcagctacttcatcaagtactggagaggcgagctgcccagcgtgagaagcaagttccacgtgctgttcctgctgttcgtggcctgcatgttcttcgtgagcctggtgatcctgttcggctaccactgctggctggtgagcagaaacaagaccaccctggaggccttctgcacccccgtgttcaccagcggccccgagaagaacggcttcaacctgggcttcatcaagaacatccagcaggtgttcggcgacaagaagaagttctggctgatccccatcggcagcagccccggcgacggccacagcttccccatgagaagcatgaacgagagccagaaccccctgctggccaacgaggagacctgggaggacaacgaggacgacaaccaggactaccccgagggcagcagcagcctggccgtggagaccgagacctag

SEQ ID NO: 106320 - DNA, 2022 bp, synthetic construct
  misc_feature 1..2022: note = Description of Artificial Sequence: Synthetic coding sequence
  source 1..2022: mol_type = other DNA
atgcccagaagccccggcaccagactgaagcccgccaagtacatccccgtggccaccgccgccgccctgctggtgggcagcagcaccctgttcttcgtgttcacctgcccctggctgaccagagccgtgagccccgccgtgcccgtgtacaacggcatcatcttcctgttcgtgctggccaacttcagcatggccaccttcatggaccccggcgtgttccccagagccgacgaggacgaggacaaggaggacgacttcagagcccccctgtacaagaacgtggacgtgagaggcatccaggtgagaatgaagtggtgcgccacctgccacttctacagaccccccagatgcagccactgcagcgtgtgcgacaactgcgtggaggtgaccggcaagttcagaggcggcgtgaaccccttcaccagaggctgctgcggcaacgtggagcacgtgctgtgcagccccctggcccccagatacgtggtggagccccccagactgcccctggccgtgagcctgaagccccccttcctgagacccgagctgctggacagagccgcccccctgaaggtgaagctgagcgacaacggcctgaaggccggcctgggcagaagcaagagcaagggcagcctggacagactggacgagaagcccctggacctgggcccccccctgccccccaagatcgaggccggcaccttcagcagcgacctgcagacccccagacccggcagcgccgagagcgccctgagcgtgcagagaaccagcccccccacccccgccatgtacaagttcagacccgccttccccaccggccccaaggtgcccttctgcggccccggcgagcaggtgcccggccccgacagcctgaccctgggcgacgacagcatcagaagcctggacttcgtgagcgagcccagcctggacctgcccgactacggccccggcggcctgcacgccgcctacccccccagcccccccctgagcgccagcgacgccttcagcggcgccctgagaagcctgagcctgaaggccagcagcagaagaggcggcgaccacgtggccctgcagcccctgagaagcgagggcggcccccccaccccccacagaagcatcttcgccccccacgccctgcccaacagaaacggcagcctgagctacgacagcctgctgaaccccggcagccccggcggccacgcctgccccgcccaccccgccgtgggcgtggccggctaccacagcccctacctgcaccccggcgccaccggcgacccccccagacccctgcccagaagcttcagccccgtgctgggccccagacccagagagcccagccccgtgagatacgacaacctgagcagaaccatcatggccagcatccaggagagaaaggacagagaggagagagagagactgctgagaagccaggccgacagcctgttcggcgacagcggcgtgtacgacgcccccagcagctacagcctgcagcaggccagcgtgctgagcgagggccccagaggccccgccctgagatacggcagcagagacgacctggtggccggccccggcttcggcggcgccagaaaccccgccctgcagaccagcctgagcagcctgagcagcagcgtgagcagagcccccagaaccagcagcagcagcctgcaggccgaccaggccagcagcaacgcccccggccccagacccagcagcggcagccacagaagccccgccagacagggcctgcccagcccccccggcaccccccacagccccagctacgccggccccaaggccgtggccttcatccacaccgacctgcccgagcccccccccagcctgaccgtgcagagagaccacccccagctgaagaccccccccagcaagctgaacggccagagccccggcctggccagactgggccccgccaccggcccccccggccccagcgccagccccaccagacacaccctggtgaagaaggtgagcggcgtgggcggcaccacctacgagatcagcgtgtag

SEQ ID NO: 106321 - DNA, 2298 bp, synthetic construct
  misc_feature 1..2298: note = Description of Artificial Sequence: Synthetic coding sequence
  source 1..2298: mol_type = other DNA
atgcccagaagccccggcaccagactgaagcccgccaagtacatccccgtggccaccgccgccgccctgctggtgggcagcagcaccctgttcttcgtgttcacctgcccctggctgaccagagccgtgagccccgccgtgcccgtgtacaacggcatcatcttcctgttcgtgctggccaacttcagcatggccaccttcatggaccccggcgtgttccccagagccgacgaggacgaggacaaggaggacgacttcagagcccccctgtacaagaacgtggacgtgagaggcatccaggtgagaatgaagtggtgcgccacctgccacttctacagaccccccagatgcagccactgcagcgtgtgcgacaactgcgtggaggacttcgaccaccactgcccctgggtgaacaactgcatcggcagaagaaactacagatacttcttcctgttcctgctgagcctgagcgcccacatggtgggcgtggtggccttcggcctggtgtacgtgctgaaccacgccgagggcctgggcgccgcccacaccaccatcaccatggccgtgatgtgcgtggccggcctgttcttcatccccgtgatcggcctgaccggcttccacgtggtgctggtgaccagaggcagaaccaccaacgagcaggtgaccggcaagttcagaggcggcgtgaaccccttcaccagaggctgctgcggcaacgtggagcacgtgctgtgcagccccctggcccccagatacgtggtggagccccccagactgcccctggccgtgagcctgaagccccccttcctgagacccgagctgctggacagagccgcccccctgaaggtgaagctgagcgacaacggcctgaaggccggcctgggcagaagcaagagcaagggcagcctggacagactggacgagaagcccctggacctgggcccccccctgccccccaagatcgaggccggcaccttcagcagcgacctgcagacccccagacccggcagcgccgagagcgccctgagcgtgcagagaaccagcccccccacccccgccatgtacaagttcagacccgccttccccaccggccccaaggtgcccttctgcggccccggcgagcaggtgcccggccccgacagcctgaccctgggcgacgacagcatcagaagcctggacttcgtgagcgagcccagcctggacctgcccgactacggccccggcggcctgcacgccgcctacccccccagcccccccctgagcgccagcgacgccttcagcggcgccctgagaagcctgagcctgaaggccagcagcagaagaggcggcgaccacgtggccctgcagcccctgagaagcgagggcggcccccccaccccccacagaagcatcttcgccccccacgccctgcccaacagaaacggcagcctgagctacgacagcctgctgaaccccggcagccccggcggccacgcctgccccgcccaccccgccgtgggcgtggccggctaccacagcccctacctgcaccccggcgccaccggcgacccccccagacccctgcccagaagcttcagccccgtgctgggccccagacccagagagcccagccccgtgagatacgacaacctgagcagaaccatcatggccagcatccaggagagaaaggacagagaggagagagagagactgctgagaagccaggccgacagcctgttcggcgacagcggcgtgtacgacgcccccagcagctacagcctgcagcaggccagcgtgctgagcgagggccccagaggccccgccctgagatacggcagcagagacgacctggtggccggccccggcttcggcggcgccagaaaccccgccctgcagaccagcctgagcagcctgagcagcagcgtgagcagagcccccagaaccagcagcagcagcctgcaggccgaccaggccagcagcaacgcccccggccccagacccagcagcggcagccacagaagccccgccagacagggcctgcccagcccccccggcaccccccacagccccagctacgccggccccaaggccgtggccttcatccacaccgacctgcccgagcccccccccagcctgaccgtgcagagagaccacccccagctgaagaccccccccagcaagctgaacggccagagccccggcctggccagactgggccccgccaccggcccccccggccccagcgccagccccaccagacacaccctggtgaagaaggtgagcggcgtgggcggcaccacctacgagatcagcgtgtag

SEQ ID NO: 106322 - DNA, 2337 bp, synthetic construct
  misc_feature 1..2337: note = Description of Artificial Sequence: Synthetic coding sequence
  source 1..2337: mol_type = other DNA
atgcccagaagccccggcaccagactgaagcccgccaagtacatccccgtggccaccgccgccgccctgctggtgggcagcagcaccctgttcttcgtgttcacctgcccctggctgaccagagccgtgagccccgccgtgcccgtgtacaacggcatcatcttcctgttcgtgctggccaacttcagcatggccaccttcatggaccccggcgtgttccccagagccgacgaggacgaggacaaggaggacgacttcagagcccccctgtacaagaacgtggacgtgagaggcatccaggtgagaatgaagtggtgcgccacctgccacttctacagaccccccagatgcagccactgcagcgtgtgcgacaactgcgtggaggacttcgaccaccactgcccctgggtgaacaactgcatcggcagaagaaactacagatacttcttcctgttcctgctgagcctgagcgcccacatggtgggcgtggtggccttcggcctggtgtacgtgctgaaccacgccgagggcctgggcgccgcccacaccaccatcaccatggccgtgatgtgcgtggccggcctgttcttcatccccgtgatcggcctgaccggcttccacgtggtgctggtgaccagaggcagaaccaccaacgagcaggtgaccggcaagttcagaggcggcgtgaaccccttcaccagaggctgctgcggcaacgtggagcacgtgctgtgcagccccctggcccccagatacgtggtggagccccccagactgcccctggccgtgagcctgaagccccccttcctgagacccgagctgctggacagagccgcccccctgaaggtgaagctgagcgacaacggcctgaaggccggcctgggcagaagcaagagcaagggcagcctggacagactggacgagaagcccctggacctgggcccccccctgccccccaagatcgaggccggcaccttcagcagcgacctgcagacccccagacccggcagcgccgagagcgccctgagcgtgcagagaaccagcccccccacccccgccatgtacaagttcagacccgccttccccaccggccccaaggtgcccttctgcggccccggcgagcaggtgcccggccccgacagcctgaccctgggcgacgacagcatcagaagcctggacttcgtgagcgagcccagcctggacctgcccgactacggccccggcggcctgcacgccgcctacccccccagcccccccctgagcgccagcgacgccttcagcggcgccctgagaagcctgagcctgaaggccagcagcagaagaggcggcgaccacgtggccctgcagcccctgagaagcgagggcggcccccccaccccccacagaagcatcttcgccccccacgccctgcccaacagaaacggcagcctgagctacgacagcctgctgaaccccggcagccccggcggccacgcctgccccgcccaccccgccgtgggcgtggccggctaccacagcccctacctgcaccccggcgccaccggcgacccccccagacccctgcccagaagcttcagccccgtgctgggccccagacccagagagcccagccccgtgagatacgacaacctgagcagaaccatcatggccagcatccaggagagaaaggacagagaggagagagagagactgctgagaagccaggccgacagcctgttcggcgacagcggcgtgtacgacgcccccagcagctacagcctgcagcaggccagcgtgctgagcgagggccccagaggccccgccctgagatacggcagcagagacgacctggtggccggccccggcttcggcggcgccagaaaccccgccctgcagaccagcctgagcagcctgagcagcagcgtgagcagagcccccagaaccagcagcagcagcctgcaggccgaccaggccagcagcaacgcccccggccccagacccagcagcggcagccacagaagccccgccagacagggcctgcccagcccccccggcaccccccacagccccagctacgccggccccaaggccgtggccttcatccacaccgacctgcccgagcccccccccagcctgaccgtgcagagaggcagaatcggcacctgcaccagaggctggggcagaagaggccagccctgggtgccccccggcctgcacctgtgccacctgggcagacccgaggacagaccccccctgagagccccctggagccaggccgccggcgccccccccagaggcgccatgtgcagactgcacctggccgccagcagcctgttccccagcctgagcggcccctag

SEQ ID NO: 106323 - DNA, 1095 bp, synthetic construct
  misc_feature 1..1095: note = Description of Artificial Sequence: Synthetic coding sequence
  source 1..1095: mol_type = other DNA
atgagcgtgatggtggtgagaaagaaggtgaccagaaagtgggagaagctgcccggcagaaacaccttctgctgcgacggcagagtgatgatggccagacagaagggcatcttctacctgaccctgttcctgatcctgggcacctgcaccctgttcttcgccttcgagtgcagatacctggccgtgcagctgagccccgccatccccgtgttcgccgccatgctgttcctgttcagcatggccaccctgctgagaaccagcttcagcgaccccggcgtgatccccagagccctgcccgacgaggccgccttcatcgagatggagatcgaggccaccaacggcgccgtgccccagggccagagacccccccccagaatcaagaacttccagatcaacaaccagatcgtgaagctgaagtactgctacacctgcaagatcttcagaccccccagagccagccactgcagcatctgcgacaactgcgtggagagattcgaccaccactgcccctgggtgggcaactgcgtgggcaagagaaactacagatacttctacctgttcatcctgagcctgagcctgctgaccatctacgtgttcgccttcaacatcgtgtacgtggccctgaagagcctgaagatcggcttcctggagaccctgaaggagacccccggcaccgtgctggaggtgctgatctgcttcttcaccctgtggagcgtggtgggcctgaccggcttccacaccttcctggtggccctgaaccagaccaccaacgaggacatcaagggcagctggaccggcaagaacagagtgcagaacccctacagccacggcaacatcgtgaagaactgctgcgaggtgctgtgcggccccctgccccccagcgtgctggacagaagaggcatcctgcccctggaggagagcggcagcagaccccccagcacccaggagaccagcagcagcctgctgccccagagccccgcccccaccgagcacctgaacagcaacgagatgcccgaggacagcagcacccccgaggagatgcccccccccgagccccccgagcccccccaggaggccgccgaggccgagaagtag

SEQ ID NO: 106324 - DNA, 1095 bp, synthetic construct; identical to SEQ ID NO: 106323
  misc_feature 1..1095: note = Description of Artificial Sequence: Synthetic coding sequence
  source 1..1095: mol_type = other DNA

SEQ ID NO: 106325 - DNA, 513 bp, synthetic construct
  misc_feature 1..513: note = Description of Artificial Sequence: Synthetic coding sequence
  source 1..513: mol_type = other DNA
atgagcgtgatggtggtgagaaagaaggtgaccagaaagtgggagaagctgcccggcagaaacaccttctgctgcgacggcagagtgatgatggccagacagaagggcatcttctacctgaccctgttcctgatcctgggcacctgcaccctgttcttcgccttcgagtgcagatacctggccgtgcagctgagccccgccatccccgtgttcgccgccatgctgttcctgttcagcatggccaccctgctgagaaccagcttcagcgaccccggcgtgatccccagagccctgcccgacgaggccgccttcatcgagatggagatcgaggccaccaacggcgccgtgccccagggccagagacccccccccagaatcaagaacttccagatcaacaaccagatcgtgaagctgaagtactgctacacctgcaagatcttcagaccccccagagccagccactgcagcatctgcgacaactgcgtggagagattcgaccaccactgcccctag

SEQ ID NO: 106326 - DNA, 585 bp, synthetic construct
  misc_feature 1..585: note = Description of Artificial Sequence: Synthetic coding sequence
  source 1..585: mol_type = other DNA
tgactgttcctgatcctgggcacctgcaccctgttcttcgccttcgagtgcagatacctggccgtgcagctgagccccgccatccccgtgttcgccgccatgctgttcctgttcagcatggccaccctgctgagaaccagcttcagcgaccccggcgtgatccccagagccctgcccgacgaggccgccttcatcgagatggagatcgaggccaccaacggcgccgtgccccagggccagagacccccccccagaatcaagaacttccagatcaacaaccagatcgtgaagctgaagtactgctacacctgcaagatcttcagaccccccagagccagccactgcagcatctgcgacaactgcgtggagagcctgaagatcggcttcctggagaccctgaaggagacccccggcaccgtgctggaggtgctgatctgcttcttcaccctgtggagcgtggtgggcctgaccggcttccacaccttcctggtggccctgaaccagaccaccaacgaggacatcaagggcagctggaccggcaagaacagagtgcagaacccctacagccacggcaacatcgtgtag

SEQ ID NO: 106327 - DNA, 897 bp, synthetic construct
  misc_feature 1..897: note = Description of Artificial Sequence: Synthetic coding sequence
  source 1..897: mol_type = other DNA
atggagagaggcatcagcgacgtgaccgacagaaagctgaccatggaggaggaggaggccaagagaatcgccgagatgggcaagcccgtgctgggcgagcaccccaagctggaggtgatcatcgaggagagctacgagttcaagaccaccgtggacaagctgatcaagaagaccaacctggccctggtggtgggcacccacagctggagagaccagttcatggaggccatcaccgtgagcgccgccggcgacgaggacgaggacgagagcggcgaggagagactgcccagctgcttcgactacgtgatgcacttcctgaccgtgttctggaaggtgctgttcgcctgcgtgccccccaccgagtactgccacggctgggcctgcttcgccgtgagcatcctgatcatcggcatgctgaccgccatcatcggcgacctggccagccacttcggctgcaccatcggcctgaaggacagcgtgaccgccgtggtgttcgtggccttcggcaccagcgtgcccgacaccttcgccagcaaggccgccgccctgcaggacgtgtacgccgacgccagcatcggcaacgtgaccggcagcaacgccgtgaacgtgttcctgggcatcggcctggcctggagcgtggccgccatctactgggccctgcagggccaggagttccacgtgagcgccggcaccctggccttcagcgtgaccctgttcaccatcttcgccttcgtgtgcatcagcgtgctgctgtacagaagaagaccccacctgggcggcgagctgggcggccccagaggctgcaagctggccaccacctggctgttcgtgagcctgtggctgctgtacatcctgttcgccaccctggaggcctactgctacatcaagggcttctag

SEQ ID NO: 106328 - DNA, 705 bp, synthetic construct
  misc_feature 1..705: note = Description of Artificial Sequence: Synthetic coding sequence
  source 1..705: mol_type = other DNA
atgagcagcgaggtgagcgccagaagagacgccaagaagctggtgagaagccccagcggcctgagaatggtgcccgagcacagagccttcggcagccccttcggcctggaggagccccagtgggtgcccgacaaggagtgcagaagatgcatgcagtgcgacgccaagttcgacttcctgaccagaaagcaccactgcagaagatgcggcaagtgcttctgcgacagatgctgcagccagaaggtgcccctgagaagaatgtgcttcgtggaccccgtgagacagtgcgccgagtgcgccctggtgagcctgaaggaggccgagttctacgacaagcagctgaaggtgctgctgagcggcgccaccttcctggtgaccttcggcaacagcgagaagcccgagaccatgacctgcagactgagcaacaaccagagatacctgttcctggacggcgacagccactacgagatcgagatcgtgcacatcagcaccgtgcagatcctgaccgagggcttcccccccggcggcggcaacgccagagccaccggcatgttcctgcagtacaccgtgcccggcaccgagggcgtgacccagctgaagctgaccgtggtggaggacgtgaccgtgggcagaagacaggccgtggcctggctggtggccatgcacaaggccgccaagctgctgtacgagagcagagaccagtag

SEQ ID NO: 106329 - DNA, 7620 bp, synthetic construct
  misc_feature 1..7620: note = Description of Artificial Sequence: Synthetic coding sequence
  source 1..7620: mol_type = other DNA
atgaaccaccccttcggcaaggaggaggccgccagccagaagcagctgttcggcttcttctgcgagtgcctgagaagaggcgagtgggagctggcccaggcctgcgtgccccagctgcaggagggccagggcgacatccccaagagagtggaggacatcctgcaggccctggtggtgtgccccaacctgctgagatgcggccaggacatcaacccccagagagtggcctgggtgtggctgctggtgctggagaagtggctggccagagagaagaagctgctgcccgtggtgttcagaagaaagctggagttcctgctgctgagcgaggacctgcagggcgacatccccgagaacatcctggaggagctgtacgagaccctgacccagggcgccgtgggccacgtgcccgacggcaaccccagaagagagagctggacccccagactgagcagcgaggccgtgagcgtgctgtgggacctgctgagacagagcccccagcccgcccaggccctgctggagctgctgctggaggaggacgacggcaccggcctgtgccactggcccctgcagaacgccctggtggacctgatcagaaaggccctgagagccctgcagggccccgacagcgtgccccccggcgtggtggacgccatctacggcgccctgagaaccctgagatgccccgccgagcccctgggcgtggagctgcacctgctgtgcgaggagctgctggaggcctgcagaaccgagggcagccccctgagagaggagagactgctgagctgcctgctgcacaaggccagcagaggcctgctgagcctgtacggccacacctacgccgagaaggtgaccgagaagccccccagagccaccgccagcggcaaggtgagccccgaccacctggaccccgagagagccatgctggccctgttcagcaaccccaaccccgccgaggcctggaaggtggcctacttctactgcctgagcaacaacaagcacttcctggagcagatcctggtgaccgccctgaccctgctgaaggaggaggacttccccaacctgggctgcctgctggacagagagttcagacccctgagctgcctgctggtgctgctgggctggacccactgccagagcctggagagcgccaagagactgctgcagaccctgcacagaacccagggccccggctgcgacgagctgctgagagacgcctgcgacggcctgtgggcccacctggaggtgctggagtggtgcatccagcagagcagcaaccccatccccaagagagacctgctgtaccacctgcacggcggcgacagccacagcgtgctgtacaccctgcaccacctgaccaacctgcccgccctgagagaggaggacgtgctgaagctgctgcagaaggtgcccgccaaggacccccagcaggagcccgacgccgtggacgcccccgtgcccgagcacctgagccagtgccagaacctgaccctgtaccagggcttctgcgccatgaagtacgccatctacgccctgtgcgtgaacagccaccagcacagccagtgccaggactgcaaggacagcctgagcgaggacctggccagcgccaccgagcccgccaacgacagcctgagcagccccggcgccgccaacctgttcagcacctacctggccagatgccagcagtacctgtgcagcatccccgacagcctgtgcctggagctgctggagaacatcttcagcctgctgctgatcaccagcgccgacctgcaccccgagccccacctgcccgaggactacgccgaggacgacgacatcgagggcaagagccccagcggcctgagaagccccagcgagagcccccagcacatcgcccaccccgagagaaagagcgagagaggcagcctgggcgtgcccaagaccctggcctacaccatgcccagccacgtgaaggccgagcccaaggacagctaccccggcccccacagacacagcttcctggacctgaagcacttcaccagcggcatcagcggcttcctggccgacgagttcgccatcggcgccttcctgagactgctgcaggagcagctggacgagatcagcagcagaagcccccccgagaagcccaagcaggagagccagagctgcagcggcagcagagacggcctgcagagcagactgcacagactgagcaaggtggtgagcgaggcccagtggagacacaaggtggtgaccagcaaccacagaagcgaggagcagcccagcagaagataccagcccgccaccagacaccccagcctgagaagaggcagaagaaccagaagaagccaggccgacggcagagacagaggcagcaaccccagcctggagagcaccagcagcgagctgagcaccagcaccagcgagggcagcctgagcgccatgagcggcagaaacgagctgcacagcagactgcacccccacccccagagcagcctgatccccatgatgttcagcccccccgagagcctgctggccagctgcatcctgagaggcaacttcgccgaggcccaccaggtgctgttcaccttcaacctgaagagcagccccagcagcggcgagctgatgttcatggagagataccaggaggtgatccaggagctggcccaggtggagcacaagatcgagaaccagaacagcgacgccggcagcagcaccatcagaagaaccggcagcggcagaagcaccctgcaggccatcggcagcgccgccgccgccggcatggtgttctacagcatcagcgacgtgaccgacaagctgctgaacaccagcggcgaccccatccccatgctgcaggaggacttctggatcagcaccgccctggtggagcccaccgcccccctgagagaggtgctggaggacctgagcccccccgccatggccgccttcgacctggcctgcagccagtgccagctgtggaagacctgcaagcagctgctggagaccgccgagagaagactgaacagcagcctggagagaagaggcagaagaatcgaccacgtgctgctgaacgccgacggcatcagaggcttccccgtggtgctgcagcagatcagcaagagcctgaactacctgctgatgagcgccagccagaccaagagcgagagcgtggaggagaagggcggcggcccccccagatgcagcatcaccgagctgctgcagatgtgctggcccagcctgagcgaggactgcgtggccagccacaccaccctgagccagcagctggaccaggtgctgcagagcctgagagaggccctggagctgcccgagcccagaaccccccccctgagcagcctggtggagcaggccgcccagaaggcccccgaggccgaggcccaccccgtgcagatccagacccagctgctgcagaagaacctgggcaagcagacccccagcggcagcagacagatggactacctgggcaccttcttcagctactgcagcaccctggccgccgtgctgctgcagagcctgagcagcgagcccgaccacgtggaggtgaaggtgggcaaccccttcgtgctgctgcagcagagcagcagccagctggtgagccacctgctgttcgagagacaggtgccccccgagagactggccgccctgctggcccaggagaacctgagcctgagcgtgccccaggtgatcgtgagctgctgctgcgagcccctggccctgtgcagcagcagacagagccagcagaccagcagcctgctgaccagactgggcaccctggcccagctgcacgccagccactgcctggacgacctgcccctgagcacccccagcagccccagaaccaccgagaaccccaccctggagagaaagccctacagcagccccagagacagcagcctgcccgccctgaccagcagcgccctggccttcctgaagagcagaagcaagctgctggccaccgtggcctgcctgggcgccagccccagactgaaggtgagcaagcccagcctgagctggaaggagctgagaggcagaagagaggtgcccctggccgccgagcaggtggccagagagtgcgagagactgctggagcagttccccctgttcgaggccttcctgctggccgcctgggagcccctgagaggcagcctgcagcagggccagagcctggccgtgaacctgtgcggctgggccagcctgagcaccgtgctgctgggcctgcacagccccatcgccctggacgtgctgagcgaggccttcgaggagagcctggtggccagagactggagcagagccctgcagctgaccgaggtgtacggcagagacgtggacgacctgagcagcatcaaggacgccgtgctgagctgcgccgtggcctgcgacaaggagggctggcagtacctgttccccgtgaaggacgccagcctgagaagcagactggccctgcagttcgtggacagatggcccctggagagctgcctggagatcctggcctactgcatcagcgacaccgccgtgcaggagggcctgaagtgcgagctgcagagaaagctggccgagctgcaggtgtaccagaagatcctgggcctgcagagcccccccgtgtggtgcgactggcagaccctgagaagctgctgcgtggaggaccccagcaccgtgatgaacatgatcctggaggcccaggagtacgagctgtgcgaggagtggggctgcctgtaccccatccccagagagcacctgatcagcctgcaccagaagcacctgctgcacctgctggagagaagagaccacgacaaggccctgcagctgctgagaagaatccccgaccccaccatgtgcctggaggtgaccgagcagagcctggaccagcacaccagcctggccaccagccacttcctggccaactacctgaccacccacttctacggccagctgaccgccgtgagacacagagagatccaggccctgtacgtgggcagcaagatcctgctgaccctgcccgagcagcacagagccagctacagccacctgagcagcaaccccctgttcatgctggagcagctgctgatgaacatgaaggtggactgggccaccgtggccgtgcagaccctgcagcagctgctggtgggccaggagatcggcttcaccatggacgaggtggacagcctgctgagcagatacgccgagaaggccctggacttcccctacccccagagagagaagagaagcgacagcgtgatccacctgcaggagatcgtgcaccaggccgccgaccccgagaccctgcccagaagccccagcgccgagttcagccccgccgccccccccggcatcagcagcatccacagccccagcctgagagagagaagcttcccccccacccagcccagccaggagttcgtgccccccgccaccccccccgccagacaccagtgggtgcccgacgagaccgagagcatctgcatggtgtgctgcagagagcacttcaccatgttcaacagaagacaccactgcagaagatgcggcagactggtgtgcagcagctgcagcaccaagaagatggtggtggagggctgcagagagaaccccgccagagtgtgcgaccagtgctacagctactgcaacaaggacgtgcccgaggagcccagcgagaagcccgaggccctggacagcagcaagaacgagagccccccctacagcttcgtggtgagagtgcccaaggccgacgaggtggagtggatcctggacctgaaggaggaggagaacgagctggtgagaagcgagttctactacgagcaggcccccagcgccagcctgtgcatcgccatcctgaacctgcacagagacagcatcgcctgcggccaccagctgatcgagcactgctgcagactgagcaagggcctgaccaaccccgaggtggacgccggcctgctgaccgacatcatgaagcagctgctgttcagcgccaagatgatgttcgtgaaggccggccagagccaggacctggccctgtgcgacagctacatcagcaaggtggacgtgctgaacatcctggtggccgccgcctacagacacgtgcccagcctggaccagatcctgcagcccgccgccgtgaccagactgagaaaccagctgctggaggccgagtactaccagctgggcgtggaggtgagcaccaagaccggcctggacaccaccggcgcctggcacgcctggggcatggcctgcctgaaggccggcaacctgaccgccgccagagagaagttcagcagatgcctgaagccccccttcgacctgaaccagctgaaccacggcagcagactggtgcaggacgtggtggagtacctggagagcaccgtgagacccttcgtgagcctgcaggacgacgactacttcgccaccctgagagagctggaggccaccctgagaacccagagcctgagcctggccgtgatccccgagggcaagatcatgaacaacacctactaccaggagtgcctgttctacctgcacaactacagcaccaacctggccatcatcagcttctacgtgagacacagctgcctgagagaggccctgctgcacctgctgaacaaggagagcccccccgaggtgttcatcgagggcatcttccagcccagctacaagagcggcaagctgcacaccctggagaacctgctggagagcatcgaccccaccctggagagctggggcaagtacctgatcgccgcctgccagcacctgcagaagaagaactactaccacatcctgtacgagctgcagcagttcatgaaggaccaggtgagagccgccatgacctgcatcagattcttcagccacaaggccaagagctacaccgagctgggcgagaagctgagctggctgctgaaggccaaggaccacctgaagatctacctgcaggagaccagcagaagcagcggcagaaagaagaccaccttcttcagaaagaagatgaccgccgccgacgtgagcagacacatgaacaccctgcagctgcagatggaggtgaccagattcctgcacagatgcgagagcgccggcaccagccagatcaccaccctgcccctgcccaccctgttcggcaacaaccacatgaagatggacgtggcctgcaaggtgatgctgggcggcaagaacgtggaggacggcttcggcatcgccttcagagtgctgcaggacttccagctggacgccgccatgacctactgcagagccgccagacagctggtggagaaggagaagtacagcgagatccagcagctgctgaagtgcgtgagcgagagcggcatggccgccaagagcgacggcgacaccatcctgctgaactgcctggaggccttcaagagaatccccccccaggagctggagggcctgatccaggccatccacaacgacgacaacaaggtgagagcctacctgatctgctgcaagctgagaagcgcctacctgatcgccgtgaagcaggagcacagcagagccaccgccctggtgcagcaggtgcagcaggccgccaagagcagcggcgacgccgtggtgcaggacatctgcgcccagtggctgctgaccagccaccccagaggcgcccacggccccggcagcagaaagtag

SEQ ID NO: 106330 - DNA, 7557 bp, synthetic construct
  misc_feature 1..7557: note = Description of Artificial Sequence: Synthetic coding sequence
  source 1..7557: mol_type = other DNA
atgaaccaccccttcggcaaggaggaggccgccagccagaagcagctgttcggcttcttctgcgagtgcctgagaagaggcgagtgggagctggcccaggcctgcgtgccccagctgcaggagggccagggcgacatccccaagagagtggaggacatcctgcaggccctggtggtgtgccccaacctgctgagatgcggccaggacatcaacccccagagagtggcctgggtgtggctgctggtgctggagaagtggctggccagagagaagaagctgctgcccgtggtgttcagaagaaagctggagttcctgctgctgagcgaggacctgcagggcgacatccccgagaacatcctggaggagctgtacgagaccctgacccagggcgccgtgggccacgtgcccgacggcaaccccagaagagagagctggacccccagactgagcagcgaggccgtgagcgtgctgtgggacctgctgagacagagcccccagcccgcccaggccctgctggagctgctgctggaggaggacgacggcaccggcctgtgccactggcccctgcagaacgccctggtggacctgatcagaaaggccctgagaaccctgagatgccccgccgagcccctgggcgtggagctgcacctgctgtgcgaggagctgctggaggcctgcagaaccgagggcagccccctgagagaggagagactgctgagctgcctgctgcacaaggccagcagaggcctgctgagcctgtacggccacacctacgccgagaaggtgaccgagaagccccccagagccaccgccagcggcaaggtgagccccgaccacctggaccccgagagagccatgctggccctgttcagcaaccccaaccccgccgaggcctggaaggtggcctacttctactgcctgagcaacaacaagcacttcctggagcagatcctggtgaccgccctgaccctgctgaaggaggaggacttccccaacctgggctgcctgctggacagagagttcagacccctgagctgcctgctggtgctgctgggctggacccactgccagagcctggagagcgccaagagactgctgcagaccctgcacagaacccagggccccggctgcgacgagctgctgagagacgcctgcgacggcctgtgggcccacctggaggtgctggagtggtgcatccagcagagcagcaaccccatccccaagagagacctgctgtaccacctgcacggcggcgacagccacagcgtgctgtacaccctgcaccacctgaccaacctgcccgccctgagagaggaggacgtgctgaagctgctgcagaaggtgcccgccaaggacccccagcaggagcccgacgccgtggacgcccccgtgcccgagcacctgagccagtgccagaacctgaccctgtaccagggcttctgcgccatgaagtacgccatctacgccctgtgcgtgaacagccaccagcacagccagtgccaggactgcaaggacagcctgagcgaggacctggccagcgccaccgagcccgccaacgacagcctgagcagccccggcgccgccaacctgttcagcacctacctggccagatgccagcagtacctgtgcagcatccccgacagcctgtgcctggagctgctggagaacatcttcagcctgctgctgatcaccagcgccgacctgcaccccgagccccacctgcccgaggactacgccgaggacgacgacatcgagggcaagagccccagcggcctgagaagccccagcgagagcccccagcacatcgcccaccccgagagaaagagcgagagaggcagcctgggcgtgcccaagaccctggcctacaccatgcccagccacgtgaaggccgagcccaaggacagctaccccggcccccacagacacagcttcctggacctgaagcacttcaccagcggcatcagcggcttcctggccgacgagttcgccatcggcgccttcctgagactgctgcaggagcagctggacgagatcagcagcagaagcccccccgagaagcccaagcaggagagccagagctgcagcggcagcagagacggcctgcagagcagactgcacagactgagcaaggtggtgagcgaggcccagtggagacacaaggtggtgaccagcaaccacagaagcgaggagcagcccagcagaagataccagcccgccaccagacaccccagcctgagaagaggcagaagaaccagaagaagccaggccgacggcagagacagaggcagcaaccccagcctggagagcaccagcagcgagctgagcaccagcaccagcgagggcagcctgagcgccatgagcggcagaaacgagctgcacagcagactgcacccccacccccagagcagcctgatccccatgatgttcagcccccccgagagcctgctggccagctgcatcctgagaggcaacttcgccgaggcccaccaggtgctgttcaccttcaacctgaagagcagccccagcagcggcgagctgatgttcatggagagataccaggaggtgatccaggagctggcccaggtggagcacaagatcgagaaccagaacagcgacgccggcagcagcaccatcagaagaaccggcagcggcagaagcaccctgcaggccatcggcagcgccgccgccgccggcatggtgttctacagcatcagcgacgtgaccgacaagctgctgaacaccagcggcgaccccatccccatgctgcaggaggacttctggatcagcaccgccctggtggagcccaccgcccccctgagagaggtgctggaggacctgagcccccccgccatggccgccttcgacctggcctgcagccagtgccagctgtggaagacctgcaagcagctgctggagaccgccgagagaagactgaacagcagcctggagagaagaggcagaagaatcgaccacgtgctgctgaacgccgacggcatcagaggcttccccgtggtgctgcagcagatcagcaagagcctgaactacctgctgatgagcgccagccagaccaagagcgagagcgtggaggagaagggcggcggcccccccagatgcagcatcaccgagctgctgcagatgtgctggcccagcctgagcgaggactgcgtggccagccacaccaccctgagccagcagctggaccaggtgctgcagagcctgagagaggccctggagctgcccgagcccagaaccccccccctgagcagcctggtggagcaggccgcccagaaggcccccgaggccgaggcccaccccgtgcagatccagacccagctgctgcagaagaacctgggcaagcagacccccagcggcagcagacagatggactacctgggcaccttcttcagctactgcagcaccctggccgccgtgctgctgcagagcctgagcagcgagcccgaccacgtggaggtgaaggtgggcaaccccttcgtgctgctgcagcagagcagcagccagctggtgagccacctgctgttcgagagacaggtgccccccgagagactggccgccctgctggcccaggagaacctgagcctgagcgtgccccaggtgatcgtgagctgctgctgcgagcccctggccctgtgcagcagcagacagagccagcagaccagcagcctgctgaccagactgggcaccctggcccagctgcacgccagccactgcctggacgacctgcccctgagcacccccagcagccccagaaccaccgagaaccccaccctggagagaaagccctacagcagccccagagacagcagcctgcccgccctgaccagcagcgccctggccttcctgaagagcagaagcaagctgctggccaccgtggcctgcctgggcgccagccccagactgaaggtgagcaagcccagcctgagctggaaggagctgagaggcagaagagaggtgcccctggccgccgagcaggtggccagagagtgcgagagactgctggagcagttccccctgttcgaggccttcctgctggccgcctgggagcccctgagaggcagcctgcagcagggccagagcctggccgtgaacctgtgcggctgggccagcctgagcaccgtgctgctgggcctgcacagccccatcgccctggacgtgctgagcgaggccttcgaggagagcctggtggccagagactggagcagagccctgcagctgaccgaggtgtacggcagagacgtggacgacctgagcagcatcaaggacgccgtgctgagctgcgccgtggcctgcgacaaggagggctggcagtacctgttccccgtgaaggacgccagcctgagaagcagactggccctgcagttcgtggacagatggcccctggagagctgcctggagatcctggcctactgcatcagcgacaccgccgtgcaggagggcctgaagtgcgagctgcagagaaagctggccgagctgcaggtgtaccagaagatcctgggcctgcagagcccccccgtgtggtgcgactggcagaccctgagaagctgctgcgtggaggaccccagcaccgtgatgaacatgatcctggaggcccaggagtacgagctgtgcgaggagtggggctgcctgtaccccatccccagagagcacctgatcagcctgcaccagaagcacctgctgcacctgctggagagaagagaccacgacaaggccctgcagctgctgagaagaatccccgaccccaccatgtgcctggaggtgaccgagcagagcctggaccagcacaccagcctggccaccagccacttcctggccaactacctgaccacccacttctacggccagctgaccgccgtgagacacagagagatccaggccctgtacgtgggcagcaagatcctgctgaccctgcccgagcagcacagagccagctacagccacctgagcagcaaccccctgttcatgctggagcagctgctgatgaacatgaaggtggactgggccaccgtggccgtgcagaccctgcagcagctgctggtgggccaggagatcggcttcaccatggacgaggtggacagcctgctgagcagatacgccgagaaggccctggacttcccctacccccagagagagaagagaagcgacagcgtgatccacctgcaggagatcgtgcaccaggccgccgaccccgagaccctgcccagaagccccagcgccgagttcagccccgccgccccccccggcatcagcagcatccacagccccagcctgagagagagaagcttcccccccacccagcccagccaggagttcgtgccccccgccaccccccccgccagacaccagtgggtgcccgacgagaccgagagcatctgcatggtgtgctgcagagagcacttcaccatgttcaacagaagacaccactgcagaagatgcggcagactggtgtgcagcagctgcagcaccaagaagatggtggtggagggctgcagagagaaccccgccagagtgtgcgaccagtgctacagctactgcaacaaggacgtgcccgaggagcccagcgagaagcccgaggccctggacagcagcaagaacgagagccccccctacagcttcgtggtgagagtgcccaaggccgacgaggtggagtggatcctggacctgaaggaggaggagaacgagctggtgagaagcgagttctactacgagcaggcccccagcgccagcctgtgcatcgccatcctgaacctgcacagagacagcatcgcctgcggccaccagctgatcgagcactgctgcagactgagcaagggcctgaccaaccccgaggtggacgccggcctgctgaccgacatcatgaagcagctgctgttcagcgccaagatgatgttcgtgaaggccggccagagccaggacctggccctgtgcgacagctacatcagcaaggtggacgtgctgaacatcctggtggccgccgcctacagacacgtgcccagcctggaccagatcctgcagcccgccgccgtgaccagactgagaaaccagctgctggaggccgagtactaccagctgggcgtggaggtgagcaccaagaccggcctggacaccaccggcgcctggcacgcctggggcatggcctgcctgaaggccggcaacctgaccgccgccagagagaagttcagcagatgcctgaagccccccttcgacctgaaccagctgaaccacggcagcagactggtgcaggacgtggtggagtacctggagagcaccgtgagacccttcgtgagcctgcaggacgacgactacttcgccaccctgagagagctggaggccaccctgagaacccagagcctgagcctggccgtgatccccgagggcaagatcatgaacaacacctactaccaggagtgcctgttctacctgcacaactacagcaccaacctggccatcatcagcttctacgtgagacacagctgcctgagagaggccctgctgcacctgctgaacaaggagagcccccccgaggtgttcatcgagggcatcttccagcccagctacaagagcggcaagctgcacaccctggagaacctgctggagagcatcgaccccaccctggagagctggggcaagtacctgatcgccgcctgccagcacctgcagaagaagaactactaccacatcctgtacgagctgcagcagttcatgaaggaccaggtgagagccgccatgacctgcatcagattcttcagccacaaggccaagagctacaccgagctgggcgagaagctgagctggctgctgaaggccaaggaccacctgaagatctacctgcaggagaccagcagaagcagcggcagaaagaagaccaccttcttcagaaagaagatgaccgccgccgacgtgagcagacacatgaacaccctgcagctgcagatggaggtgaccagattcctgcacagatgcgagagcgccggcaccagccagatcaccaccctgcccctgcccaccctgttcggcaacaaccacatgaagatggacgtggcctgcaaggtgatgctgggcggcaagaacgtggaggacggcttcggcatcgccttcagagtgctgcaggacttccagctggacgccgccatgacctactgcagagccgccagacagctggtggagaaggagaagtacagcgagatccagcagctgctgaagtgcgtgagcgagagcggcatggccgccaagagcgacggcgacaccatcctgctgaactgcctggaggccttcaagagaatccccccccaggagctggagggcctgatccaggccatccacaacgacgacaacaaggtgagagcctacctgatctgctgcaagctgagaagcgcctacctgatcgccgtgaagcaggagcacagcagagccaccgccctggtgcagcaggtgcagcaggccgccaagagcagcggcgacgccgtggtgcaggacatctgcgcccagtggctgctgaccagccaccccagaggcgcccacggccccggcagcagaaagtag

SEQ ID NO: 106331 - DNA, 1119 bp, synthetic construct
  misc_feature 1..1119: note = Description of Artificial Sequence: Synthetic coding sequence
  source 1..1119: mol_type = other DNA
atgcagaccagcgagagagagggcagcggccccgagctgagccccagcgtgatgcccgaggcccccctggagagcccccccttccccaccaagagccccgccttcgacctgttcaacctggtgctgagctacaagagactggagatctacctggagcccctgaaggacgccggcgcctggtacagcgtgggcgccctgatgatcagcgtgcccgccctgctgggctacctgcaggaggtgtgcagagccagactgcccgacagcgagctgatgagaagaaagtaccacagcgtgagacaggaggacctgcagagaggcagactgagcagacccgaggccgtggccgaggtgaagagcttcctgatccagctggaggccttcctgagcagactgtgctgcacctgcgaggccgcctacagagtgctgcactgggagaaccccgtggtgagcagccagttctacggcgccctgctgggcaccgtgtgcatgctgtacctgctgcccctgtgctgggtgctgaccctgctgaacagcaccctgttcctgggcaacgtggagttcttcagagtggtgagcgagtacagagccagcctgcagcagagaatgaaccccaagcaggaggagcacgccttcgagagcccccccccccccgacgtgggcggcaaggacggcctgatggacagcacccccgccctgacccccaccgaggacctgacccccggcagcgtggaggaggccgaggaggccgagcccgacgaggagttcaaggacgccatcgaggaggacgacgagggcgccccctgccccgccgaggacgagctggccctgcaggacaacggcttcctgagcaagaacgaggtgctgagaagcaaggtgagcagactgaccgagagactgagaaagagataccccaccaacaacttcggcaactgcaccggctgcagcgccaccttcagcgtgctgaagaagagaagaagctgcagcaactgcggcaacagcttctgcagcagatgctgcagcttcaaggtgcccaagagcagcatgggcgccaccgcccccgaggcccagagagagaccgtgttcgtgtgcgccagctgcaaccagaccctgagcaagtag

SEQ ID NO: 106332 - DNA, 1251 bp, synthetic construct
  misc_feature 1..1251: note = Description of Artificial Sequence: Synthetic coding sequence
  source 1..1251: mol_type = other DNA
atgcagaccagcgagagagagggcagcggccccgagctgagccccagcgtgatgcccgaggcccccctggagagcccccccttccccaccaagagccccgccttcgacctgttcaacctggtgctgagctacaagagactggagatctacctggagcccctgaaggacgccggcgacggcgtgagatacctgctgagatggcagatgcccctgtgcagcctgctgacctgcctgggcctgaacgtgctgttcctgaccctgaacgagggcgcctggtacagcgtgggcgccctgatgatcagcgtgcccgccctgctgggctacctgcaggaggtgtgcagagccagactgcccgacagcgagctgatgagaagaaagtaccacagcgtgagacaggaggacctgcagagaggcagactgagcagacccgaggccgtggccgaggtgaagagcttcctgatccagctggaggccttcctgagcagactgtgctgcacctgcgaggccgcctacagagtgctgcactgggagaaccccgtggtgagcagccagttctacggcgccctgctgggcaccgtgtgcatgctgtacctgctgcccctgtgctgggtgctgaccctgctgaacagcaccctgttcctgggcaacgtggagttcttcagagtggtgagcgagtacagagccagcctgcagcagagaatgaaccccaagcaggaggagcacgccttcgagagcccccccccccccgacgtgggcggcaaggacggcctgatggacagcacccccgccctgacccccaccgagagcctgagcagccaggacctgacccccggcagcgtggaggaggccgaggaggccgagcccgacgaggagttcaaggacgccatcgaggagacccacctggtggtgctggaggacgacgagggcgccccctgccccgccgaggacgagctggccctgcaggacaacggcttcctgagcaagaacgaggtgctgagaagcaaggtgagcagactgaccgagagactgagaaagagataccccaccaacaacttcggcaactgcaccggctgcagcgccaccttcagcgtgctgaagaagagaagaagctgcagcaactgcggcaacagcttctgcagcagatgctgcagcttcaaggtgcccaagagcagcatgggcgccaccgcccccgaggcccagagagagaccgtgttcgtgtgcgccagctgcaaccagaccctgagcaagtag

SEQ ID NO: 106333 - DNA, 957 bp, synthetic construct
  misc_feature 1..957: note = Description of Artificial Sequence: Synthetic coding sequence
  source 1..957: mol_type = other DNA
atgcagaccagcgagagagagggcagcggccccgagctgagccccagcgtgatgcccgaggcccccctggagagcccccccttccccaccaagagccccgccttcgacctgttcaacctggtgctgagctacaagagactggagatctacctggagcccctgaaggacgccggcgacggcgtgagatacctgctgagcctgatccagctggaggccttcctgagcagactgtgctgcacctgcgaggccgcctacagagtgctgcactgggagaaccccgtggtgagcagccagttctacggcgccctgctgggcaccgtgtgcatgctgtacctgctgcccctgtgctgggtgctgaccctgctgaacagcaccctgttcctgggcaacgtggagttcttcagagtggtgagcgagtacagagccagcctgcagcagagaatgaaccccaagcaggaggagcacgccttcgagagcccccccccccccgacgtgggcggcaaggacggcctgatggacagcacccccgccctgacccccaccgaggacctgacccccggcagcgtggaggaggccgaggaggccgagcccgacgaggagttcaaggacgccatcgaggaggacgacgagggcgccccctgccccgccgaggacgagctggccctgcaggacaacggcttcctgagcaagaacgaggtgctgagaagcaaggtgagcagactgaccgagagactgagaaagagataccccaccaacaacttcggcaactgcaccggctgcagcgccaccttcagcgtgctgaagaagagaagaagctgcagcaactgcggcaacagcttctgcagcagatgctgcagcttcaaggtgcccaagagcagcatgggcgccaccgcccccgaggcccagagagagaccgtgttcgtgtgcgccagctgcaaccagaccctgagcaagtag

SEQ ID NO: 106334 - DNA, 1215 bp, synthetic construct
  misc_feature 1..1215: note = Description of Artificial Sequence: Synthetic coding sequence
  source 1..1215: mol_type = other DNA
atgcagaccagcgagagagagggcagcggccccgagctgagccccagcgtgatgcccgaggcccccctggagagcccccccttccccaccaagagccccgccttcgacctgttcaacctggtgctgagctacaagagactggagatctacctggagcccctgaaggacgccggcgacggcgtgagatacctgctgagatggcagatgcccctgtgcagcctgctgacctgcctgggcctgaacgtgctgttcctgaccctgaacgagggcgcctggtacagcgtgggcgccctgatgatcagcgtgcccgccctgctgggctacctgcaggaggtgtgcagagccagactgcccgacagcgagctgatgagaagaaagtaccacagcgtgagacaggaggacctgcagagaggcagactgagcagacccgaggccgtggccgaggtgaagagcttcctgatccagctggaggccttcctgagcagactgtgctgcacctgcgaggccgcctacagagtgctgcactgggagaaccccgtggtgagcagccagttctacggcgccctgctgggcaccgtgtgcatgctgtacctgctgcccctgtgctgggtgctgaccctgctgaacagcaccctgttcctgggcaacgtggagttcttcagagtggtgagcgagtacagagccagcctgcagcagagaatgaaccccaagcaggaggagcacgccttcgagagcccccccccccccgacgtgggcggcaaggacggcctgatggacagcacccccgccctgacccccaccgaggacctgacccccggcagcgtggaggaggccgaggaggccgagcccgacgaggagttcaaggacgccatcgaggaggacgacgagggcgccccctgccccgccgaggacgagctggccctgcaggacaacggcttcctgagcaagaacgaggtgctgagaagcaaggtgagcagactgaccgagagactgagaaagagataccccaccaacaacttcggcaactgcaccggctgcagcgccaccttcagcgtgctgaagaagagaagaagctgcagcaactgcggcaacagcttctgcagcagatgctgcagcttcaaggtgcccaagagcagcatgggcgccaccgcccccgaggcccagagagagaccgtgttcgtgtgcgccagctgcaaccagaccctgagcaagtag

SEQ ID NO: 106335 - DNA, 936 bp, synthetic construct
  misc_feature 1..936: note = Description of Artificial Sequence: Synthetic coding sequence
  source 1..936: mol_type = other DNA
atgatcagcgtgcccgccctgctgggctacctgcaggaggtgtgcagagccagactgcccgacagcgagctgatgagaagaaagtaccacagcgtgagacaggaggacctgcagagaggcagactgagcagacccgaggccgtggccgaggtgaagagcttcctgatccagctggaggccttcctgagcagactgtgctgcacctgcgaggccgcctacagagtgctgcactgggagaaccccgtggtgagcagccagttctacggcgccctgctgggcaccgtgtgcatgctgtacctgctgcccctgtgctgggtgctgaccctgctgaacagcaccctgttcctgggcaacgtggagttcttcagagtggtgagcgagtacagagccagcctgcagcagagaatgaaccccaagcaggaggagcacgccttcgagagcccccccccccccgacgtgggcggcaaggacggcctgatggacagcacccccgccctgacccccaccgagagcctgagcagccaggacctgacccccggcagcgtggaggaggccgaggaggccgagcccgacgaggagttcaaggacgccatcgaggaggacgacgagggcgccccctgccccgccgaggacgagctggccctgcaggacaacggcttcctgagcaagaacgaggtgctgagaagcaaggtgagcagactgaccgagagactgagaaagagataccccaccaacaacttcggcaactgcaccggctgcagcgccaccttcagcgtgctgaagaagagaagaagctgcagcaactgcggcaacagcttctgcagcagatgctgcagcttcaaggtgcccaagagcagcatgggcgccaccgcccccgaggcccagagagagaccgtgttcgtgtgcgccagctgcaaccagaccctgagcaagtag

SEQ ID NO: 106336 - DNA, 861 bp, synthetic construct
  misc_feature 1..861: note = Description of Artificial Sequence: Synthetic coding sequence
  source 1..861: mol_type = other DNA
atgcagaccagcgagagagagggcagcggccccgagctgagccccagcgtgatgcccgaggcccccctggagagcccccccttccccaccaagagccccgccttcgacctgttcaacctggtgctgagctacaagagactggagatctacctggagcccctgaaggacgccggcgacggcgtgagatacctgctgagattctacggcgccctgctgggcaccgtgtgcatgctgtacctgctgcccctgtgctgggtgctgaccctgctgaacagcaccctgttcctgggcaacgtggagttcttcagagtggtgagcgagtacagagccagcctgcagcagagaatgaaccccaagcaggaggagcacgccttcgagagcccccccccccccgacgtgggcggcaaggacggcctgatggacagcacccccgccctgacccccaccgaggacctgacccccggcagcgtggaggaggccgaggaggccgagcccgacgaggagttcaaggacgccatcgaggaggacgacgagggcgccccctgccccgccgaggacgagctggccctgcaggacaacggcttcctgagcaagaacgaggtgctgagaagcaaggtgagcagactgaccgagagactgagaaagagataccccaccaacaacttcggcaactgcaccggctgcagcgccaccttcagcgtgctgaagaagagaagaagctgcagcaactgcggcaacagcttctgcagcagatgctgcagcttcaaggtgcccaagagcagcatgggcgccaccgcccccgaggcccagagagagaccgtgttcgtgtgcgccagctgcaaccagaccctgagcaagtag

SEQ ID NO: 106337 - DNA, 1236 bp, synthetic construct
  misc_feature 1..1236: note = Description of Artificial Sequence: Synthetic coding sequence
  source 1..1236: mol_type = other DNA
atgcagaccagcgagagagagggcagcggccccgagctgagccccagcgtgatgcccgaggcccccctggagagcccccccttccccaccaagagccccgccttcgacctgttcaacctggtgctgagctacaagagactggagatctacctggagcccctgaaggacgccggcgacggcgtgagatacctgctgagatggcagatgcccctgtgcagcctgctgacctgcctgggcctgaacgtgctgttcctgaccctgaacgagggcgcctggtacagcgtgggcgccctgatgatcagcgtgcccgccctgctgggctacctgcaggaggtgtgcagagccagactgcccgacagcgagctgatgagaagaaagtaccacagcgtgagacaggaggacctgcagagaggcagactgagcagacccgaggccgtggccgaggtgaagagcttcctgatccagctggaggccttcctgagcagactgtgctgcacctgcgaggccgcctacagagtgctgcactgggagaaccccgtggtgagcagccagttctacggcgccctgctgggcaccgtgtgcatgctgtacctgctgcccctgtgctgggtgctgaccctgctgaacagcaccctgttcctgggcaacgtggagttcttcagagtggtgagcgagtacagagccagcctgcagcagagaatgaaccccaagcaggaggagcacgccttcgagagcccccccccccccgacgtgggcggcaaggacggcctgatggacagcacccccgccctgacccccaccgaggacctgacccccggcagcgtggaggaggccgaggaggccgagcccgacgaggagttcaaggacgccatcgaggagacccacctggtggtgctggaggacgacgagggcgccccctgccccgccgaggacgagctggccctgcaggacaacggcttcctgagcaagaacgaggtgctgagaagcaaggtgagcagactgaccgagagactgagaaagagataccccaccaacaacttcggcaactgcaccggctgcagcgccaccttcagcgtgctgaagaagagaagaagctgcagcaactgcggcaacagcttctgcagcagatgctgcagcttcaaggtgcccaagagcagcatgggcgccaccgcccccgaggcccagagagagaccgtgttcgtgtgcgccagctgcaaccagaccctgagcaagtag

SEQ ID NO: 106338 - DNA, 1185 bp, synthetic construct
  misc_feature 1..1185: note = Description of Artificial Sequence: Synthetic coding sequence
  source 1..1185: mol_type = other DNA
ctggagagcccccccttccccaccaagagccccgccttcgacctgttcaacctggtgctgagctacaagagactggagatctacctggagcccctgaaggacgccggcgacggcgtgagatacctgctgagatggcagatgcccctgtgcagcctgctgacctgcctgggcctgaacgtgctgttcctgaccctgaacgagggcgcctggtacagcgtgggcgccctgatgatcagcgtgcccgccctgctgggctacctgcaggaggtgtgcagagccagactgcccgacagcgagctgatgagaagaaagtaccacagcgtgagacaggaggacctgcagagaggcagactgagcagacccgaggccgtggccgaggtgaagagcttcctgatccagctggaggccttcctgagcagactgtgctgcacctgcgaggccgcctacagagtgctgcactgggagaaccccgtggtgagcagccagttctacggcgccctgctgggcaccgtgtgcatgctgtacctgctgcccctgtgctgggtgctgaccctgctgaacagcaccctgttcctgggcaacgtggagttcttcagagtggtgagcgagtacagagccagcctgcagcagagaatgaaccccaagcaggaggagcacgccttcgagagcccccccccccccgacgtgggcggcaaggacggcctgatggacagcacccccgccctgacccccaccgagagcctgagcagccaggacctgacccccggcagcgtggaggaggccgaggaggccgagcccgacgaggagttcaaggacgccatcgaggagacccacctggtggtgctggaggacgacgagggcgccccctgccccgccgaggacgagctggccctgcaggacaacggcttcctgagcaagaacgaggtgctgagaagcaaggtgagcagactgaccgagagactgagaaagagataccccaccaacaacttcggcaactgcaccggctgcagcgccaccttcagcgtgctgaagaagagaagaagctgcagcaactgcggcaacagcttctgcagcagatgctgcagcttcaaggtgcccaagagcagcatgggcgccaccgcccccgaggcccagagagagaccgtgttcgtgtgcgccagctgcaaccagaccctgagcaagtag

SEQ ID NO: 106339 - DNA, 1047 bp, synthetic construct
  misc_feature 1..1047: note = Description of Artificial Sequence: Synthetic coding sequence
  source 1..1047: mol_type = other DNA
atgcagaccagcgagagagagggcagcggccccgagctgagccccagcgtgatgcccgaggcccccctggagagcccccccttccccaccaagagccccgccttcgacctgttcaacctggtgctgagctacaagagactggagatctacctggagcccctgaaggacgccggcgacggcgtgagatacctgctgagatggcagatgcccctgtgcagcctgctgacctgcctgggcctgaacgtgctgttcctgaccctgaacgagggcgcctggtacagcgtgggcgccctgatgatcagcgtgcccgccctgctgggctacctgcaggaggtgtgcagagccagactgcccgacagcgagctgatgagaagaaagtaccacagcgtgagacaggaggacctgcagagaggcagactgagcagacccgaggccgtggccgaggtgaagagcttcctgatccagctggaggccttcctgagcagactgtgctgcacctgcgaggccgcctacagagtgctgcactgggagaaccccgtggtgagcagccagttctacggcgccctgctgggcaccgtgtgcatgctgtacctgctgcccctgtgctgggtgctgaccctgctgaacagcaccctgttcctgggcaacgtggagttcttcagagtggtgagcgagtacagagccagcctgcagcagagaatgaaccccaagcaggaggagcacgccttcgagagcccccccccccccgacgtgggcggcaaggacggcctgatggacagcacccccgccctgacccccaccgaggacctgacccccggcagcgtggaggaggccgaggaggccgagcccgacgaggagttcaaggacgccatcgaggaggacgacgagggcgccccctgccccgccgaggacgagctggccctgcaggacaacggcttcctgagcaagaacgaggtgctgagaagcaaggtgagcagactgaccgagagactgagaaagagataccccaccaacaacttcggcgtgaccggcgccggcagcagctag

SEQ ID NO: 106340 - DNA, 2664 bp, synthetic construct
  misc_feature 1..2664: note = Description of Artificial Sequence: Synthetic coding sequence
  source 1..2664: mol_type = other DNA
atgatgaacagattcagaaagtggctgtacaagcccaagagaagcgacccccagctgctggccagattctactacgccgacgaggagctgaaccaggtggccgccgagctggacagcctggacggcagaaaggacccccagagatgcaccctgctggtgagccagttcagaagctgccaggacaacgtgctgaacatcatcaaccagatcatggacgagtgcatcccccaggacagagcccccagagacttctgcgtgaagttccccgaggagatcagacacgacaacctggccggccagctgtggttcggcgccgagtgcctggccgccggcagcatcatcatgaacagagagctggagagcatggccatgagacccctggccaaggagctgaccagaagcctggaggacgtgagaggcgccctgagagaccaggccctgagagacctgaacacctacaccgagaagatgagagaggccctgagacacttcgacgtgctgttcgccgagttcgagctgagctacgtgagcgccatggtgcccgtgaagagccccagagagtactacgtgcagcaggaggtgatcgtgctgttctgcgagaccgtggagagagccctggacttcggctacctgacccaggacatgatcgacgactacgagcccgccctgatgttcagcatccccagactggccatcgtgtgcggcctggtggtgtacgccgacggccccctgaacctggacagaaaggtggaggacatgagcgagctgttcagacccttccacaccctgctgagaaagatcagagacctgctgcagaccctgaccgaggaggagctgcacaccctggagagaaacctgtgcatcagccaggacgtggagttccccatcagagccgacgtgcagggccccgccgccctggcccccgccctgagcgcccccctgccccccgagggccccctgagcgccaaggccaaggaccccgacgccgagctggcctgcagcatgcagtacgacgaccaggagctggagcagctgagcagaatggtgcacagagccggcgacgagatgagcagcctgctgagcccccccatcgcctgccagagccccgcccacagacccggcgccgagggcagccccggcggcgaggccagccccggcagacccagactgagaagcggcagcgacgaggaggagagagtgttcttcatggacgacgtggagggcaccgccgaggccctggccagacccgagagccccgccggccccttcggctgggccggcagcacctgggccgacccccaggagaagggccagggcggccccggcggcgccgccggcatcagcctgcccgccagcgagaaggaggaggacctgagcaacaacaacctggaggccgagggcaccgacggcgccagcctggccggcaccagcagctgcagctgcctggacagcagactgcacctggacggctgggaggtgggcgccgacgacgccgagaccgccgagatgatcgcccacagaaccggcggcatgaagctgagcgccaccgtgatcttcaaccccaagagccccaccagcctggacagcgccgtggccacccaggaggccgccagcgagcccgtggccgagggcatggacggcggcccccacaagctgagcaccggcgccaccaactgcctgctgcacagctgcgtgtgctgcggcagctgcggcgacagcagagaggacgtggtggagagactgagagagaagtgcagccccggcggcgtgatcggcgccagctacgccgccggcctggccaaggccagcgacagagcccccgagagacaggaggaggcccccccccccagcgaggacgccagcaacggcagagagcccaaggcccccaccagcgacaagtgcctgccccacaccagcggcagccaggtggacaccgccagcggcctgcagggcgaggccggcgtggccggccagcaggagcccgaggccagagagctgcacgccggcagccccagcgcccacgaggccccccaggccctgagcggcagcagcagcagcaccgccggcagctgcagcagcgacaagatgggccccgaggccgcccccgccgccacccacgccgccccccaggccaccagagagaagatcagaagcagattccacggcagccacgacctgatccacagactgttcgtgtgcatcagcggcgtggccgaccagctgcagaccaactacgccagcgacctgagaagcatcctgaagaccctgttcgaggtgatggccaccaagcccgagaccgacgacaaggagaagctgagaaaggtgacccagaccctgagaagcgccgccctggaggactgcgccctgtgccaggagaccctgagcagcagcgagctggccgccaagaccagagacggcgacttcgaggacccccccgagtgggtgcccgacgaggcctgcggcttctgcaccgcctgcaaggcccccttcaccgtgatcagaagaaagcaccactgcagaagctgcggcaagatcttctgcagcagatgcagcagccacagcgcccccctgcccagatacggccaggtgaagcccgtgagagtgtgcacccactgctacatgttccacgtgacccccttctacagcgacaaggccggcctgtag

SEQ ID NO: 106341 - DNA, 2574 bp, synthetic construct
  misc_feature 1..2574: note = Description of Artificial Sequence: Synthetic coding sequence
  source 1..2574: mol_type = other DNA
atgatgaacagattcagaaagtggctgtacaagcccaagagaagcgacccccagctgctggccagattctactacgccgacgaggagctgaaccaggtggccgccgagctggacagcctggacggcagaaaggacccccagagatgcaccctgctggtgagccagttcagaagctgccaggacaacgtgctgaacatcatcaaccagatcatggacgagtgcatcccccaggacagagcccccagagacttctgcgtgaagttccccgaggagatcagacacgacaacctggccggccagctgtggttcggcgccgagtgcctggccgccggcagcatcatcatgaacagagagctggagagcatggccatgagacccctggccaaggagctgaccagaagcctggaggacgtgagaggcgccctgagagaccaggccctgagagacctgaacacctacaccgagaagatgagagaggccctgagacacttcgacgtgctgttcgccgagttcgagctgagctacgtgagcgccatggtgcccgtgaagagccccagagagtactacgtgcagcaggaggtgatcgtgctgttctgcgagaccgtggagagcggcctggtggtgtacgccgacggccccctgaacctggacagaaaggtggaggacatgagcgagctgttcagacccttccacaccctgctgagaaagatcagagacctgctgcagaccctgaccgaggaggagctgcacaccctggagagaaacctgtgcatcagccaggacgtggagttccccatcagagccgacgtgcagggccccgccgccctggcccccgccctgagcgcccccctgccccccgagggccccctgagcgccaaggccaaggaccccgacgccgagctggcctgcagcatgcagtacgacgaccaggagctggagcagctgagcagaatggtgcacagagccggcgacgagatgagcagcctgctgagcccccccatcgcctgccagagccccgcccacagacccggcgccgagggcagccccggcggcgaggccagccccggcagacccagactgagaagcggcagcgacgaggaggagagagtgttcttcatggacgacgtggagggcaccgccgaggccctggccagacccgagagccccgccggccccttcggctgggccggcagcacctgggccgacccccaggagaagggccagggcggccccggcggcgccgccggcatcagcctgcccgccagcgagaaggaggaggacctgagcaacaacaacctggaggccgagggcaccgacggcgccagcctggccggcaccagcagctgcagctgcctggacagcagactgcacctggacggctgggaggtgggcgccgacgacgccgagaccgccgagatgatcgcccacagaaccggcggcatgaagctgagcgccaccgtgatcttcaaccccaagagccccaccagcctggacagcgccgtggccacccaggaggccgccagcgagcccgtggccgagggcatggacggcggcccccacaagctgagcaccggcgccaccaactgcctgctgcacagctgcgtgtgctgcggcagctgcggcgacagcagagaggacgtggtggagagactgagagagaagtgcagccccggcggcgtgatcggcgccagctacgccgccggcctggccaaggccagcgacagagcccccgagagacaggaggaggcccccccccccagcgaggacgccagcaacggcagagagcccaaggcccccaccagcgacaagtgcctgccccacaccagcggcagccaggtggacaccgccagcggcctgcagggcgaggccggcgtggccggccagcaggagcccgaggccagagagctgcacgccggcagccccagcgcccacgaggccccccaggccctgagcggcagcagcagcagcaccgccggcagctgcagcagcgacaagatgggccccgaggccgcccccgccgccacccacgccgccccccaggccaccagagagaagatcagaagcagattccacggcagccacgacctgatccacagactgttcgtgtgcatcagcggcgtggccgaccagctgcagaccaactacgccagcgacctgagaagcatcctgaagaccctgttcgaggtgatggccaccaagcccgagaccgacgacaaggagaagctgagaaaggtgacccagaccctgagaagcgccgccctggaggactgcgccctgtgccaggagaccctgagcagcagcgagctggccgccaagaccagagacggcgacttcgaggacccccccgagtgggtgcccgacgaggcctgcggcttctgcaccgcctgcaaggcccccttcaccgtgatcagaagaaagcaccactgcagaagctgcggcaagatcttctgcagcagatgcagcagccacagcgcccccctgcccagatacggccaggtgaagcccgtgagagtgtgcacccactgctacatgttccacgtgacccccttctacagcgacaaggccggcctgtag

SEQ ID NO: 106342 - DNA, 2454 bp, synthetic construct
  misc_feature 1..2454: note = Description of Artificial Sequence: Synthetic coding sequence
  source 1..2454: mol_type = other DNA
atggacgagtgcatcccccaggacagagcccccagagacttctgcgtgaagttccccgaggagatcagacacgacaacctggccggccagctgtggttcggcgccgagtgcctggccgccggcagcatcatcatgaacagagagctggagagcatggccatgagacccctggccaaggagctgaccagaagcctggaggacgtgagaggcgccctgagagaccaggccctgagagacctgaacacctacaccgagaagatgagagaggccctgagacacttcgacgtgctgttcgccgagttcgagctgagctacgtgagcgccatggtgcccgtgaagagccccagagagtactacgtgcagcaggaggtgatcgtgctgttctgcgagaccgtggagagagccctggacttcggctacctgacccaggacatgatcgacgactacgagcccgccctgatgttcagcatccccagactggccatcgtgtgcggcctggtggtgtacgccgacggccccctgaacctggacagaaaggtggaggacatgagcgagctgttcagacccttccacaccctgctgagaaagatcagagacctgctgcagaccctgaccgaggaggagctgcacaccctggagagaaacctgtgcatcagccaggacgtggagttccccatcagagccgacgtgcagggccccgccgccctggcccccgccctgagcgcccccctgccccccgagggccccctgagcgccaaggccaaggaccccgacgccgagctggcctgcagcatgcagtacgacgaccaggagctggagcagctgagcagaatggtgcacagagccggcgacgagatgagcagcctgctgagcccccccatcgcctgccagagccccgcccacagacccggcgccgagggcagccccggcggcgaggccagccccggcagacccagactgagaagcggcagcgacgaggaggagagagtgttcttcatggacgacgtggagggcaccgccgaggccctggccagacccgagagccccgccggccccttcggctgggccggcagcacctgggccgacccccaggagaagggccagggcggccccggcggcgccgccggcatcagcctgcccgccagcgagaaggaggaggacctgagcaacaacaacctggaggccgagggcaccgacggcgccagcctggccggcaccagcagctgcagctgcctggacagcagactgcacctggacggctgggaggtgggcgccgacgacgccgagaccgccgagatgatcgcccacagaaccggcggcatgaagctgagcgccaccgtgatcttcaaccccaagagccccaccagcctggacagcgccgtggccacccaggaggccgccagcgagcccgtggccgagggcatggacggcggcccccacaagctgagcaccggcgccaccaactgcctgctgcacagctgcgtgtgctgcggcagctgcggcgacagcagagaggacgtggtggagagactgagagagaagtgcagccccggcggcgtgatcggcgccagctacgccgccggcctggccaaggccagcgacagagcccccgagagacaggaggaggcccccccccccagcgaggacgccagcaacggcagagagcccaaggcccccaccagcgacaagtgcctgccccacaccagcggcagccaggtggacaccgccagcggcctgcagggcgaggccggcgtggccggccagcaggagcccgaggccagagagctgcacgccggcagccccagcgcccacgaggccccccaggccctgagcggcagcagcagcagcaccgccggcagctgcagcagcgacaagatgggccccgaggccgcccccgccgccacccacgccgccccccaggccaccagagagaagatcagaagcagattccacggcagccacgacctgatccacagactgttcgtgtgcatcagcggcgtggccgaccagctgcagaccaactacgccagcgacctgagaagcatcctgaagaccctgttcgaggtgatggccaccaagcccgagaccgacgacaaggagaagctgagaaaggtgacccagaccctgagaagcgccgccctggaggactgcgccctgtgccaggagaccctgagcagcagcgagctggccgccaagaccagagacggcgacttcgaggacccccccgagtgggtgcccgacgaggcctgcggcttctgcaccgcctgcaaggcccccttcaccgtgatcagaagaaagcaccactgcagaagctgcggcaagatcttctgcagcagatgcagcagccacagcgcccccctgcccagatacggccaggtgaagcccgtgagagtgtgcacccactgctacatgttccacgtgacccccttctacagcgacaaggccggcctgtag

SEQ ID NO: 106343 - DNA, 1212 bp, synthetic construct
  misc_feature 1..1212: note = Description of Artificial Sequence: Synthetic coding sequence
  source 1..1212: mol_type = other DNA
atggagcccgccggcccctgcggcttctgccccgccggcgaggtgcagcccgccagatacacctgccccagatgcaacgccccctactgcagcctgagatgctacagaacccacggcacctgcgccgagaacttctacagagaccaggtgctgggcgagctgagaggctgcagcgccccccccagcagactggccagcgccctgagaagactgagacagcagagagagaccgaggacgagcccggcgaggccggcctgagcagcggccccgcccccggcggcctgagcggcctgtgggagagactggcccccggcgagaaggccgccttcgagagactgctgagcagaggcgaggccggcagactgctgcccccctggagaccctggtggtggaacagaggcgccggcccccagctgctggaggagctggacaacgcccccggcagcgacgccgccgagctggagctggcccccgccagaaccccccccgacagcgtgaaggacgccagcgccgccgagcccgccgccgccgagagagtgctgggcgacgtgcccggcgcctgcacccccgtggtgcccaccagaatccccgccatcgtgagcctgagcagaggccccgtgagccccctggtgagattccagctgcccaacgtgctgttcgcctacgcccacaccctggccctgtaccacggcggcgacgacgccctgctgagcgacttctgcgccaccctgctgggcgtgagcggcgccctgggcgcccagcaggtgttcgccagcgccgaggaggccctgcaggccgccgcccacgtgctggaggccggcgagcacccccccggccccctgggcaccagaggcgccatgcacgaggtggccagaatcctgctgggcgagggccccaccaaccagaagggctacaccctggccgccctgggcgacctggcccagaccctgggcagagccagaaagcaggccgtggccagagaggagagagaccacctgtacagagccagaaagaagtgccagttcctgctggcctggaccaacgagaacgaggccgccctgacccccctggccctggactgcgccagagcccaccaggcccacgccgtggtggccgaggaggtggccgccctgaccggcgagctggagagactgtggggcggccccgtgccccccgcccccagaaccctgatcgaggagctgcccagctag

SEQ ID NO: 106344 - DNA, 1683 bp, synthetic construct
  misc_feature 1..1683: note = Description of Artificial Sequence: Synthetic coding sequence
  source 1..1683: mol_type = other DNA
atggccggcccccagcccctggccctgcagctggagcagctgctgaaccccagacccagcgaggccgaccccgaggccgaccccgaggaggccaccgccgccagagtgatcgacagattcgacgagggcgaggacggcgagggcgacttcctggtggtgggcagcatcagaaagctggccagcgccagcctgctggacaccgacaagagatactgcggcaagaccaccagcagaaaggcctggaacgaggaccactgggagcagaccctgcccggcagcagcgacgaggagatcagcgacgaggagggcagcggcgacgaggacagcgagggcctgggcctggaggagtacgacgaggacgacctgggcgccgccgaggagcaggagtgcggcgaccacagagagagcaagaagagcagaagccacagcgccaagacccccggcttcagcgtgcagagcatcagcgacttcgagaagttcaccaagggcatggacgacctgggcagcagcgaggaggaggaggacgaggagagcggcatggaggagggcgacgacgccgaggacagccagggcgagagcgaggaggacagagccggcgacagaaacagcgaggacgacggcgtggtgatgaccttcagcagcgtgaaggtgagcgaggaggtggagaagggcagagccgtgaagaaccagatcgccctgtgggaccagctgctggagggcagaatcaagctgcagaaggccctgctgaccaccaaccagctgccccagcccgacgtgttccccctgttcaaggacaagggcggccccgagttcagcagcgccctgaagaacagccacaaggccctgaaggccctgctgagaagcctggtgggcctgcaggaggagctgctgttccagtaccccgacaccagatacctggtggacggcaccaagcccaacgccggcagcgaggagatcagcagcgaggacgacgagctggtggaggagaagaagcagcagagaagaagagtgcccgccaagagaaagctggagatggaggactaccccagcttcatggccaagagattcgccgacttcaccgtgtacagaaacagaaccctgcagaagtggcacgacaagaccaagctggccagcggcaagctgggcaagggcttcggcgccttcgagagaagcatcctgacccagatcgaccacatcctgatggacaaggagagactgctgagaagaacccagaccaagagaagcgtgtacagagtgctgggcaagcccgagcccgccgcccagcccgtgcccgagagcctgcccggcgagcccgagatcctgccccaggcccccgccaacgcccacctgaaggacctggacgaggagatcttcgacgacgacgacttctaccaccagctgctgagagagctgatcgagagaaagaccagcagcctggaccccaacgaccaggtggccatgggcagacagtggctggccatccagaagctgagaagcaagatccacaagaaggtggacagaaaggccagcaagggcagaaagctgagattccacgtgctgagcaagctgctgagcttcatggcccccatcgaccacaccaccatgaacgacgacgccagaaccgagctgtacagaagcctgttcggccagctgcacccccccgacgagggccacggcgactag

SEQ ID NO: 106345 - DNA, 4134 bp, synthetic construct
  misc_feature 1..4134: note = Description of Artificial Sequence: Synthetic coding sequence
  source 1..4134: mol_type = other DNA
atggacaccagcagcgtgggcggcctggagctgaccgaccagacccccgtgctgctgggcagcaccgccatggccaccagcctgaccaacgtgggcaacagcttcagcggccccgccaaccccctggtgagcagaagcaacaagttccagaacagcagcgtggaggacgacgacgacgtggtgttcatcgagcccgtgcagccccccccccccagcgtgcccgtggtggccgaccagagaaccatcaccttcaccagcagcaagaacgaggagctgcagggcaacgacagcaagatcacccccagcagcaaggagctggccagccagaagggcagcgtgagcgagaccatcgtgatcgacgacgaggaggacatggagaccaaccagggccaggagaagaacagcagcaacttcatcgagagaagaccccccgagaccaagaacagaaccaacgacgtggacttcagcaccagcagcttcagcagaagcaaggtgaacgccggcatgggcaacagcggcatcaccaccgagcccgacagcgagatccagatcgccaacgtgaccaccctggagaccggcgtgagcagcgtgaacgacggccagctggagaacaccgacggcagagacatgaacctgatgatcacccacgtgaccagcctgcagaacaccaacctgggcgacgtgagcaacggcctgcagagcagcaacttcggcgtgaacatccagacctacacccccagcctgaccagccagaccaagaccggcgtgggccccttcaaccccggcagaatgaacgtggccggcgacgtgttccagaacggcgagagcgccacccaccacaaccccgacagctggatcagccagagcgccagcttccccagaaaccagaagcagcccggcgtggacagcctgagccccgtggccagcctgcccaagcagatcttccagcccagcgtgcagcagcagcccaccaagcccgtgaaggtgacctgcgccaactgcaagaagcccctgcagaagggccagaccgcctaccagagaaagggcagcgcccacctgttctgcagcaccacctgcctgagcagcttcagccacaagcccgcccccaagaagctgtgcgtgatgtgcaagaaggacatcaccaccatgaagggcaccatcgtggcccaggtggacagcagcgagagcttccaggagttctgcagcaccagctgcctgagcctgtacgaggacaagcagaaccccaccaagggcgccctgaacaagagcagatgcaccatctgcggcaagctgaccgagatcagacacgaggtgagcttcaagaacatgacccacaagctgtgcagcgaccactgcttcaacagatacagaatggccaacggcctgatcatgaactgctgcgagcagtgcggcgagtacctgcccagcaagggcgccggcaacaacgtgctggtgatcgacggccagcagaagagattctgctgccagagctgcgtgagcgagtacaagcaggtgggcagccaccccagcttcctgaaggaggtgagagaccacatgcaggacagcttcctgatgcagcccgagaagtacggcaagctgaccacctgcaccggctgcagaacccagtgcagattcttcgacatgacccagtgcatcggccccaacggctacatggagccctactgcagcaccgcctgcatgaacagccacaagaccaagtacgccaagagccagagcctgggcatcatctgccacttctgcaagagaaacagcctgccccagtaccaggccaccatgcccgacggcaagctgtacaacttctgcaacagcagctgcgtggccaagttccaggccctgagcatgcagagcagccccaacggccagttcgtggcccccagcgacatccagctgaagtgcaactactgcaagaacagcttctgcagcaagcccgagatcctggagtgggagaacaaggtgcaccagttctgcagcaagacctgcagcgacgactacaagaagctgcactgcatcgtgacctactgcgagtactgccaggaggagaagaccctgcacgagaccgtgaacttcagcggcgtgaagagacccttctgcagcgagggctgcaagctgctgtacaagcaggacttcgccagaagactgggcctgagatgcgtgacctgcaactactgcagccagctgtgcaagaagggcgccaccaaggagctggacggcgtggtgagagacttctgcagcgaggactgctgcaagaagttccaggactggtactacaaggccgccagatgcgactgctgcaagagccagggcaccctgaaggagagagtgcagtggagaggcgagatgaagcacttctgcgaccagcactgcctgctgagattctactgccagcagaacgagcccaacatgaccacccagaagggccccgagaacctgcactacgaccagggctgccagaccagcagaaccaagatgaccggcagcgcccccccccccagccccacccccaacaaggagatgaagaacaaggccgtgctgtgcaagcccctgaccatgaccaaggccacctactgcaagccccacatgcagaccaagagctgccagaccgacgacacctggagaaccgagtacgtgcccgtgcccatccccgtgcccgtgtacatccccgtgcccatgcacatgtacagccagaacatccccgtgcccaccaccgtgcccgtgcccgtgcccgtgcccgtgttcctgcccgcccccctggacagcagcgagaagatccccgccgccatcgaggagctgaagagcaaggtgagcagcgacgccctggacaccgagctgctgaccatgaccgacatgatgagcgaggacgagggcaagaccgagaccaccaacatcaacagcgtgatcatcgagaccgacatcatcggcagcgacctgctgaagaacagcgaccccgagacccagagcagcatgcccgacgtgccctacgagcccgacctggacatcgagatcgacttccccagagccgccgaggagctggacatggagaacgagttcctgctgccccccgtgttcggcgaggagtacgaggagcagcccagacccagaagcaagaagaagggcgccaagagaaaggccgtgagcggctaccagagccacgacgacagcagcgacaacagcgagtgcagcttccccttcaagtacacctacggcgtgaacgcctggaagcactgggtgaagaccagacagctggacgaggacctgctggtgctggacgagctgaagagcagcaagagcgtgaagctgaaggaggacctgctgagccacaccaccgccgagctgaactacggcctggcccacttcgtgaacgagatcagaagacccaacggcgagaactacgcccccgacagcatctactacctgtgcctgggcatccaggagtacctgtgcggcagcaacagaaaggacaacatcttcatcgaccccggctaccagaccttcgagcaggagctgaacaagatcctgagaagctggcagcccagcatcctgcccgacggcagcatcttcagcagagtggaggaggactacctgtggagaatcaagcagctgggcagccacagccccgtggccctgctgaacaccctgttctacttcaacaccaagtacttcggcctgaagaccgtggagcagcacctgagactgagcttcggcaccgtgttcagacactggaagaagaaccccctgaccatggagaacaaggcctgcctgagataccaggtgagcagcctgtgcggcaccgacaacgaggacaagatcaccaccggcaagagaaagcacgaggacgacgagcccgtgttcgagcagatcgagaacaccgccaaccccagcagatgccccgtgaagatgttcgagtgctacctgagcaagagcccccagaacctgaaccagagaatggacgtgttctacctgcagcccgagtgcagcagcagcaccgacagccccgtgtggtacaccagcaccagcctggacagaaacaccctggagaacatgctggtgagagtgctgctggtgaaggacatctacgacaaggacaactacgagctggacgaggacaccgactag

SEQ ID NO: 106346 - DNA, 4128 bp, synthetic construct
  misc_feature 1..4128: note = Description of Artificial Sequence: Synthetic coding sequence
  source 1..4128: mol_type = other DNA
atggacaccagcagcgtgggcggcctggagctgaccgaccagacccccgtgctgctgggcagcaccgccatggccaccagcctgaccaacgtgggcaacagcttcagcggccccgccaaccccctggtgagcagaagcaacaagttccagaacagcagcgtggaggacgacgacgacgtggtgttcatcgagcccgtgcagccccccccccccagcgtgcccgtggtggccgaccagagaaccatcaccttcaccagcagcaagaacgaggagctgcagggcaacgacagcaagatcacccccagcagcaaggagctggccagccagaagggcagcgtgagcgagaccatcgtgatcgacgacgaggaggacatggagaccaaccagggccaggagaagaacagcagcaacttcatcgagagaagaccccccgagaccaagaacagaaccaacgacgtggacttcagcaccagcagcttcagcagaagcaaggtgaacgccggcatgggcaacagcggcatcaccaccgagcccgacagcgagatccagatcgccaacgtgaccaccctggagaccggcgtgagcagcgtgaacgacggccagctggagaacaccgacggcagagacatgaacctgatgatcacccacgtgaccagcctgcagaacaccaacctgggcgacgtgagcaacggcctgcagagcagcaacttcggcgtgaacatccagacctacacccccagcctgaccagccagaccaagaccggcgtgggccccttcaaccccggcagaatgaacgtggccggcgacgtgttccagaacggcgagagcgccacccaccacaaccccgacagctggatcagccagagcgccagcttccccagaaaccagaagcagcccggcgtggacagcctgagccccgtggccagcctgcccaagcagatcttccagcccagcgtgcagcagcagcccaccaagcccgtgaaggtgacctgcgccaactgcaagaagcccctgcagaagggccagaccgcctaccagagaaagggcagcgcccacctgttctgcagcaccacctgcctgagcagcttcagccacaagcccgcccccaagaagctgtgcgtgatgtgcaagaaggacatcaccaccatgaagggcaccatcgtggcccaggtggacagcagcgagagcttccaggagttctgcagcaccagctgcctgagcctgtacgaggacaagcagaaccccaccaagggcgccctgaacaagagcagatgcaccatctgcggcaagctgaccgagatcagacacgaggtgagcttcaagaacatgacccacaagctgtgcagcgaccactgcttcaacagatacagaatggccaacggcctgatcatgaactgctgcgagcagtgcggcgagtacctgcccagcaagggcgccggcaacaacgtgctggtgatcgacggccagcagaagagattctgctgccagagctgcgtgagcgagtacaagcaggtgggcagccaccccagcttcctgaaggaggtgagagaccacatgcaggacagcttcctgatgcagcccgagaagtacggcaagctgaccacctgcaccggctgcagaacccagtgcagattcttcgacatgacccagtgcatcggccccaacggctacatggagccctactgcagcaccgcctgcatgaacagccacaagaccaagtacgccaagagccagagcctgggcatcatctgccacttctgcaagagaaacagcctgccccagtaccaggccaccatgcccgacggcaagctgtacaacttctgcaacagcagctgcgtggccaagttccaggccctgagcatgcagagcagccccaacggccagttcgtggcccccagcgacatccagctgaagtgcaactactgcaagaacagcttctgcagcaagcccgagatcctggagtgggaggccagcctgcaccagttctgcagcaagacctgcagcgacgactacaagaagctgcactgcatcgtgacctactgcgagtactgccaggaggagaagaccctgcacgagaccgtgaacttcagcggcgtgaagagacccttctgcagcgagggctgcaagctgctgtacaagcaggacttcgccagaagactgggcctgagatgcgtgacctgcaactactgcagccagctgtgcaagaagggcgccaccaaggagctggacggcgtggtgagagacttctgcagcgaggactgctgcaagaagttccaggactggtactacaaggcctgcgactgctgcaagagccagggcaccctgaaggagagagtgcagtggagaggcgagatgaagcacttctgcgaccagcactgcctgctgagattctactgccagcagaacgagcccaacatgaccacccagaagggccccgagaacctgcactacgaccagggctgccagaccagcagaaccaagatgaccggcagcgcccccccccccagccccacccccaacaaggagatgaagaacaaggccgtgctgtgcaagcccctgaccatgaccaaggccacctactgcaagccccacatgcagaccaagagctgccagaccgacgacacctggagaaccgagtacgtgcccgtgcccatccccgtgcccgtgtacatccccgtgcccatgcacatgtacagccagaacatccccgtgcccaccaccgtgcccgtgcccgtgcccgtgcccgtgttcctgcccgcccccctggacagcagcgagaagatccccgccgccatcgaggagctgaagagcaaggtgagcagcgacgccctggacaccgagctgctgaccatgaccgacatgatgagcgaggacgagggcaagaccgagaccaccaacatcaacagcgtgatcatcgagaccgacatcatcggcagcgacctgctgaagaacagcgaccccgagacccagagcagcatgcccgacgtgccctacgagcccgacctggacatcgagatcgacttccccagagccgccgaggagctggacatggagaacgagttcctgctgccccccgtgttcggcgaggagtacgaggagcagcccagacccagaagcaagaagaagggcgccaagagaaaggccgtgagcggctaccagagccacgacgacagcagcgacaacagcgagtgcagcttccccttcaagtacacctacggcgtgaacgcctggaagcactgggtgaagaccagacagctggacgaggacctgctggtgctggacgagctgaagagcagcaagagcgtgaagctgaaggaggacctgctgagccacaccaccgccgagctgaactacggcctggcccacttcgtgaacgagatcagaagacccaacggcgagaactacgcccccgacagcatctactacctgtgcctgggcatccaggagtacctgtgcggcagcaacagaaaggacaacatcttcatcgaccccggctaccagaccttcgagcaggagctgaacaagatcctgagaagctggcagcccagcatcctgcccgacggcagcatcttcagcagagtggaggaggactacctgtggagaatcaagcagctgggcagccacagccccgtggccctgctgaacaccctgttctacttcaacaccaagtacttcggcctgaagaccgtggagcagcacctgagactgagcttcggcaccgtgttcagacactggaagaagaaccccctgaccatggagaacaaggcctgcctgagataccaggtgagcagcctgtgcggcaccgacaacgaggacaagatcaccaccggcaagagaaagcacgaggacgacgagcccgtgttcgagcagatcgagaacaccgccaaccccagcagatgccccgtgaagatgttcgagtgctacctgagcaagagcccccagaacctgaaccagagaatggacgtgttctacctgcagcccgagtgcagcagcagcaccgacagccccgtgtggtacaccagcaccagcctggacagaaacaccctggagaacatgctggtgagagtgctgctggtgaaggacatctacgacaaggacaactacgagctggacgaggacaccgactag

SEQ ID NO: 106347 - DNA, 4128 bp, synthetic construct; identical to SEQ ID NO: 106346
  misc_feature 1..4128: note = Description of Artificial Sequence: Synthetic coding sequence
  source 1..4128: mol_type = other DNA

SEQ ID NO: 106348 - DNA, 1134 bp, synthetic construct
  misc_feature 1..1134: note = Description of Artificial Sequence: Synthetic coding sequence
  source 1..1134: mol_type = other DNA
atgcaggacagcttcctgatgcagcccgagaagtacggcaagctgaccacctgcaccggctgcagaacccagtgcagattcttcgacatgacccagtgcatcggccccaacggctacatggagccctactgcagcaccgcctgcatgaacagccacaagaccaagtacgccaagagccagagcctgggcatcatctgccacttctgcaagagaaacagcctgccccagtaccaggccaccatgcccgacggcaagctgtacaacttctgcaacagcagctgcgtggccaagttccaggccctgagcatgcagagcagccccaacggccagttcgtggcccccagcgacatccagctgaagtgcaactactgcaagaacagcttctgcagcaagcccgagatcctggagtgggagaacaaggtgcaccagttctgcagcaagacctgcagcgacgactacaagaagctgcactgcatcgtgacctactgcgagtactgccaggaggagaagaccctgcacgagaccgtgaacttcagcggcgtgaagagacccttctgcagcgagggctgcaagctgctgtacaagcaggacttcgccagaagactgggcctgagatgcgtgacctgcaactactgcagccagctgtgcaagaagggcgccaccaaggagctggacggcgtggtgagagacttctgcagcgaggactgctgcaagaagttccaggactggtactacaaggccgccagatgcgactgctgcaagagccagggcaccctgaaggagagagtgcagtggagaggcgagatgaagcacttctgcgaccagcactgcctgctgagattctactgccagcagaacgagcccaacatgaccacccagaagggccccgagaacctgcactacgaccagggctgccagaccagcagaaccaagatgaccggcagcgcccccccccccagccccacccccaacaaggagatgaagaacaaggccgtgctgtgcaagcccctgaccatgaccaaggccacctactgcaagccccacatgcagaccaagagctgccagaccgacatcacctggagaatccagcacctgatcctgaaccactacgaccagagcctgatcaaggcctag

SEQ ID NO: 106349 - DNA, 4134 bp, synthetic construct; identical to SEQ ID NO: 106345
  misc_feature 1..4134: note = Description of Artificial Sequence: Synthetic coding sequence
  source 1..4134: mol_type = other DNA

SEQ ID NO: 106350 - DNA, 4113 bp, synthetic construct
  misc_feature 1..4113: note = Description of Artificial Sequence: Synthetic coding sequence
  source 1..4113: mol_type = other DNA
atggaccccagcgacttccccagccccttcgaccccctgaccctgcccgagaagcccctggccggcgacctgcccgtggacatggagttcggcgaggacctgctggagagccagaccgcccccaccagaggctgggccccccccggccccagccccagcagcggcgccctggacctgctggacacccccgccggcctggagaaggaccccggcgtgctggacggcgccaccgagctgctgggcctgggcggcctgctgtacaaggcccccagcccccccgaggtggaccacggccccgagggcaccctggcctgggacgccggcgaccagaccctggagcccggccccggcggccagacccccgaggtggtgccccccgaccccggcgccggcgccaacagctgcagccccgagggcctgctggagcccctggcccccgacagccccatcaccctgcagagcccccacatcgaggaggaggagaccaccagcatcgccaccgccagaagaggcagccccggccaggaggaggagctgccccagggccagccccagagccccaacgccccccccagccccagcgtgggcgagaccctgggcgacggcatcaacagcagccagaccaagcccggcggcagcagcccccccgcccaccccagcctgcccggcgacggcctgaccgccaaggccagcgagaagccccccgagagaaagagaagcgagagagtgagaagagccgagccccccaagcccgaggtggtggacagcaccgagagcatccccgtgagcgacgaggacagcgacgccatggtggacgaccccaacgacgaggacttcgtgcccttcagacccagaagaagccccagaatgagcctgagaagcagcgtgagccagagagccggcagaagcgccgtgggcaccaagatgacctgcgcccactgcagaacccccctgcagaagggccagaccgcctaccagagaaagggcctgccccagctgttctgcagcagcagctgcctgaccaccttcagcaagaagcccagcggcaagaagacctgcaccttctgcaagaaggagatctggaacaccaaggacagcgtggtggcccagaccggcagcggcggcagcttccacgagttctgcaccagcgtgtgcctgagcctgtacgaggcccagcagcagagacccatcccccagagcggcgaccccgccgacgccaccagatgcagcatctgccagaagaccggcgaggtgctgcacgaggtgagcaacggcagcgtggtgcacagactgtgcagcgacagctgcttcagcaagttcagagccaacaagggcctgaagaccaactgctgcgaccagtgcggcgcctacatctacaccaagaccggcagccccggccccgagctgctgttccacgagggccagcagaagagattctgcaacaccacctgcctgggcgcctacaagaagaagaacaccagagtgtacccctgcgtgtggtgcaagaccctgtgcaagaacttcgagatgctgagccacgtggacagaaacggcaagaccagcctgttctgcagcctgtgctgcaccaccagctacaaggtgaagcaggccggcctgaccggcccccccagaccctgcagcttctgcagaagaagcctgagcgacccctgctactacaacaaggtggacagaaccgtgtaccagttctgcagccccagctgctggaccaagttccagagaaccagccccgagggcggcatccacctgagctgccactactgccacagcctgttcagcggcaagcccgaggtgctggactggcaggaccaggtgttccagttctgctgcagagactgctgcgaggacttcaagagactgagaggcgtggtgagccagtgcgagcactgcagacaggagaagctgctgcacgagaagctgagattcagcggcgtggagaagagcttctgcagcgagggctgcgtgctgctgtacaagcaggacttcaccaagaagctgggcctgtgctgcatcacctgcacctactgcagccagacctgccagagaggcgtgaccgagcagctggacggcagcacctgggacttctgcagcgaggactgcaagagcaagtacctgctgtggtactgcaaggccgccagatgccacgcctgcaagagacagggcaagctgctggagaccatccactggagaggccagatcagacacttctgcaaccagcagtgcctgctgagattctacagccagcagaaccagcccaacctggacacccagagcggccccgagagcctgctgaacagccagagccccgagagcaagccccagacccccagccagaccaaggtggagaacagcaacaccgtgagaacccccgaggagaacggcaacctgggcaagatccccgtgaagaccagaagcgcccccaccgcccccacccccccccccccccccccccccgccacccccagaaagaacaaggccgccatgtgcaagcccctgatgcagaacagaggcgtgagctgcaaggtggagatgaagagcaagggcagccagaccgaggagtggaagccccaggtgatcgtgctgcccatccccgtgcccatcttcgtgcccgtgcccatgcacctgtactgccagaaggtgcccgtgcccttcagcatgcccatccccgtgcccgtgcccatgttcctgcccaccaccctggagagcaccgacaagatcgtggagaccatcgaggagctgaaggtgaagatccccagcaaccccctggaggccgacatcctggccatggccgagatgatcgccgaggccgaggagctggacaaggccagcagcgacctgtgcgacctggtgagcaaccagagcgccgagggcctgctggaggactgcgacctgttcggccccgccagagacgacgtgctggccatggccgtgaagatggccaacgtgctggacgagcccggccaggacctggaggccgacttccccaagaaccccctggacatcaaccccagcgtggacttcctgttcgactgcggcctggtgggccccgaggacgtgagcaccgagcaggacctgcccagaaccatgagaaagggccagaagagactggtgctgagcgagagctgcagcagagacagcatgagcagccagcccagctgcaccggcctgaactacagctacggcgtgaacgcctggaagtgctgggtgcagagcaagtacgccaacggcgagaccagcaagggcgacgagctgagattcggccccaagcccatgagaatcaaggaggacatcctggcctgcagcgccgccgagctgaactacggcctggcccagttcgtgagagagatcaccagacccaacggcgagagatacgagcccgacagcatctactacctgtgcctgggcatccagcagtacctgctggagaacaacagaatggtgaacatcttcaccgacctgtactacctgaccttcgtgcaggagctgaacaagagcctgagcacctggcagcccaccctgctgcccaacaacaccgtgttcagcagagtggaggaggagcacctgtgggagtgcaagcagctgggcgtgtacagccccttcgtgctgctgaacaccctgatgttcttcaacaccaagttcttcggcctgcagaccgccgaggagcacatgcagctgagcttcaccaacgtggtgagacagagcagaaagtgcaccacccccagaggcaccaccaaggtggtgagcatcagatactacgcccccgtgagacagagaaagggcagagacaccggccccggcaagagaaagagagaggacgaggcccccatcctggagcagagagagaacagaatgaaccccctgagatgccccgtgaagttctacgagttctacctgagcaagtgccccgagagcctgagaaccagaaacgacgtgttctacctgcagcccgagagaagctgcatcgccgagagccccctgtggtacagcgtgatccccatggacagaagcatgctggagagcatgctgaacagaatcctggccgtgagagagatctacgaggagctgggcagacccggcgaggaggacctggactag

SEQ ID NO: 106351 - DNA, 4113 bp, synthetic construct; identical to SEQ ID NO: 106350
  misc_feature 1..4113: note = Description of Artificial Sequence: Synthetic coding sequence
  source 1..4113: mol_type = other DNA

SEQ ID NO: 106352 - DNA, 1050 bp, synthetic construct
  misc_feature 1..1050: note = Description of Artificial Sequence: Synthetic coding sequence
  source 1..1050: mol_type = other DNA
atggaccccagcgacttccccagccccttcgaccccctgaccctgcccgagaagcccctggccggcgacctgcccgtggacatggagttcggcgaggacctgctggagagccagaccgcccccaccagaggctgggccccccccggccccagccccagcagcggcgccctggacctgctggacacccccgccggcctggagaaggaccccggcgtgctggacggcgccaccgagctgctgggcctgggcggcctgctgtacaaggcccccagcccccccgaggtggaccacggccccgagggcaccctggcctgggacgccggcgaccagaccctggagcccggccccggcggccagacccccgaggtggtgccccccgaccccggcgccggcgccaacagctgcagccccgagggcctgctggagcccctggcccccgacagccccatcaccctgcagagcccccacatcgaggaggaggagaccaccagcatcgccaccgccagaagaggcagccccggccaggaggaggagctgccccagggccagccccagagccccaacgccccccccagccccagcgtgggcgagaccctgggcgacggcatcaacagcagccagaccaagcccggcggcagcagcccccccgcccaccccagcctgcccggcgacggcctgaccgccaaggccagcgagaagccccccgagagagtgcagaagagaagcgagagagtgagaagagccgagccccccaagcccgaggtggtggacagcaccgagagcagaagaagcggcacccccagaaccagactgtggagaagactggtgctggaggcccccagcatgagcagcgcccaccccagcgtgagcccctgcatgagacccagcagcagcgccagaagccccagcctgggcatcccccccaccctgctggccgccgcctacgccagaagactggagagaagctgcaccagaagcgccatggccgcctggtacaccggcagcgccgccatcctggccagccccaacagcggccccaccagagactag

SEQ ID NO: 106353 - DNA, 1488 bp, synthetic construct
  misc_feature 1..1488: note = Description of Artificial Sequence: Synthetic coding sequence
  source 1..1488: mol_type = other DNA
atggaccccagcgacttccccagccccttcgaccccctgaccctgcccgagaagcccctggccggcgacctgcccgtggacatggagttcggcgaggacctgctggagagccagaccgcccccaccagaggctgggccccccccggccccagccccagcagcggcgccctggacctgctggacacccccgccggcctggagaaggaccccggcgtgctggacggcgccaccgagctgctgggcctgggcggcctgctgtacaaggcccccagcccccccgaggtggaccacggccccgagggcaccctggcctgggacgccggcgaccagaccctggagcccggccccggcggccagacccccgaggtggtgccccccgaccccggcgccggcgccaacagctgcagccccgagggcctgctggagcccctggcccccgacagccccatcaccctgcagagcccccacatcgaggaggaggagaccaccagcatcgccaccgccagaagaggcagccccggccaggaggaggagctgccccagggccagccccagagccccaacgccccccccagccccagcgtgggcgagaccctgggcgacggcatcaacagcagccagaccaagcccggcggcagcagcccccccgcccaccccagcctgcccggcgacggcctgaccgccaaggccagcgagaagccccccgagagaaagagaagcgagagagtgagaagagccgagccccccaagcccgaggtggtggacagcaccgagagcatccccgtgagcgacgaggacagcgacgccatggtggacgaccccaacgacgaggacttcgtgcccttcagacccagaagaagccccagaatgagcctgagaagcagcgtgagccagagagccggcagaagcgccgtgggcaccaagatgacctgcgcccactgcagaacccccctgcagaagggccagaccgcctaccagagaaagggcctgccccagctgttctgcagcagcagctgcctgaccaccttcagcaagaagcccagcggcaagaagacctgcaccttctgcaagaaggagatctggaacaccaaggacagcgtggtggcccagaccggcagcggcggcagcttccacgagttctgcaccagcgtgtgcctgagcctgtacgaggcccagcagcagagacccatcccccagagcggcgaccccgccgacgccaccagatgcagcatctgccagaagaccggcgaggtgctgcacgaggtgagcaacggcagcgtggtgcacagactgtgcagcgacagctgcttcagcaagttcagagccaacaagggcctgaagaccaactgctgcgaccagtgcggcgcctacatctacaccaagaccggcagccccggccccgagctgctgttccacgagggccagcagaagagattctgcaacaccacctgcctgggcgcctacaagaaggtgggccccagagagtag

SEQ ID NO: 106354 - DNA, 1494 bp, synthetic construct
  misc_feature 1..1494: note = Description of Artificial Sequence: Synthetic coding sequence
  source 1..1494: mol_type = other DNA
atggaccccagcgacttccccagccccttcgaccccctgaccctgcccgagaagcccctggccggcgacctgcccgtggacatggagttcggcgaggacctgctggagagccagaccgcccccaccagaggctgggccccccccggccccagccccagcagcggcgccctggacctgctggacacccccgccggcctggagaaggaccccggcgtgctggacggcgccaccgagctgctgggcctgggcggcctgctgtacaaggcccccagcccccccgaggtggaccacggccccgagggcaccctggcctgggacgccggcgaccagaccctggagcccggccccggcggccagacccccgaggtggtgccccccgaccccggcgccggcgccaacagctgcagccccgagggcctgctggagcccctggcccccgacagccccatcaccctgcagagcccccacatcgaggaggaggagaccaccagcatcgccaccgccagaagaggcagccccggccaggaggaggagctgccccagggccagccccagagccccaacgccccccccagccccagcgtgggcgagaccctgggcgacggcatcaacagcagccagaccaagcccggcggcagcagcccccccgcccaccccagcctgcccggcgacggcctgaccgccaaggccagcgagaagccccccgagagagtgcagaagagaagcgagagagtgagaagagccgagccccccaagcccgaggtggtggacagcaccgagagcatccccgtgagcgacgaggacagcgacgccatggtggacgaccccaacgacgaggacttcgtgcccttcagacccagaagaagccccagaatgagcctgagaagcagcgtgagccagagagccggcagaagcgccgtgggcaccaagatgacctgcgcccactgcagaacccccctgcagaagggccagaccgcctaccagagaaagggcctgccccagctgttctgcagcagcagctgcctgaccaccttcagcaagaagcccagcggcaagaagacctgcaccttctgcaagaaggagatctggaacaccaaggacagcgtggtggcccagaccggcagcggcggcagcttccacgagttctgcaccagcgtgtgcctgagcctgtacgaggcccagcagcagagacccatcccccagagcggcgaccccgccgacgccaccagatgcagcatctgccagaagaccggcgaggtgctgcacgaggtgagcaacggcagcgtggtgcacagactgtgcagcgacagctgcttcagcaagttcagagccaacaagggcctgaagaccaactgctgcgaccagtgcggcgcctacatctacaccaagaccggcagccccggccccgagctgctgttccacgagggccagcagaagagattctgcaacaccacctgcctgggcgcctacaagaaggtgggccccagagagtag

SEQ ID NO: 106355 - DNA, 3843 bp, synthetic construct
  misc_feature 1..3843: note = Description of Artificial Sequence: Synthetic coding sequence
  source 1..3843: mol_type = other DNA
atggaccccagcgacttccccagccccttcgaccccctgaccctgcccgagaagcccctggccggcgacctgcccgtggacatggagttcggcgaggacctgctggagagccagaccgcccccaccagaggctgggccccccccggccccagccccagcagcggcgccctggacctgctggacacccccgccggcctggagaaggaccccggcgtgctggacggcgccaccgagctgctgggcctgggcggcctgctgtacaaggcccccagcccccccgaggtggaccacggccccgagggcaccctggcctgggacgccggcgaccagaccctggagcccggccccggcggccagacccccgaggtggtgccccccgaccccggcgccggcgccaacagctgcagccccgagggcctgctggagcccctggcccccgacagccccatcaccctgcagagcccccacatcgaggaggaggagaccaccagcatcgccaccgccagaagaggcagccccggccaggaggaggagctgccccagggccagccccagagccccaacgccccccccagccccagcgtgggcgagaccctgggcgacggcatcaacagcagccagaccaagcccggcggcagcagcccccccgcccaccccagcctgcccggcgacggcctgaccgccaaggccagcgagaagccccccgagagagtgcagaagagaagcgagagagtgagaagagccgagccccccaagcccgaggtggtggacagcaccgagagcatccccgtgagcgacgaggacagcgacgccatggtggacgaccccaacgacgaggacttcgtgcccttcagacccagaagaagccccagaatgagcctgagaagcagcgtgagccagagagccggcagaagcgccgtgggcaccaagatgacctgcgcccactgcagaacccccctgcagaagggccagaccgcctaccagagaaagggcctgccccagctgttctgcagcagcagctgcctgaccaccttcagcaagaagcccagcggcaagaagacctgcaccttctgcaagaaggagatctggaacaccaaggacagcgtggtggcccagaccggcagcggcggcagcttccacgagttctgcaccagcgtgtgcctgagcctgtacgaggcccagcagcagagacccatcccccagagcggcgaccccgccgacgccaccagatgcagcatctgccagaagaccggcgaggtgctgcacgaggtgagcaacggcagcgtggtgcacagactgtgcagcgacagctgcttcagcaagttcagagccaacaagggcctgaagaccaactgctgcgaccagtgcggcgcctacatctacaccaagaccggcagccccggccccgagctgctgttccacgagggccagcagaagagattctgcaacaccacctgcctgggcgcctacaagaagaagaacaccagagtgtacccctgcgtgtggtgcaagaccctgtgcaagaacttcgagatgctgagccacgtggacagaaacggcaagaccagcctgttctgcagcctgtgctgcaccaccagctacaaggtgaagcaggccggcctgaccggcccccccagaccctgcagcttctgcagaagaagcctgagcgacccctgctactacaacaaggtggacagaaccgtgtaccagttctgcagccccagctgctggaccaagttccagagaaccagccccgagggcggcatccacctgagctgccactactgccacagcctgttcagcggcaagcccgaggtgctggactggcaggaccaggtgttccagttctgctgcagagactgctgcgaggacttcaagagactgagaggcgtggtgagccagtgcgagcactgcagacaggagaagctgctgcacgagaagctgagattcagcggcgtggagaagagcttctgcagcgagggctgcgtgctgctgtacaagcaggacttcaccaagaagctgggcctgtgctgcatcacctgcacctactgcagccagacctgccagagaggcgtgaccgagcagctggacggcagcacctgggacttctgcagcgaggactgcaagagcaagtacctgctgtggtactgcaaggccgccagatgccacgcctgcaagagacagggcaagctgctggagaccatccactggagaggccagatcagacacttctgcaaccagcagtgcctgctgagattctacagccagcagaaccagcccaacctggacacccagagcggccccgagagcctgctgaacagccagagccccgagagcaagccccagacccccagccagaccaaggtggagaacagcaacaccgtgagaacccccgaggagaacggcaacctgggcaagatccccgtgaagaccagaagcgcccccaccgcccccacccccccccccccccccccccccgccacccccagaaagaacaaggccgccatgtgcaagcccctgatgcagaacagaggcgtgagctgcaaggtggagatgaagagcaagggcagccagaccgaggagtggaagccccaggtgatcgtgctgcccatccccgtgcccatcttcgtgcccgtgcccatgcacctgtactgccagaaggtgcccgtgcccttcagcatgcccatccccgtgcccgtgcccatgttcctgcccaccaccctggagagcaccgacaagatcgtggagaccatcgaggagctgaaggtgaagatccccagcaaccccctggaggccgacatcctggccatggccgagatgatcgccgaggccgaggagctggacaaggccagcagcgacctgtgcgacctggtgagcaaccagagcgccgagggcctgctggaggactgcgacctgttcggccccgccagagacgacgtgctggccatggccgtgaagatggccaacgtgctggacgagcccggccaggacctggaggccgacttccccaagaaccccctggacatcaaccccagcgtggacttcctgttcgactgcggcctggtgggccccgaggacgtgagcaccgagcaggacctgcccagaaccatgagaaagggccagaagagactggtgctgagcgagagctgcagcagagacagcatgagcagccagcccagctgcaccggcctgaactacagctacggcgtgaacgcctggaagtgctgggtgcagagcaagtacgccaacggcgagaccagcaaggccaagcccatgagaatcaaggaggacatcctggcctgcagcgccgccgagctgaactacggcctggcccagttcgtgagagagatcaccagacccaacggcgagagatacgagcccgacagcatctactacctgtgcctgggcatccagcagtacctgctggagaacaacagaatggtgaacatcttcaccgacctgtactacctgaccttcgtgcaggagctgaacaagagcctgagcacctggcagcccaccctgctgcccaacaacaccggccccggcaagagaaagagagaggacgaggcccccatcctggagcagagagagaacagaatgaaccccctgagatgccccgtgaagttctacgagttctacctgagcaagtgccccgagagcctgagaaccagaaacgacgtgttctacctgcagcccgagagaagctgcatcgccgagagccccctgtggtacagcgtgatccccatggacagaagcatgctggagagcatgctgaacagaatcctggccgtgagagagatctacgaggagctgggcagacccggcgaggaggacctggactag

SEQ ID NO: 106356 - DNA, 4119 bp, synthetic construct
  misc_feature 1..4119: note = Description of Artificial Sequence: Synthetic coding sequence
  source 1..4119: mol_type = other DNA
atggaccccagcgacttccccagccccttcgaccccctgaccctgcccgagaagcccctggccggcgacctgcccgtggacatggagttcggcgaggacctgctggagagccagaccgcccccaccagaggctgggccccccccggccccagccccagcagcggcgccctggacctgctggacacccccgccggcctggagaaggaccccggcgtgctggacggcgccaccgagctgctgggcctgggcggcctgctgtacaaggcccccagcccccccgaggtggaccacggccccgagggcaccctggcctgggacgccggcgaccagaccctggagcccggccccggcggccagacccccgaggtggtgccccccgaccccggcgccggcgccaacagctgcagccccgagggcctgctggagcccctggcccccgacagccccatcaccctgcagagcccccacatcgaggaggaggagaccaccagcatcgccaccgccagaagaggcagccccggccaggaggaggagctgccccagggccagccccagagccccaacgccccccccagccccagcgtgggcgagaccctgggcgacggcatcaacagcagccagaccaagcccggcggcagcagcccccccgcccaccccagcctgcccggcgacggcctgaccgccaaggccagcgagaagccccccgagagagtgcagaagagaagcgagagagtgagaagagccgagccccccaagcccgaggtggtggacagcaccgagagcatccccgtgagcgacgaggacagcgacgccatggtggacgaccccaacgacgaggacttcgtgcccttcagacccagaagaagccccagaatgagcctgagaagcagcgtgagccagagagccggcagaagcgccgtgggcaccaagatgacctgcgcccactgcagaacccccctgcagaagggccagaccgcctaccagagaaagggcctgccccagctgttctgcagcagcagctgcctgaccaccttcagcaagaagcccagcggcaagaagacctgcaccttctgcaagaaggagatctggaacaccaaggacagcgtggtggcccagaccggcagcggcggcagcttccacgagttctgcaccagcgtgtgcctgagcctgtacgaggcccagcagcagagacccatcccccagagcggcgaccccgccgacgccaccagatgcagcatctgccagaagaccggcgaggtgctgcacgaggtgagcaacggcagcgtggtgcacagactgtgcagcgacagctgcttcagcaagttcagagccaacaagggcctgaagaccaactgctgcgaccagtgcggcgcctacatctacaccaagaccggcagccccggccccgagctgctgttccacgagggccagcagaagagattctgcaacaccacctgcctgggcgcctacaagaagaagaacaccagagtgtacccctgcgtgtggtgcaagaccctgtgcaagaacttcgagatgctgagccacgtggacagaaacggcaagaccagcctgttctgcagcctgtgctgcaccaccagctacaaggtgaagcaggccggcctgaccggcccccccagaccctgcagcttctgcagaagaagcctgagcgacccctgctactacaacaaggtggacagaaccgtgtaccagttctgcagccccagctgctggaccaagttccagagaaccagccccgagggcggcatccacctgagctgccactactgccacagcctgttcagcggcaagcccgaggtgctggactggcaggaccaggtgttccagttctgctgcagagactgctgcgaggacttcaagagactgagaggcgtggtgagccagtgcgagcactgcagacaggagaagctgctgcacgagaagctgagattcagcggcgtggagaagagcttctgcagcgagggctgcgtgctgctgtacaagcaggacttcaccaagaagctgggcctgtgctgcatcacctgcacctactgcagccagacctgccagagaggcgtgaccgagcagctggacggcagcacctgggacttctgcagcgaggactgcaagagcaagtacctgctgtggtactgcaaggccgccagatgccacgcctgcaagagacagggcaagctgctggagaccatccactggagaggccagatcagacacttctgcaaccagcagtgcctgctgagattctacagccagcagaaccagcccaacctggacacccagagcggccccgagagcctgctgaacagccagagccccgagagcaagccccagacccccagccagaccaaggtggagaacagcaacaccgtgagaacccccgaggagaacggcaacctgggcaagatccccgtgaagaccagaagcgcccccaccgcccccacccccccccccccccccccccccgccacccccagaaagaacaaggccgccatgtgcaagcccctgatgcagaacagaggcgtgagctgcaaggtggagatgaagagcaagggcagccagaccgaggagtggaagccccaggtgatcgtgctgcccatccccgtgcccatcttcgtgcccgtgcccatgcacctgtactgccagaaggtgcccgtgcccttcagcatgcccatccccgtgcccgtgcccatgttcctgcccaccaccctggagagcaccgacaagatcgtggagaccatcgaggagctgaaggtgaagatccccagcaaccccctggaggccgacatcctggccatggccgagatgatcgccgaggccgaggagctggacaaggccagcagcgacctgtgcgacctggtgagcaaccagagcgccgagggcctgctggaggactgcgacctgttcggccccgccagagacgacgtgctggccatggccgtgaagatggccaacgtgctggacgagcccggccaggacctggaggccgacttccccaagaaccccctggacatcaaccccagcgtggacttcctgttcgactgcggcctggtgggccccgaggacgtgagcaccgagcaggacctgcccagaaccatgagaaagggccagaagagactggtgctgagcgagagctgcagcagagacagcatgagcagccagcccagctgcaccggcctgaactacagctacggcgtgaacgcctggaagtgctgggtgcagagcaagtacgccaacggcgagaccagcaagggcgacgagctgagattcggccccaagcccatgagaatcaaggaggacatcctggcctgcagcgccgccgagctgaactacggcctggcccagttcgtgagagagatcaccagacccaacggcgagagatacgagcccgacagcatctactacctgtgcctgggcatccagcagtacctgctggagaacaacagaatggtgaacatcttcaccgacctgtactacctgaccttcgtgcaggagctgaacaagagcctgagcacctggcagcccaccctgctgcccaacaacaccgtgttcagcagagtggaggaggagcacctgtgggagtgcaagcagctgggcgtgtacagccccttcgtgctgctgaacaccctgatgttcttcaacaccaagttcttcggcctgcagaccgccgaggagcacatgcagctgagcttcaccaacgtggtgagacagagcagaaagtgcaccacccccagaggcaccaccaaggtggtgagcatcagatactacgcccccgtgagacagagaaagggcagagacaccggccccggcaagagaaagagagaggacgaggcccccatcctggagcagagagagaacagaatgaaccccctgagatgccccgtgaagttctacgagttctacctgagcaagtgccccgagagcctgagaaccagaaacgacgtgttctacctgcagcccgagagaagctgcatcgccgagagccccctgtggtacagcgtgatccccatggacagaagcatgctggagagcatgctgaacagaatcctggccgtgagagagatctacgaggagctgggcagacccggcgaggaggacctggactag

SEQ ID NO: 106357 - DNA, 4077 bp, synthetic construct
  misc_feature 1..4077: note = Description of Artificial Sequence: Synthetic coding sequence
  source 1..4077: mol_type = other DNA
atggaccccagcgacttccccagccccttcgaccccctgaccctgcccgagaagcccctggccggcgacctgcccgtggacatggagttcggcgaggacctgctggagagccagaccgcccccaccagaggctgggccccccccggccccagccccagcagcggcgccctggacctgctggacacccccgccggcctggagaaggaccccggcgtgctggacggcgccaccgagctgctgggcctgggcggcctgctgtacaaggcccccagcccccccgaggtggaccacggccccgagggcaccctggcctgggacgccggcgaccagaccctggagcccggccccggcggccagacccccgaggtggtgccccccgaccccggcgccggcgccaacagctgcagccccgagggcctgctggagcccctggcccccgacagccccatcaccctgcagagcccccacatcgaggaggaggagaccaccagcatcgccaccgccagaagaggcagccccggccaggaggaggagctgccccagggccagccccagagccccaacgccccccccagccccagcgtgggcgagaccctgggcgacggcatcaacagcagccagaccaagcccggcggcagcagcccccccgcccaccccagcctgcccggcgacggcctgaccgccaaggccagcgagaagccccccgagagaaagagaagcgagagagtgagaagagccgagccccccaagcccgaggtggtggacagcaccgagagcatccccgtgagcgacgaggacagcgacgccatggtggacgaccccaacgacgaggacttcgtgcccttcagacccagaagaagccccagaatgagcctgagaagcagcgtgagccagagagccggcagaagcgccgtgggcaccaagatgacctgcgcccactgcagaacccccctgcagaagggccagaccgcctaccagagaaagggcctgccccagctgttctgcagcagcagctgcctgaccaccttcagcaagaagcccagcggcaagaagacctgcaccttctgcaagaaggagatctggaacaccaaggacagcgtggtggcccagaccggcagcggcggcagcttccacgagttctgcaccagcgtgtgcctgagcctgtacgaggcccagcagcagagacccatcccccagagcggcgaccccgccgacgccaccagatgcagcatctgccagaagaccggcgaggtgctgcacgaggtgagcaacggcagcgtggtgcacagactgtgcagcgacagctgcttcagcaagttcagagccaacaagggcctgaagaccaactgctgcgaccagtgcggcgcctacatctacaccaagaccggcagccccggccccgagctgctgttccacgagggccagcagaagagattctgcaacaccacctgcctgggcgcctacaagaagaagaacaccagagtgtacccctgcgtgtggtgcaagaccctgtgcaagaacttcgagatgctgagccacgtggacagaaacggcaagaccagcctgttctgcagcctgtgctgcaccaccagctacaaggtgaagcaggccggcctgaccggcccccccagaccctgcagcttctgcagaagaagcctgagcgacccctgctactacaacaaggtggacagaaccgtgtaccagttctgcagccccagctgctggaccaagttccagagaaccagccccgagggcggcatccacctgagctgccactactgccacagcctgttcagcggcaagcccgaggtgctggactggcaggaccaggtgttccagttctgctgcagagactgctgcgaggacttcaagagactgagaggcgtggtgagccagtgcgagcactgcagacaggagaagctgctgcacgagaagctgagattcagcggcgtggagaagagcttctgcagcgagggctgcgtgctgctgtacaagcaggacttcaccaagaagctgggcctgtgctgcatcacctgcacctactgcagccagacctgccagagaggcgtgaccgagcagctggacggcagcacctgggacttctgcagcgaggactgcaagagcaagtacctgctgtggtactgcaaggccgccagatgccacgcctgcaagagacagggcaagctgctggagaccatccactggagaggccagatcagacacttctgcaaccagcagtgcctgctgagattctacagccagcagaaccagcccaacctggacacccagagcggccccgagagcctgctgaacagccagagccccgagagcaagccccagacccccagccagaccaaggtggagaacagcaacaccatccccgtgaagaccagaagcgcccccaccgcccccacccccccccccccccccccccccgccacccccagaaagaacaaggccgccatgtgcaagcccctgatgcagaacagaggcgtgagctgcaaggtggagatgaagagcaagggcagccagaccgaggagtggaagccccaggtgatcgtgctgcccatccccgtgcccatcttcgtgcccgtgcccatgcacctgtactgccagaaggtgcccgtgcccttcagcatgcccatccccgtgcccgtgcccatgttcctgcccaccaccctggagagcaccgacaagatcgtggagaccatcgaggagctgaaggtgaagatccccagcaaccccctggaggccgacatcctggccatggccgagatgatcgccgaggccgaggagctggacaaggccagcagcgacctgtgcgacctggtgagcaaccagagcgccgagggcctgctggaggactgcgacctgttcggccccgccagagacgacgtgctggccatggccgtgaagatggccaacgtgctggacgagcccggccaggacctggaggccgacttccccaagaaccccctggacatcaaccccagcgtggacttcctgttcgactgcggcctggtgggccccgaggacgtgagcaccgagcaggacctgcccagaaccatgagaaagggccagaagagactggtgctgagcgagagctgcagcagagacagcatgagcagccagcccagctgcaccggcctgaactacagctacggcgtgaacgcctggaagtgctgggtgcagagcaagtacgccaacggcgagaccagcaagggcgacgagctgagattcggccccaagcccatgagaatcaaggaggacatcctggcctgcagcgccgccgagctgaactacggcctggcccagttcgtgagagagatcaccagacccaacggcgagagatacgagcccgacagcatctactacctgtgcctgggcatccagcagtacctgctggagaacaacagaatggtgaacatcttcaccgacctgtactacctgaccttcgtgcaggagctgaacaagagcctgagcacctggcagcccaccctgctgcccaacaacaccgtgttcagcagagtggaggaggagcacctgtgggagtgcaagcagctgggcgtgtacagccccttcgtgctgctgaacaccctgatgttcttcaacaccaagttcttcggcctgcagaccgccgaggagcacatgcagctgagcttcaccaacgtggtgagacagagcagaaagtgcaccacccccagaggcaccaccaaggtggtgagcatcagatactacgcccccgtgagacagagaaagggcagagacaccggccccggcaagagaaagagagaggacgaggcccccatcctggagcagagagagaacagaatgaaccccctgagatgccccgtgaagttctacgagttctacctgagcaagtgccccgagagcctgagaaccagaaacgacgtgttctacctgcagcccgagagaagctgcatcgccgagagccccctgtggtacagcgtgatccccatggacagaagcatgctggagagcatgctgaacagaatcctggccgtgagagagatctacgaggagctgggcagacccggcgaggaggacctggactag

SEQ ID NO: 106358 - DNA, 2112 bp, synthetic construct; identical to SEQ ID NO: 105642
  misc_feature 1..2112: note = Description of Artificial Sequence: Synthetic coding sequence
  source 1..2112: mol_type = other DNA

SEQ ID NO: 106359 - DNA, 2229 bp, synthetic construct
  misc_feature 1..2229: note = Description of Artificial Sequence: Synthetic coding sequence
  source 1..2229: mol_type = other DNA
atggagttcgtgagcggctacagagacgagttcctggacttcaccgccctgctgttcggctggttcagaaagttcgtggccgagagaggcgccgtgggcaccagcctggagggcagatgcagacagctggaggcccagatcagaagactgccccaggaccccgccctgtgggtgctgcacgtgctgcccaaccacagcgtgggcatcagcctgggccagggcgccgagcccggccccggccccggcctgggcaccgcctggctgctgggcgacaacccccccctgcacctgagagacctgagcccctacatcagcttcgtgagcctggaggacggcgaggagggcgaggaggaggaggaggaggacgaggaggaggagaagagagaggacggcggcgccggcagcaccgagaaggtggagcccgaggaggacagagagctggcccccaccagcagagagagcccccaggagaccaacccccccggcgagagcgaggaggccgccagagaggccggcggcggcaaggacggctgcagagaggacagagtggagaacgagaccagaccccagaagagaaagggccagagaagcgaggccgcccccctgcacgtgagctgcctgctgctggtgaccgacgagcacggcaccatcctgggcatcgacctgctggtggacggcgcccagggcaccgccagctggggcagcggcaccaaggacctggccccctgggcctacgccctgctgtgccacagcatggcctgccccatgggcagcggcgaccccagaaagcccagacagctgaccgtgggcgacgccagactgcacagagagctggagagcctggtgcccagactgggcgtgaagctggccaagacccccatgagaacctggggccccagacccggcttcaccttcgccagcctgagagccagaacctgccacgtgtgccacagacacagcttcgaggccaagctgaccccctgcccccagtgcagcgccgtgctgtactgcggcgaggcctgcctgagagccgactggcagagatgccccgacgacgtgagccacagattctggtgccccagactggccgccttcatggagagagccggcgagctggccaccctgcccttcacctacaccgccgaggtgaccagcgagaccttcaacaaggaggccttcctggccagcagaggcctgaccagaggctactggacccagctgagcatgctgatccccggccccggcttcagcagacaccccagaggcaacacccccagcctgagcctgctgagaggcggcgacccctaccagctgctgcagggcgacggcaccgccctgatgccccccgtgcccccccacccccccagaggcgtgttcggcagctggcaggactactacacctggagaggcctgagcctggacagccccatcgccgtgctgctgacctaccccctgaccgtgtactacgtgatcacccacctggtgccccagagcttccccgagctgaacatccagaacaagcagagcctgaagatccacgtggtggaggccggcaaggagttcgacctggtgatggtgttctgggagctgctggtgctgctgccccacgtggccctggagctgcagttcgtgggcgacggcctgccccccgagagcgacgagcagcacttcaccctgcagagagacagcctggaggtgagcgtgagacccggcagcggcatcagcgccagacccagcagcggcaccaaggagaagggcggcagaagagacctgcagatcaaggtgagcgccagaccctaccacctgttccagggccccaagcccgacctggtgatcggcttcaacagcggcttcgccctgaaggacacctggctgagaagcctgcccagactgcagagcctgagagtgcccgccttcttcaccgagagcagcgagtacagctgcgtgatggacggccagaccatggccgtggccaccggcggcggcaccagccccccccagcccaaccccttcagaagccccttcagactgagagccgccgacaactgcatgagctggtactgcaacgccttcatcttccacctggtgtacaagcccgcccagggcagcggcgccagacccgcccccggcccccccccccccagccccacccccagcgccccccccgcccccaccagaagaagaagaggcgagaagaagcccggcagaggcgccagaagaagaaagtag

SEQ ID NO: 106360 - DNA, 684 bp, synthetic construct
  misc_feature 1..684: note = Description of Artificial Sequence: Synthetic coding sequence
  source 1..684: mol_type = other DNA
atgaccgacttcaagctgggcatcgtgagactgggcagagtggccggcaagaccaagtacaccctgatcgacgagcaggacatccccctggtggagagctacagcttcgaggccagaatggaggtggacgccgacggcaacggcgccaagatcttcgcctacgccttcgacaagaacagaggcagaggcagcggcagactgctgcacgagctgctgtgggagagacacagaggcggcgtggcccccggcttccaggtggtgcacctgaacgccgtgaccgtggacaacagactggacaacctgcagctggtgccctggggctggagacccaaggccgaggagaccagcagcaagcagagagagcagagcctgtactggctggccatccagcagctgcccaccgaccccatcgaggagcagttccccgtgctgaacgtgaccagatactacaacgccaacggcgacgtggtggaggaggaggagaacagctgcacctactacgagtgccactaccccccctgcaccgtgatcgagaagcagctgagagagttcaacatctgcggcagatgccaggtggccagatactgcggcagccagtgccagcagaaggactggcccgcccacaagaagcactgcagagagagaaagagacccttccagcacgagctggagcccgagagatag

SEQ ID NO: 106361 - DNA, 2127 bp, synthetic construct
  misc_feature 1..2127: note = Description of Artificial Sequence: Synthetic coding sequence
  source 1..2127: mol_type = other DNA
atgagcgagagaggcatcaagtgggcctgcgagtactgcacctacgagaactggcccagcgccatcaagtgcaccatgtgcagagcccagagacccagcggcaccatcatcaccgaggaccccttcaagagcggcagcagcgacgtgggcagagactgggaccccagcagcaccgagggcggcagcagccccctgatctgccccgacagcagcgccagacccagagtgaagagcagctacagcatggagaacgccaacaagtggagctgccacatgtgcacctacctgaactggcccagagccatcagatgcacccagtgcctgagccagagaagaaccagaagccccaccgagagcccccagagcagcggcagcggcagcagacccgtggccttcagcgtggacccctgcgaggagtacaacgacagaaacaagctgaacaccagaacccagcactggacctgcagcgtgtgcacctacgagaactgggccaaggccaagagatgcgtggtgtgcgaccaccccagacccaacaacatcgaggccatcgagctggccgagaccgaggaggccagcagcatcatcaacgagcaggacagagccagatggagaggcagctgcagcagcggcaacagccagagaagaagcccccccgccaccaagagagacagcgaggtgaagatggacttccagagaatcgagctggccggcgccgtgggcagcaaggaggagctggaggtggacttcaagaagctgaagcagatcaagaacagaatgaagaagaccgactggctgttcctgaacgcctgcgtgggcgtggtggagggcgacctggccgccatcgaggcctacaagagcagcggcggcgacatcgccagacagctgaccgccgacgaggtgagactgctgaacagacccagcgccttcgacgtgggctacaccctggtgcacctggccatcagattccagagacaggacatgctggccatcctgctgaccgaggtgagccagcaggccgccaagtgcatccccgccatggtgtgccccgagctgaccgagcagatcagaagagagatcgccgccagcctgcaccagagaaagggcgacttcgcctgctacttcctgaccgacctggtgaccttcaccctgcccgccgacatcgaggacctgccccccaccgtgcaggagaagctgttcgacgaggtgctggacagagacgtgcagaaggagctggaggaggagagccccatcatcaactggagcctggagctggccaccagactggacagcagactgtacgccctgtggaacagaaccgccggcgactgcctgctggacagcgtgctgcaggccacctggggcatctacgacaaggacagcgtgctgagaaaggccctgcacgacagcctgcacgactgcagccactggttctacaccagatggaaggactgggagagctggtacagccagagcttcggcctgcacttcagcctgagagaggagcagtggcaggaggactgggccttcatcctgagcctggccagccagcccggcgccagcctggagcagacccacatcttcgtgctggcccacatcctgagaagacccatcatcgtgtacggcgtgaagtactacaagagcttcagaggcgagaccctgggctacaccagattccagggcgtgtacctgcccctgctgtgggagcagagcttctgctggaagagccccatcgccctgggctacaccagaggccacttcagcgccctggtggccatggagaacgacggctacggcaacagaggcgccggcgccaacctgaacaccgacgacgacgtgaccatcaccttcctgcccctggtggacagcgagagaaagctgctgcacgtgcacttcctgagcgcccaggagctgggcaacgaggagcagcaggagaagctgctgagagagtggctggactgctgcgtgaccgagggcggcgtgctggtggccatgcagaagagcagcagaagaagaaaccaccccctggtgacccagatggtggagaagtggctggacagatacagacagatcagaccctgcaccagcctgagcgacggcgaggaggacgaggacgacgaggacgagtag

SEQ ID NO: 106362 - DNA, 2400 bp, synthetic construct
  misc_feature 1..2400: note = Description of Artificial Sequence: Synthetic coding sequence
  source 1..2400: mol_type = other DNA
atggagatccccaagctgctgcccgccagaggcaccctgcagggcggcggcggcggcggcatccccgccggcggcggcagagtgcacagaggccccgacagccccgccggccaggtgcccaccagaagactgctgctgcccagaggcccccaggacggcggccccggcagaagaagagaggaggccagcaccgccagcagaggccccggccccagcctgttcgcccccagaccccaccagcccagcggcggcggcgacgacttcttcctggtgctgctggaccccgtgggcggcgacgtggagaccgccggcagcggccaggccgccggccccgtgctgagagaggaggccaaggccggccccggcctgcagggcgacgagagcggcgccaaccccgccggctgcagcgcccagggcccccactgcctgagcgccgtgcccacccccgcccccatcagcgcccccggccccgccgccgccttcgccggcaccgtgaccatccacaaccaggacctgctgctgagattcgagaacggcgtgctgaccctggccaccccccccccccacgcctgggagcccggcgccgcccccgcccagcagcccagatgcctgatcgccccccaggccggcttcccccaggccgcccaccccggcgactgccccgagctgagaagcgacctgctgctggccgagcccgccgagcccgcccccgcccccgccccccaggaggaggccgagggcctggccgccgccctgggccccagaggcctgctgggcagcggccccggcgtggtgctgtacctgtgccccgaggccctgtgcggccagaccttcgccaagaagcaccagctgaagatgcacctgctgacccacagcagcagccagggccagagacccttcaagtgccccctgggcggctgcggctggaccttcaccaccagctacaagctgaagagacacctgcagagccacgacaagctgagacccttcggctgccccgccgagggctgcggcaagagcttcaccaccgtgtacaacctgaaggcccacatgaagggccacgagcaggagaacagcttcaagtgcgaggtgtgcgaggagagcttccccacccaggccaagctgggcgcccaccagagaagccacttcgagcccgagagaccctaccagtgcgccttcagcggctgcaagaagaccttcatcaccgtgagcgccctgttcagccacaacagagcccacttcagagagcaggagctgttcagctgcagcttccccggctgcagcaagcagtacgacaaggcctgcagactgaagatccacctgagaagccacaccggcgagagacccttcctgtgcgacttcgacggctgcggctggaacttcaccagcatgagcaagctgctgagacacaagagaaagcacgacgacgacagaagattcatgtgccccgtggagggctgcggcaagagcttcaccagagccgagcacctgaagggccacagcatcacccacctgggcaccaagcccttcgtgtgccccgtggccggctgctgcgccagattcagcgccagaagcagcctgtacatccacagcaagaagcacctgcaggacgtggacacctggaagagcagatgccccatcagcagctgcaacaagctgttcaccagcaagcacagcatgaagacccacatggtgaagagacacaaggtgggccaggacctgctggcccagctggaggccgccaacagcctgacccccagcagcgagctgaccagccagagacagaacgacctgagcgacgccgagatcgtgagcctgttcagcgacgtgcccgacagcaccagcgccgccctgctggacaccgccctggtgaacagcggcatcctgaccatcgacgtggccagcgtgagcagcaccctggccggccacctgcccgccaacaacaacaacagcgtgggccaggccgtggacccccccagcctgatggccaccagcgaccccccccagagcctggacaccagcctgttcttcggcaccgccgccaccggcttccagcagagcagcctgaacatggacgaggtgagcagcgtgagcgtgggccccctgggcagcctggacagcctggccatgaagaacagcagccccgagccccaggccctgacccccagcagcaagctgaccgtggacaccgacaccctgacccccagcagcaccctgtgcgagaacagcgtgagcgagctgctgacccccgccaaggccgagtggagcgtgcaccccaacagcgacttcttcggccaggagggcgagacccagttcggcttccccaacgccgccggcaaccacggcagccagaaggagagaaacctgatcaccgtgaccggcagcagcttcctggtgtag

SEQ ID NO: 106363 - DNA, 2412 bp, synthetic construct
  misc_feature 1..2412: note = Description of Artificial Sequence: Synthetic coding sequence
  source 1..2412: mol_type = other DNA
atggagatccccaagctgctgcccgccagaggcaccctgcagggcggcggcggcggcggcatccccgccggcggcggcagagtgcacagaggccccgacagccccgccggccaggtgcccaccagaagactgctgctgctgagaggcccccaggacggcggccccggcagaagaagagaggaggccagcaccgccagcagaggccccggccccagcctgctggcccccagaaccgaccagcccagcggcggcggcggcggcggcggcgacgacttcttcctggtgctgctggaccccgtgggcggcgacgtggagaccgccggcagcggccaggccgccggccccgtgctgagagaggaggccgaggagggccccggcctgcagggcggcgagagcggcgccaaccccgccggccccaccgccctgggccccagatgcctgagcgccgtgcccacccccgcccccatcagcgcccccggccccgccgccgccttcgccggcaccgtgaccatccacaaccaggacctgctgctgagattcgagaacggcgtgctgaccctggccaccccccccccccacgcctgggagcccggcgccgcccccgcccagcagcccggctgcctgatcgccccccaggccggcttcccccacgccgcccaccccggcgactgccccgagctgccccccgacctgctgctggccgagcccgccgagcccgcccccgcccccgcccccgaggaggaggccgagggccccgccgccgccctgggccccagaggccccctgggcagcggccccggcgtggtgctgtacctgtgccccgaggcccagtgcggccagaccttcgccaagaagcaccagctgaaggtgcacctgctgacccacagcagcagccagggccagagacccttcaagtgccccctgggcggctgcggctggaccttcaccaccagctacaagctgaagagacacctgcagagccacgacaagctgagacccttcggctgccccgccgagggctgcggcaagagcttcaccaccgtgtacaacctgaaggcccacatgaagggccacgagcaggagaacagcttcaagtgcgaggtgtgcgaggagagcttccccacccaggccaagctgagcgcccaccagagaagccacttcgagcccgagagaccctaccagtgcgccttcagcggctgcaagaagaccttcatcaccgtgagcgccctgttcagccacaacagagcccacttcagagagcaggagctgttcagctgcagcttccccggctgcagcaagcagtacgacaaggcctgcagactgaagatccacctgagaagccacaccggcgagagacccttcctgtgcgacttcgacggctgcggctggaacttcaccagcatgagcaagctgctgagacacaagagaaagcacgacgacgacagaagattcatgtgccccgtggagggctgcggcaagagcttcaccagagccgagcacctgaagggccacagcatcacccacctgggcaccaagcccttcgtgtgccccgtggccggctgctgcgccagattcagcgccagaagcagcctgtacatccacagcaagaagcacctgcaggacgtggacacctggaagagcagatgccccatcagcagctgcaacaagctgttcaccagcaagcacagcatgaagacccacatggtgaagagacacaaggtgggccaggacctgctggcccagctggaggccgccaacagcctgacccccagcagcgagctgaccagccagagacagaacgacctgagcgacgccgagatcgtgagcctgttcagcgacgtgcccgacagcaccagcgccgccctgctggacaccgccctggtgaacagcggcatcctgaccatcgacgtggccagcgtgagcagcaccctggccggccacctgcccgccaacaacaacaacagcgtgggccaggccgtggacccccccagcctgatggccaccagcgaccccccccagagcctggacaccagcctgttcttcggcaccgccgccaccggcttccagcagagcagcctgaacatggacgaggtgagcagcgtgagcgtgggccccctgggcagcctggacagcctggccatgaagaacagcagccccgagccccaggccctgacccccagcagcaagctgaccgtggacaccgacgccctgacccccagcagcaccctgtgcgagaacagcgtgagcgagctgctgacccccaccaaggccgagtggaacgtgcaccccgacagcgacttcttcggccaggagggcgagacccagttcggcttccccaacgccgccggcaaccacggcagccagaaggagaccgacctgatcaccgtgaccggcagcagcttcctggtgtag

SEQ ID NO: 106364 - DNA, 2622 bp, synthetic construct
  misc_feature 1..2622: note = Description of Artificial Sequence: Synthetic coding sequence
  source 1..2622: mol_type = other DNA
atggccagcagaagaaagagcaccaccccctgcatggtgctggccagcgagcaggaccccgacctggagctgatcagcgacctggacgagggcccccccgtgctgacccccgtggagaacaccagagccgagagcatcagcagcgacgaggaggtgcacgagagcgtggacagcgacaaccagcagaacaagaaggtggagggcggctacgagtgcaagtactgcaccttccagacccccgacctgaacatgttcaccttccacgtggacagcgagcaccccaacgtggtgctgaacagcagctacgtgtgcgtggagtgcaacttcctgaccaagagatacgacgccctgagcgagcacaacctgaagtaccaccccggcgaggagaacttcaagctgaccatggtgaagagaaacaaccagaccatcttcgagcagaccatcaacgacctgaccttcgacggcagcttcgtgaaggaggagaacgccgagcaggccgagagcaccgaggtgagcagcagcggcatcagcatcagcaagacccccatcatgaagatgatgaagaacaaggtggagaacaagagaatcgccgtgcaccacaacagcgtggaggacgtgcccgaggagaaggagaacgagatcaagcccgacagagaggagatcgtggagaaccccagcagcagcgccagcgagagcaacaccagcaccagcatcgtgaacagaatccaccccagcaccgccagcaccgtggtgacccccgccgccgtgctgcccggcctggcccaggtgatcaccgccgtgagcgcccagcagaacagcaacctgatccccaaggtgctgatccccgtgaacagcatccccacctacaacgccgccctggacaacaaccccctgctgctgaacacctacaacaagttcccctaccccaccatgagcgagatcaccgtgctgagcgcccaggccaagtacaccgaggagcagatcaagatctggttcagcgcccagagactgaagcacggcgtgagctggacccccgaggaggtggaggaggccagaagaaagcagttcaacggcaccgtgcacaccgtgccccagaccatcaccgtgatccccacccacatcagcaccggcagcaacggcctgcccagcatcctgcagacctgccagatcgtgggccagcccggcctggtgctgacccaggtggccggcaccaacaccctgcccgtgaccgcccccatcgccctgaccgtggccggcgtgcccagccagaacaacatccagaagagccaggtgcccgccgcccagcccaccgccgagaccaagcccgccaccgccgccgtgcccaccagccagagcgtgaagcacgagaccgccctggtgaaccccgacagcttcggcatcagagccaagaagaccaaggagcagctggccgagctgaaggtgagctacctgaagaaccagttcccccacgacagcgagatcatcagactgatgaagatcaccggcctgaccaagggcgagatcaagaagtggttcagcgacaccagatacaaccagagaaacagcaagagcaaccagtgcctgcacctgaacaacgacagcagcaccaccatcatcatcgacagcagcgacgagaccaccgagagccccaccgtgggcaccgcccagcccaagcagagctggaaccccttccccgacttcaccccccagaagttcaaggagaagaccgccgagcagctgagagtgctgcaggccagcttcctgaacagcagcgtgctgaccgacgaggagctgaacagactgagagcccagaccaagctgaccagaagagagatcgacgcctggttcaccgagaagaagaagagcaaggccctgaaggaggagaagatggagatcgacgagagcaacgccggcagcagcaaggaggaggccggcgagaccagccccgccgacgagagcggcgcccccaagagcggcagcaccggcaagatctgcaagaagacccccgagcagctgcacatgctgaagagcgccttcgtgagaacccagtggcccagccccgaggagtacgacaagctggccaaggagagcggcctggccagaaccgacatcgtgagctggttcggcgacaccagatacgcctggaagaacggcaacctgaagtggtactactactaccagagcgccaacagcagcagcatgaacggcctgagcagcctgagaaagagaggcagaggcagacccaagggcagaggcagaggcagacccagaggcagacccagaggcagcaagagaatcaacaactgggacagaggccccagcctgatcaagttcaagaccggcaccgccatcctgaaggactactacctgaagcacaagttcctgaacgagcaggacctggacgagctggtgaacaagagccacatgggctacgagcaggtgagagagtggttcgccgagagacagagaagaagcgagctgggcatcgagctgttcgaggagaacgaggaggaggacgaggtgatcgacgaccaggaggaggacgaggaggagaccgacgacagcgacacctgggagccccccagacacgtgaagagaaagctgagcaagagcgacgactag

SEQ ID NO: 106365 - DNA, 2622 bp, synthetic construct; identical to SEQ ID NO: 106364
  misc_feature 1..2622: note = Description of Artificial Sequence: Synthetic coding sequence
  source 1..2622: mol_type = other DNA

SEQ ID NO: 106366 - DNA, 2622 bp, synthetic construct; identical to SEQ ID NO: 106364
  misc_feature 1..2622: note = Description of Artificial Sequence: Synthetic coding sequence
  source 1..2622: mol_type = other DNA

SEQ ID NO: 106367 - DNA, 1497 bp, synthetic construct
  misc_feature 1..1497: note = Description of Artificial Sequence: Synthetic coding sequence
  source 1..1497: mol_type = other DNA
atggccagcaagagaaagagcaccaccccctgcatgatccccgtgaagaccgtggtgctgcaggacgccagcatggaggcccagcccgccgagaccctgcccgagggcccccagcaggacctgccccccgaggccagcgccgccagcagcgaggccgcccagaaccccagcagcaccgacggcagcaccctggccaacggccacagaagcaccctggacggctacctgtacagctgcaagtactgcgacttcagaagccacgacatgacccagttcgtgggccacatgaacagcgagcacaccgacttcaacaaggaccccaccttcgtgtgcagcggctgcagcttcctggccaagacccccgagggcctgagcctgcacaacgccacctgccacagcggcgaggccagcttcgtgtggaacgtggccaagcccgacaaccacgtggtggtggagcagagcatccccgagagcaccagcacccccgacctggccggcgagcccagcgccgagggcgccgacggccaggccgagatcatcatcaccaagacccccatcatgaagatcatgaagggcaaggccgaggccaagaagatccacaccctgaaggagaacgtgcccagccagcccgtgggcgaggccctgcccaagctgagcaccggcgagatggaggtgagagagggcgaccacagcttcatcaacggcgccgtgcccgtgagccaggccagcgccagcagcgccaagaacccccacgccgccaacggccccctgatcggcaccgtgcccgtgctgcccgccggcatcgcccagttcctgagcctgcagcagcagccccccgtgcacgcccagcaccacgtgcaccagcccctgcccaccgccaaggccctgcccaaggtgatgatccccctgagcagcatccccacctacaacgccgccatggacagcaacagcttcctgaagaacagcttccacaagttcccctaccccaccaaggccgagctgtgctacctgaccgtggtgaccaagtaccccgaggagcagctgaagatctggttcaccgcccagagactgaagcagggcatcagctggagccccgaggagatcgaggacgccagaaagaagatgttcaacaccgtgatccagagcgtgccccagcccaccatcaccgtgctgaacacccccctggtggccagcgccggcaacgtgcagcacctgatccaggccgccctgcccggccacgtggtgggccagcccgagggcaccggcggcggcctgctggtgacccagcccctgatggccaacggcctgcaggccaccagcagccccctgcccctgaccgtgaccagcgtgcccaagcagcccggcgtggcccccatcaacaccgtgtgcagcaacaccaccagcgccgtgaaggtggtgaacgccgcccagagcctgctgaccgcctgccccagcatcaccagccaggccttcctggacgccagcatctacaagtag

SEQ ID NO: 106368 - DNA, 291 bp, synthetic construct
  misc_feature 1..291: note = Description of Artificial Sequence: Synthetic coding sequence
  source 1..291: mol_type = other DNA
atggccagcaagagaaagagcaccaccccctgcatgatccccgtgaagaccgtggtgctgcaggacgccagcatggaggcccagcccgccgagaccctgcccgagggcccccagcaggacctgccccccgaggccagcgccgccagcagcgaggccgcccagaaccccagcagcaccgacggcagcaccctggccaacggccacagaagcaccctggacggctacctgtacagctgcaagtactgcgacttcagaagccacgacatgacccagttcgtgggccacatgtag

SEQ ID NO: 106369 - DNA, 2244 bp, synthetic construct
  misc_feature 1..2244: note = Description of Artificial Sequence: Synthetic coding sequence
  source 1..2244: mol_type = other DNA
atggaggtgagagagggcgaccacagcttcatcaacggcgccgtgcccgtgagccaggccagcgccagcagcgccaagaacccccacgccgccaacggccccctgatcggcaccgtgcccgtgctgcccgccggcatcgcccagttcctgagcctgcagcagcagccccccgtgcacgcccagcaccacgtgcaccagcccctgcccaccgccaaggccctgcccaaggtgatgatccccctgagcagcatccccacctacaacgccgccatggacagcaacagcttcctgaagaacagcttccacaagttcccctaccccaccaaggccgagctgtgctacctgaccgtggtgaccaagtaccccgaggagcagctgaagatctggttcaccgcccagagactgaagcagggcatcagctggagccccgaggagatcgaggacgccagaaagaagatgttcaacaccgtgatccagagcgtgccccagcccaccatcaccgtgctgaacacccccctggtggccagcgccggcaacgtgcagcacctgatccaggccgccctgcccggccacgtggtgggccagcccgagggcaccggcggcggcctgctggtgacccagcccctgatggccaacggcctgcaggccaccagcagccccctgcccctgaccgtgaccagcgtgcccaagcagcccggcgtggcccccatcaacaccgtgtgcagcaacaccaccagcgccgtgaaggtggtgaacgccgcccagagcctgctgaccgcctgccccagcatcaccagccaggccttcctggacgccagcatctacaagaacaagaagagccacgagcagctgagcgccctgaagggcagcttctgcagaaaccagttccccggccagagcgaggtggagcacctgaccaaggtgaccggcctgagcaccagagaggtgagaaagtggttcagcgacagaagataccactgcagaaacctgaagggcagcagagccatgatccccggcgaccacagcagcatcatcatcgacagcgtgcccgaggtgagcttcagccccagcagcaaggtgcccgaggtgacctgcatccccaccaccgccaccctggccacccaccccagcgccaagagacagagctggcaccagacccccgacttcacccccaccaagtacaaggagagagcccccgagcagctgagagccctggagagcagcttcgcccagaaccccctgcccctggacgaggagctggacagactgagaagcgagaccaagatgaccagaagagagatcgacagctggttcagcgagagaagaaagaaggtgaacgccgaggagaccaagaaggccgaggagaacgccagccaggaggaggaggaggccgccgaggacgagggcggcgaggaggacctggccagcgagctgagagtgagcggcgagaacggcagcctggagatgcccagcagccacatcctggccgagagaaaggtgagccccatcaagatcaacctgaagaacctgagagtgaccgaggccaacggcagaaacgagatccccggcctgggcgcctgcgaccccgaggacgacgagagcaacaagctggccgagcagctgcccggcaaggtgagctgcaagaagaccgcccagcagagacacctgctgagacagctgttcgtgcagacccagtggcccagcaaccaggactacgacagcatcatggcccagaccggcctgcccagacccgaggtggtgagatggttcggcgacagcagatacgccctgaagaacggccagctgaagtggtacgaggactacaagagaggcaacttcccccccggcctgctggtgatcgcccccggcaacagagagctgctgcaggactactacatgacccacaagatgctgtacgaggaggacctgcagaacctgtgcgacaagacccagatgagcagccagcaggtgaagcagtggttcgccgagaagatgggcgaggagaccagagccgtggccgacaccggcagcgaggaccagggccccggcaccggcgagctgaccgccgtgcacaagggcatgggcgacacctacagcgaggtgagcgagaacagcgagagctgggagcccagagtgcccgaggccagcagcgagcccttcgacaccagcagcccccaggccggcagacagctgggcagctggagcctgagcagccagcccctgcccagcctgctgaccctgtag

SEQ ID NO: 106370 - DNA, 2871 bp, synthetic construct
  misc_feature 1..2871: note = Description of Artificial Sequence: Synthetic coding sequence
  source 1..2871: mol_type = other DNA
atggccagcaagagaaagagcaccaccccctgcatgatccccgtgaagaccgtggtgctgcaggacgccagcatggaggcccagcccgccgagaccctgcccgagggcccccagcaggacctgccccccgaggccagcgccgccagcagcgaggccgcccagaaccccagcagcaccgacggcagcaccctggccaacggccacagaagcaccctggacggctacctgtacagctgcaagtactgcgacttcagaagccacgacatgacccagttcgtgggccacatgaacagcgagcacaccgacttcaacaaggaccccaccttcgtgtgcagcggctgcagcttcctggccaagacccccgagggcctgagcctgcacaacgccacctgccacagcggcgaggccagcttcgtgtggaacgtggccaagcccgacaaccacgtggtggtggagcagagcatccccgagagcaccagcacccccgacctggccggcgagcccagcgccgagggcgccgacggccaggccgagatcatcatcaccaagacccccatcatgaagatcatgaagggcaaggccgaggccaagaagatccacaccctgaaggagaacgtgcccagccagcccgtgggcgaggccctgcccaagctgagcaccggcgagatggaggtgagagagggcgaccacagcttcatcaacggcgccgtgcccgtgagccaggccagcgccagcagcgccaagaacccccacgccgccaacggccccctgatcggcaccgtgcccgtgctgcccgccggcatcgcccagttcctgagcctgcagcagcagccccccgtgcacgcccagcaccacgtgcaccagcccctgcccaccgccaaggccctgcccaaggtgatgatccccctgagcagcatccccacctacaacgccgccatggacagcaacagcttcctgaagaacagcttccacaagttcccctaccccaccaaggccgagctgtgctacctgaccgtggtgaccaagtaccccgaggagcagctgaagatctggttcaccgcccagagactgaagcagggcatcagctggagccccgaggagatcgaggacgccagaaagaagatgttcaacaccgtgatccagagcgtgccccagcccaccatcaccgtgctgaacacccccctggtggccagcgccggcaacgtgcagcacctgatccaggccgccctgcccggccacgtggtgggccagcccgagggcaccggcggcggcctgctggtgacccagcccctgatggccaacggcctgcaggccaccagcagccccctgcccctgaccgtgaccagcgtgcccaagcagcccggcgtggcccccatcaacaccgtgtgcagcaacaccaccagcgccgtgaaggtggtgaacgccgcccagagcctgctgaccgcctgccccagcatcaccagccaggccttcctggacgccagcatctacaagaacaagaagagccacgagcagctgagcgccctgaagggcagcttctgcagaaaccagttccccggccagagcgaggtggagcacctgaccaaggtgaccggcctgagcaccagagaggtgagaaagtggttcagcgacagaagataccactgcagaaacctgaagggcagcagagccatgatccccggcgaccacagcagcatcatcatcgacagcgtgcccgaggtgagcttcagccccagcagcaaggtgcccgaggtgacctgcatccccaccaccgccaccctggccacccaccccagcgccaagagacagagctggcaccagacccccgacttcacccccaccaagtacaaggagagagcccccgagcagctgagagccctggagagcagcttcgcccagaaccccctgcccctggacgaggagctggacagactgagaagcgagaccaagatgaccagaagagagatcgacagctggttcagcgagagaagaaagaaggtgaacgccgaggagaccaagaaggccgaggagaacgccagccaggaggaggaggaggccgccgaggacgagggcggcgaggaggacctggccagcgagctgagagtgagcggcgagaacggcagcctggagatgcccagcagccacatcctggccgagagaaaggtgagccccatcaagatcaacctgaagaacctgagagtgaccgaggccaacggcagaaacgagatccccggcctgggcgcctgcgaccccgaggacgacgagagcaacaagctggccgagcagctgcccggcaaggtgagctgcaagaagaccgcccagcagagacacctgctgagacagctgttcgtgcagacccagtggcccagcaaccaggactacgacagcatcatggcccagaccggcctgcccagacccgaggtggtgagatggttcggcgacagcagatacgccctgaagaacggccagctgaagtggtacgaggactacaagagaggcaacttcccccccggcctgctggtgatcgcccccggcaacagagagctgctgcaggactactacatgacccacaagatgctgtacgaggaggacctgcagaacctgtgcgacaagacccagatgagcagccagcaggtgaagcagtggttcgccgagaagatgggcgaggagaccagagccgtggccgacaccggcagcgaggaccagggccccggcaccggcgagctgaccgccgtgcacaagggcatgggcgacacctacagcgaggtgagcgagaacagcgagagctgggagcccagagtgcccgaggccagcagcgagcccttcgacaccagcagcccccaggccggcagacagctggagaccgactag

SEQ ID NO: 106371 - DNA, 141 bp, synthetic construct
  misc_feature 1..141: note = Description of Artificial Sequence: Synthetic coding sequence
  source 1..141: mol_type = other DNA
atggccagcaagagaaagagcaccaccccctgcatgatccccgtgaagaccgtggtgctgcaggacgccagcatggaggcccagcccgccgagaccctgcccgagggcccccagcaggacctgccccccgaggccagctag

SEQ ID NO: 106372 - DNA, 1497 bp, synthetic construct; identical to SEQ ID NO: 106367
  misc_feature 1..1497: note = Description of Artificial Sequence: Synthetic coding sequence
  source 1..1497: mol_type = other DNA

SEQ ID NO: 106373 - DNA, 147 bp, synthetic construct
  misc_feature 1..147: note = Description of Artificial Sequence: Synthetic coding sequence
  source 1..147: mol_type = other DNA
atggccagcaagagaaagagcaccaccccctgcatgatccccgtgaagaccgtggtgctgcaggacgccagcatggaggcccagcccgccgagaccctgcccgagggcccccagcaggacctgccccccgaggccagcgccgcctag

SEQ ID NO: 106374 - DNA, 273 bp, synthetic construct
  misc_feature 1..273: note = Description of Artificial Sequence: Synthetic coding sequence
  source 1..273: mol_type = other DNA
atggccagcaagagaaagagcaccaccccctgcatgatccccgtgaagaccgtggtgctgcaggacgccagcatggaggcccagcccgccgagaccctgcccgagggcccccagcaggacctgccccccgaggccagcgccgccagcagcgaggccgcccagaaccccagcagcaccgacggcagcaccctggccaacggccacagaagcaccctggacggctacctgtacagctgcaagtactgcgacttcagaagccacgacatgacctag

SEQ ID NO: 106375 - DNA, 357 bp, synthetic construct
  misc_feature 1..357: note = Description of Artificial Sequence: Synthetic coding sequence
  source 1..357: mol_type = other DNA
atggccagcaagagaaagagcaccaccccctgcatgatccccgtgaagaccgtggtgctgcaggacgccagcatggaggcccagcccgccgagaccctgcccgagggcccccagcaggacctgccccccgaggccagcgccgccagcagcgaggccgcccagaaccccagcagcaccgacggcagcaccctggccaacggccacagaagcaccctggacggctacctgtacagctgcaagtactgcgacttcagaagccacgacatgacccagttcgtgggccacatgaacagcgagcacaccgacttcaacaaggaccccaccttcgtgtgcagcggctgcagcttcctggcctag

SEQ ID NO: 106376 - DNA, 2871 bp, synthetic construct; identical to SEQ ID NO: 106370
  misc_feature 1..2871: note = Description of Artificial Sequence: Synthetic coding sequence
  source 1..2871: mol_type = other DNA

SEQ ID NO: 106377 - DNA, 2910 bp, synthetic construct
  misc_feature 1..2910: note = Description of Artificial Sequence: Synthetic coding sequence
  source 1..2910: mol_type = other DNA
atggccagcaagagaaagagcaccaccccctgcatgatccccgtgaagaccgtggtgctgcaggacgccagcatggaggcccagcccgccgagaccctgcccgagggcccccagcaggacctgccccccgaggccagcgccgccagcagcgaggccgcccagaaccccagcagcaccgacggcagcaccctggccaacggccacagaagcaccctggacggctacctgtacagctgcaagtactgcgacttcagaagccacgacatgacccagttcgtgggccacatgaacagcgagcacaccgacttcaacaaggaccccaccttcgtgtgcagcggctgcagcttcctggccaagacccccgagggcctgagcctgcacaacgccacctgccacagcggcgaggccagcttcgtgtggaacgtggccaagcccgacaaccacgtggtggtggagcagagcatccccgagagcaccagcacccccgacctggccggcgagcccagcgccgagggcgccgacggccaggccgagatcatcatcaccaagacccccatcatgaagatcatgaagggcaaggccgaggccaagaagatccacaccctgaaggagaacgtgcccagccagcccgtgggcgaggccctgcccaagctgagcaccggcgagatggaggtgagagagggcgaccacagcttcatcaacggcgccgtgcccgtgagccaggccagcgccagcagcgccaagaacccccacgccgccaacggccccctgatcggcaccgtgcccgtgctgcccgccggcatcgcccagttcctgagcctgcagcagcagccccccgtgcacgcccagcaccacgtgcaccagcccctgcccaccgccaaggccctgcccaaggtgatgatccccctgagcagcatccccacctacaacgccgccatggacagcaacagcttcctgaagaacagcttccacaagttcccctaccccaccaaggccgagctgtgctacctgaccgtggtgaccaagtaccccgaggagcagctgaagatctggttcaccgcccagagactgaagcagggcatcagctggagccccgaggagatcgaggacgccagaaagaagatgttcaacaccgtgatccagagcgtgccccagcccaccatcaccgtgctgaacacccccctggtggccagcgccggcaacgtgcagcacctgatccaggccgccctgcccggccacgtggtgggccagcccgagggcaccggcggcggcctgctggtgacccagcccctgatggccaacggcctgcaggccaccagcagccccctgcccctgaccgtgaccagcgtgcccaagcagcccggcgtggcccccatcaacaccgtgtgcagcaacaccaccagcgccgtgaaggtggtgaacgccgcccagagcctgctgaccgcctgccccagcatcaccagccaggccttcctggacgccagcatctacaagaacaagaagagccacgagcagctgagcgccctgaagggcagcttctgcagaaaccagttccccggccagagcgaggtggagcacctgaccaaggtgaccggcctgagcaccagagaggtgagaaagtggttcagcgacagaagataccactgcagaaacctgaagggcagcagagccatgatccccggcgaccacagcagcatcatcatcgacagcgtgcccgaggtgagcttcagccccagcagcaaggtgcccgaggtgacctgcatccccaccaccgccaccctggccacccaccccagcgccaagagacagagctggcaccagacccccgacttcacccccaccaagtacaaggagagagcccccgagcagctgagagccctggagagcagcttcgcccagaaccccctgcccctggacgaggagctggacagactgagaagcgagaccaagatgaccagaagagagatcgacagctggttcagcgagagaagaaagaaggtgaacgccgaggagaccaagaaggccgaggagaacgccagccaggaggaggaggaggccgccgaggacgagggcggcgaggaggacctggccagcgagctgagagtgagcggcgagaacggcagcctggagatgcccagcagccacatcctggccgagagaaaggtgagccccatcaagatcaacctgaagaacctgagagtgaccgaggccaacggcagaaacgagatccccggcctgggcgcctgcgaccccgaggacgacgagagcaacaagctggccgagcagctgcccggcaaggtgagctgcaagaagaccgcccagcagagacacctgctgagacagctgttcgtgcagacccagtggcccagcaaccaggactacgacagcatcatggcccagaccggcctgcccagacccgaggtggtgagatggttcggcgacagcagatacgccctgaagaacggccagctgaagtggtacgaggactacaagagaggcaacttcccccccggcctgctggtgatcgcccccggcaacagagagctgctgcaggactactacatgacccacaagatgctgtacgaggaggacctgcagaacctgtgcgacaagacccagatgagcagccagcagaagcagaccgagttcgacctgatcaacgtgaaggactggcccgtgtgggagaccgcctgccacgtggaggagcccaaccccaccctgtgctgccacatgcccttcccctgccccgccgccggccacctgggcgagctgcccgagagcagccagaccgcccagagcctgcccctgcccagcgcctgccccccccccagcaagcagcaggccagatggggcagccaccagttcttcctgccccagtgcagaaccttccccctgcccagcaacggctag

SEQ ID NO: 106378 - DNA, 948 bp, synthetic construct
  misc_feature 1..948: note = Description of Artificial Sequence: Synthetic coding sequence
  source 1..948: mol_type = other DNA
atggccagcaagagaaagagcaccaccccctgcatgatccccgtgaagaccgtggtgctgcaggacgccagcatggaggcccagcccgccgagaccctgcccgagggcccccagcaggacctgccccccgaggccagcgccgccagcagcgaggccgcccagaaccccagcagcaccgacggcagcaccctggccaacggccacagaagcaccctggacggctacctgtacagctgcaagtactgcgacttcagaagccacgacatgacccagttcgtgggccacatgaacagcgagcacaccgacttcaacaaggaccccaccttcgtgtgcagcggctgcagcttcctggccaagacccccgagggcctgagcctgcacaacgccacctgccacagcggcgaggccagcttcgtgtggaacgtggccaagcccgacaaccacgtggtggtggagcagagcatccccgagagcaccagcacccccgacctggccggcgagcccagcgccgagggcgccgacggccaggccgagatcatcatcaccaagacccccatcatgaagatcatgaagggcaaggccgaggccaagaagatccacaccctgaaggagaacgtgcccagccagcccgtgggcgaggccctgcccaagctgagcaccggcgagatggagaagcagaccgagttcgacctgatcaacgtgaaggactggcccgtgtgggagaccgcctgccacgtggaggagcccaaccccaccctgtgctgccacatgcccttcccctgccccgccgccggccacctgggcgagctgcccgagagcagccagaccgcccagagcctgcccctgcccagcgcctgccccccccccagcaagcagcaggccagatggggcagccaccagttcttcctgccccagtgcagaaccttccccctgcccagcaacggctag

SEQ ID NO: 106379 - DNA, 501 bp, synthetic construct
  misc_feature 1..501: note = Description of Artificial Sequence: Synthetic coding sequence
  source 1..501: mol_type = other DNA
atggccagcaagagaaagagcaccaccccctgcatgatccccgtgaagaccgtggtgctgcaggacgccagcatggaggcccagcccgccgagaccctgcccgagggcccccagcaggacctgccccccgaggccagcgccgccagcagcgaggccgcccagaaccccagcagcaccgacggcagcaccctggccaacggccacagaagcaccctggacggctacctgtacagctgcaagtactgcgacttcagaagccacgacatgacccagttcgtgggccacatgaacagcgagcacaccgacttcaacaaggaccccaccttcgtgtgcagcggctgcagcttcctggccaagacccccgagggcctgagcctgcacaacgccacctgccacagcggcgaggccagcttcgtgtggaacgtggccaagcccgacaaccacgtggtggtggagcagagcatccccgagagcaccagcacccccgacctggccggctag

SEQ ID NO: 106380 - DNA, 2871 bp, synthetic construct; identical to SEQ ID NO: 106370
  misc_feature 1..2871: note = Description of Artificial Sequence: Synthetic coding sequence
  source 1..2871: mol_type = other DNA

SEQ ID NO: 106381 - DNA, 2871 bp, synthetic construct; identical to SEQ ID NO: 106370
  misc_feature 1..2871: note = Description of Artificial Sequence: Synthetic coding sequence
  source 1..2871: mol_type = other DNA

SEQ ID NO: 106382 - DNA, 501 bp, synthetic construct; identical to SEQ ID NO: 106379
  misc_feature 1..501: note = Description of Artificial Sequence: Synthetic coding sequence
  source 1..501: mol_type = other DNA

SEQ ID NO: 106383 - DNA, 1428 bp, synthetic construct
  misc_feature 1..1428: note = Description of Artificial Sequence: Synthetic coding sequence
  source 1..1428: mol_type = other DNA
atgggcatgtgggccagcctggacgccctgtgggagatgcccgccgagaagagaatcttcggcgccgtgctgctgttcagctggaccgtgtacctgtgggagaccttcctggcccagagacagagaagaatctacaagaccaccacccacgtgccccccgagctgggccagatcatggacagcgagaccttcgagaagagcagactgtaccagctggacaagagcaccttcagcttctggagcggcctgtacagcgagaccgagggcaccctgatcctgctgttcggcggcatcccctacctgtggagactgagcggcagattctgcggctacgccggcttcggccccgagtacgagatcacccagagcctggtgttcctgctgctggccaccctgttcagcgccctgaccggcctgccctggagcctgtacaacaccttcgtgatcgaggagaagcacggcttcaaccagcagaccctgggcttcttcatgaaggacgccatcaagaagttcgtggtgacccagtgcatcctgctgcccgtgagcagcctgctgctgtacatcatcaagatcggcggcgactacttcttcatctacgcctggctgttcaccctggtggtgagcctggtgctggtgaccatctacgccgactacatcgcccccctgttcgacaagttcacccccctgcccgagggcaagctgaaggaggagatcgaggtgatggccaagagcatcgacttccccctgaccaaggtgtacgtggtggagggcagcaagagaagcagccacagcaacgcctacttctacggcttcttcaagaacaagagaatcgtgctgttcgacaccctgctggaggagtacagcgtgctgaacaaggacatccaggaggacagcggcatggagcccagaaacgaggaggagggcaacagcgaggagatcaaggccaaggtgaagaacaagaagcagggctgcaagaacgaggaggtgctggccgtgctgggccacgagctgggccactggaagctgggccacaccgtgaagaacatcatcatcagccagatgaacagcttcctgtgcttcttcctgttcgccgtgctgatcggcagaaaggagctgttcgccgccttcggcttctacgacagccagcccaccctgatcggcctgctgatcatcttccagttcatcttcagcccctacaacgaggtgctgagcttctgcctgaccgtgctgagcagaagattcgagttccaggccgacgccttcgccaagaagctgggcaaggccaaggacctgtacagcgccctgatcaagctgaacaaggacaacctgggcttccccgtgagcgactggctgttcagcatgtggcactacagccacccccccctgctggagagactgcaggccctgaagaccatgaagcagcactag

SEQ ID NO: 106384 - DNA, 1017 bp, synthetic construct
  misc_feature 1..1017: note = Description of Artificial Sequence: Synthetic coding sequence
  source 1..1017: mol_type = other DNA
atgatgagaacctgcgtgctgctgagcgccgtgctgtggtgcctgaccggcgtgcagtgccccagattcaccctgttcaacaagaagggcttcatctacggcaagaccggccagcccgacaagatctacgtggagctgcaccagaacagccccgtgctgatctgcatggacttcaagctgagcaagaaggagatcgtggaccccacctacctgtggatcggccccaacgagaagaccctgaccggcaacaacagaatcaacatcaccgagaccggccagctgatggtgaaggacttcctggagcccctgagcggcctgtacacctgcaccctgagctacaagaccgtgaaggccgagacccaggaggagaagaccgtgaagaagagatacgacttcatggtgttcgcctacagagagcccgactacagctaccagatggccgtgagattcaccaccagaagctgcatcggcagatacaacgacgtgttcttcagagtgctgaagaagatcctggacagcctgatcagcgacctgagctgccacgtgatcgagcccagctacaagtgccacagcgtggagatccccgagcacggcctgatccacgagctgttcatcgccttccaggtgaaccccttcgcccccggctggaagggcgcctgcaacggcagcgtggactgcgaggacaccaccaaccacaacatcctgcaggccagagacagaatcgaggacttcttcagaagccaggcctacatcttctaccacaacttcaacaagaccctgcccgccatgcacttcgtggaccacagcctgcaggtggtgagactggacagctgcagacccggcttcggcaagaacgagagactgcacagcaactgcgccagctgctgcgtggtgtgcagccccgccaccttcagccccgacgtgaacgtgacctgccagacctgcgtgagcgtgctgacctacggcgccaagagctgcccccagaccagcaacaagaaccagcagtacgaggactag

SEQ ID NO: 106385 - DNA, 951 bp, synthetic construct
  misc_feature 1..951: note = Description of Artificial Sequence: Synthetic coding sequence
  source 1..951: mol_type = other DNA
atgatgagaacctgcgtgctgctgagcgccgtgctgtggtgcctgaccggcgacaagatctacgtggagctgcaccagaacagccccgtgctgatctgcatggacttcaagctgagcaagaaggagatcgtggaccccacctacctgtggatcggccccaacgagaagaccctgaccggcaacaacagaatcaacatcaccgagaccggccagctgatggtgaaggacttcctggagcccctgagcggcctgtacacctgcaccctgagctacaagaccgtgaaggccgagacccaggaggagaagaccgtgaagaagagatacgacttcatggtgttcgcctacagagagcccgactacagctaccagatggccgtgagattcaccaccagaagctgcatcggcagatacaacgacgtgttcttcagagtgctgaagaagatcctggacagcctgatcagcgacctgagctgccacgtgatcgagcccagctacaagtgccacagcgtggagatccccgagcacggcctgatccacgagctgttcatcgccttccaggtgaaccccttcgcccccggctggaagggcgcctgcaacggcagcgtggactgcgaggacaccaccaaccacaacatcctgcaggccagagacagaatcgaggacttcttcagaagccaggcctacatcttctaccacaacttcaacaagaccctgcccgccatgcacttcgtggaccacagcctgcaggtggtgagactggacagctgcagacccggcttcggcaagaacgagagactgcacagcaactgcgccagctgctgcgtggtgtgcagccccgccaccttcagccccgacgtgaacgtgacctgccagacctgcgtgagcgtgctgacctacggcgccaagagctgcccccagaccagcaacaagaaccagcagtacgaggactag

SEQ ID NO: 106386 - DNA, 1917 bp, synthetic construct
  misc_feature 1..1917: note = Description of Artificial Sequence: Synthetic coding sequence
  source 1..1917: mol_type = other DNA
atggccggcggcagcgccaccacctggggctaccccgtggccctgctgctgctggtggccaccctgggcctgggcagatggctgcagcccgaccccggcctgcccggcctgagacacagctacgactgcggcatcaagggcatgcagctgctggtgttccccagacccggccagaccctgagattcaaggtggtggacgagttcggcaacagattcgacgtgaacaactgcagcatctgctaccactgggtgaccagcagaccccaggagcccgccgtgttcagcgccgactacagaggctgccacgtgctggagaaggacggcagattccacctgagagtgttcatggaggccgtgctgcccaacggcagagtggacgtggcccaggacgccaccctgatctgccccaagcccgaccccagcagaaccctggacagccagctggccccccccgccatgttcagcgtgagcaccccccagaccctgagcttcctgcccaccagcggccacaccagccagggcagcggccacgccttccccagccccctggaccccggccacagcagcgtgcaccccacccccgccctgcccagccccggccccggccccaccctggccaccctggcccagccccactggggcaccctggagcactgggacgtgaacaagagagactacatcggcacccacctgagccaggagcagtgccaggtggccagcggccacctgccctgcatcgtgagaagaaccagcaaggaggcctgccagcaggccggctgctgctacgacaacaccagagaggtgccctgctactacggcaacaccgccaccgtgcagtgcttcagagacggctacttcgtgctggtggtgagccaggagatggccctgacccacagaatcaccctggccaacatccacctggcctacgcccccaccagctgcagccccacccagcacaccgaggccttcgtggtgttctacttccccctgacccactgcggcaccaccatgcaggtggccggcgaccagctgatctacgagaactggctggtgagcggcatccacatccagaagggcccccagggcagcatcaccagagacagcaccttccagctgcacgtgagatgcgtgttcaacgccagcgacttcctgcccatccaggccagcatcttccccccccccagccccgcccccatgacccagcccggccccctgagactggagctgagaatcgccaaggacgagaccttcagcagctactacggcgaggacgactaccccatcgtgagactgctgagagagcccgtgcacgtggaggtgagactgctgcagagaaccgaccccaacctggtgctgctgctgcaccagtgctggggcgcccccagcgccaaccccttccagcagccccagtggcccatcctgagcgacggctgccccttcaagggcgacagctacagaacccagatggtggccctggacggcgccacccccttccagagccactaccagagattcaccgtggccaccttcgccctgctggacagcggcagccagagagccctgagaggcctggtgtacctgttctgcagcaccagcgcctgccacaccagcggcctggagacctgcagcaccgcctgcagcaccggcaccaccagacagagaagaagcagcggccacagaaacgacaccgccagaccccaggacatcgtgagcagccccggccccgtgggcttcgaggacagctacggccaggagcccaccctgggccccaccgacagcaacggcaacagcagcctgagacccctgctgtgggccgtgctgctgctgcccgccgtggccctggtgctgggcttcggcgtgttcgtgggcctgagccagacctgggcccagaagctgtgggagagcaacagacagtag

SEQ ID NO: 106387 - DNA, 993 bp, synthetic construct
  misc_feature 1..993: note = Description of Artificial Sequence: Synthetic coding sequence
  source 1..993: mol_type = other DNA
atggccctgacccacagaatcaccctggccaacatccacctggcctacgcccccaccagctgcagccccacccagcacaccgaggccttcgtggtgttctacttccccctgacccactgcggcaccaccatgcaggtggccggcgaccagctgatctacgagaactggctggtgagcggcatccacatccagaagggcccccagggcagcatcaccagagacagcaccttccagctgcacgtgagatgcgtgttcaacgccagcgacttcctgcccatccaggccagcatcttccccccccccagccccgcccccatgacccagcccggccccctgagactggagctgagaatcgccaaggacgagaccttcagcagctactacggcgaggacgactaccccatcgtgagactgctgagagagcccgtgcacgtggaggtgagactgctgcagagaaccgaccccaacctggtgctgctgctgcaccagtgctggggcgcccccagcgccaaccccttccagcagccccagtggcccatcctgagcgacggctgccccttcaagggcgacagctacagaacccagatggtggccctggacggcgccacccccttccagagccactaccagagattcaccgtggccaccttcgccctgctggacagcggcagccagagagccctgagaggcctggtgtacctgttctgcagcaccagcgcctgccacaccagcggcctggagacctgcagcaccgcctgcagcaccggcaccaccagacagagaagaagcagcggccacagaaacgacaccgccagaccccaggacatcgtgagcagccccggccccgtgggcttcgaggacagctacggccaggagcccaccctgggccccaccgacagcaacggcaacagcagcctgagacccctgctgtgggccgtgctgctgctgcccgccgtggccctggtgctgggcttcggcgtgttcgtggcctag

SEQ ID NO: 106388 - DNA, 1317 bp, synthetic construct
  misc_feature 1..1317: note = Description of Artificial Sequence: Synthetic coding sequence
  source 1..1317: mol_type = other DNA
atgggcagagtggaggacggcggcaccaccgaggagctggaggactgggaccccggcaccagcgccctgcccgcccccggcatcaagcagggccccagagagcagaccggcaccggccccctgagccagaagtgctgggagcccgagcccgacgcccccagccagcccggccccgccctgtggagcagaggcagagccagaacccaggccctggccggcggcagcagcctgcagcagctggaccccgagaacaccggcttcatcggcgccgacaccttcaccggcctggtgcacagccacgagctgcccctggaccccgccaagctggacatgctggtggccctggcccagagcaacgagcagggccaggtgtgctaccaggagctggtggacctgatcagcagcaagagaagcagcagcttcaagagagccatcgccaacggccagagagccctgcccagagacggccccctggacgagcccggcctgggcgtgtacaagagattcgtgagatacgtggcctacgagatcctgccctgcgaggtggacagaagatggtacttctacagacacagaagctgccccccccccgtgttcatggccagcgtgaccctggcccagatcatcgtgttcctgtgctacggcgccagactgaacaagtgggtgctgcagacctaccaccccgagtacatgaagagccccctggtgtaccaccccggccacagagccagagcctggagattcctgacctacatgttcatgcacgtgggcctggagcagctgggcttcaacgccctgctgcagctgatgatcggcgtgcccctggagatggtgcacggcctgctgagaatcagcctgctgtacctggccggcgtgctggccggcagcctgaccgtgagcatcaccgacatgagagcccccgtggtgggcggcagcggcggcgtgtacgccctgtgcagcgcccacctggccaacgtggtgatgaactgggccggcatgagatgcccctacaagctgctgagaatggtgctggccctggtgtgcatgagcagcgaggtgggcagagccgtgtggctgagattcagcccccccctgcccgccagcggcccccagcccagcttcatggcccacctggccggcgccgtggtgggcgtgagcatgggcctgaccatcctgagaagctacgaggagagactgagagaccagtgcggctggtgggtggtgctgctggcctacggcaccttcctgctgttcgccgtgttctggaacgtgttcgcctacgacctgctgggcgcccacatccccccccccccctag

SEQ ID NO: 106389 - DNA, 1122 bp, synthetic construct
  misc_feature 1..1122: note = Description of Artificial Sequence: Synthetic coding sequence
  source 1..1122: mol_type = other DNA
atggtgatggtgagcaaggacctgttcggcaccggcaagctgatcagagccgccgacctgaccctgggccccgaggcctgcgagcccctggtgagcatggacaccgaggacgtggtgagattcgaggtgggcctgcacgagtgcggcaacagcatgcaggtgaccgacgacgccctggtgtacagcaccttcctgctgcacgaccccagacccgtgggcaacctgagcatcgtgagaaccaacagagccgagatccccatcgagtgcagataccccagacagggcaacgtgagcagccaggccatcctgcccacctggctgcccttcagaaccaccgtgttcagcgaggagaagctgaccttcagcctgagactgatggaggagaactggaacgccgagaagagaagccccaccttccacctgggcgacgccgcccacctgcaggccgagatccacaccggcagccacgtgcccctgagactgttcgtggaccactgcgtggccacccccacccccgaccagaacgccagcccctaccacaccatcgtggacttccacggctgcctggtggacggcctgaccgacgccagcagcgccttcaaggtgcccagacccggccccgacaccctgcagttcaccgtggacgtgttccacttcgccaacgacagcagaaacatgatctacatcacctgccacctgaaggtgaccctggccgagcaggaccccgacgagctgaacaaggcctgcagcttcagcaagcccagcaacagctggttccccgtggagggcagcgccgacatctgccagtgctgcaacaagggcgactgcggcacccccagccacagcagaagacagccccacgtgatgagccagtggagcagaagcgccagcagaaacagaagacacgtgaccgaggaggccgacgtgaccgtgggccccctgatcttcctggacagaagaggcgaccacgaggtggagcagtgggccctgcccagcgacaccagcgtggtgctgctgggcgtgggcctggccgtggtggtgagcctgaccctgaccgccgtgatcctggtgctgaccagaagatgcagaaccgccagccaccccgtgagcgccagcgagtag

SEQ ID NO: 106390 - DNA, 1275 bp, synthetic construct
  misc_feature 1..1275: note = Description of Artificial Sequence: Synthetic coding sequence
  source 1..1275: mol_type = other DNA
atggagctgagctacagactgttcatctgcctgctgctgtggggcagcaccgagctgtgctacccccagcccctgtggctgctgcagggcggcgccagccaccccgagaccagcgtgcagcccgtgctggtggagtgccaggaggccaccctgatggtgatggtgagcaaggacctgttcggcaccggcaagctgatcagagccgccgacctgaccctgggccccgaggcctgcgagcccctggtgagcatggacaccgaggacgtggtgagattcgaggtgggcctgcacgagtgcggcaacagcatgcaggtgaccgacgacgccctggtgtacagcaccttcctgctgcacgaccccagacccgtgggcaacctgagcatcgtgagaaccaacagagccgagatccccatcgagtgcagataccccagacagggcaacgtgagcagccaggccatcctgcccacctggctgcccttcagaaccaccgtgttcagcgaggagaagctgaccttcagcctgagactgatggaggagaactggaacgccgagaagagaagccccaccttccacctgggcgacgccgcccacctgcaggccgagatccacaccggcagccacgtgcccctgagactgttcgtggaccactgcgtggccacccccacccccgaccagaacgccagcccctaccacaccatcgtggacttccacggctgcctggtggacggcctgaccgacgccagcagcgccttcaaggtgcccagacccggccccgacaccctgcagttcaccgtggacgtgttccacttcgccaacgacagcagaaacatgatctacatcacctgccacctgaaggtgaccctggccgagcaggaccccgacgagctgaacaaggcctgcagcttcagcaagcccagcaacagctggttccccgtggagggcagcgccgacatctgccagtgctgcaacaagggcgactgcggcacccccagccacagcagaagacagccccacgtgatgagccagtggagcagaagcgccagcagaaacagaagacacgtgaccgaggaggccgacgtgaccgtgggccccctgatcttcctggacagaagaggcgaccacgaggtggagcagtgggccctgcccagcgacaccagcgtggtgctgctgggcgtgggcctggccgtggtggtgagcctgaccctgaccgccgtgatcctggtgctgaccagaagatgcagaaccgccagccaccccgtgagcgccagcgagtag

SEQ ID NO: 106391 - DNA, 1116 bp, synthetic construct
  misc_feature 1..1116: note = Description of Artificial Sequence: Synthetic coding sequence
  source 1..1116: mol_type = other DNA
atggagctgagctacagactgttcatctgcctgctgctgtggggcagcaccgagctgtgctacccccagcccctgtggctgctgcagggcggcgccagccaccccgagaccagcgtgcagcccgtgctggtggagtgccaggaggccaccctgatggtgatggtgagcaaggacctgttcggcaccggcaagctgatcagagccgccgacctgaccctgggccccgaggcctgcgagcccctggtgagcatggacaccgaggacgtggtgagattcgaggtgggcctgcacgagtgcggcaacagcatgcaggtgaccgacgacgccctggtgtacagcaccttcctgctgcacgaccccagacccgtgggcaacctgagcatcgtgagaaccaacagagccgagatccccatcgagtgcagataccccagacagggcaacgtgagcagccaggccatcctgcccacctggctgcccttcagaaccaccgtgttcagcgaggagaagctgaccttcagcctgagactgatggaggagaactggaacgccgagaagagaagccccaccttccacctgggcgacgccgcccacctgcaggccgagatccacaccggcagccacgtgcccctgagactgttcgtggaccactgcgtggccacccccacccccgaccagaacgccagcccctaccacaccatcgtggacttccacggctgcctggtggacggcctgaccgacgccagcagcgccttcaaggtgcccagacccggccccgacaccctgcagttcaccgtggacgtgttccacttcgccaacgacagcagaaacatgatctacatcacctgccacctgaaggtgaccctggccgagcaggaccccgacgagctgaacaaggcctgcagcttcagcaagcccagcaacagctggttccccgtggagggcagcgccgacatctgccagtgctgcaacaagggcgactgcggcacccccagccacagcagaagacagccccacgtgatgagccagtggagcagaagcgccagcagaaacagaagacacgtgaccgaggaggccgacgtgaccgtgggcaccgacctgcccggccaggagggctag

SEQ ID NO: 106392 - DNA, 1623 bp, synthetic construct
  misc_feature 1..1623: note = Description of Artificial Sequence: Synthetic coding sequence
  source 1..1623: mol_type = other DNA
atgtggctgctgagatgcgtgctgctgtgcgtgagcctgagcctggccgtgagcggccagcacaagcccgaggcccccgactacagcagcgtgctgcactgcggcccctggagcttccagttcgccgtgaacctgaaccaggaggccaccagcccccccgtgctgatcgcctgggacaaccagggcctgctgcacgagctgcagaacgacagcgactgcggcacctggatcagaaagggccccggcagcagcgtggtgctggaggccacctacagcagctgctacgtgaccgagtgggacagccactacatcatgcccgtgggcgtggagggcgccggcgccgccgagcacaaggtggtgaccgagagaaagctgctgaagtgccccatggacctgctggccagagacgcccccgacaccgactggtgcgacagcatccccgccagagacagactgccctgcgcccccagccccatcagcagaggcgactgcgagggcctgggctgctgctacagcagcgaggaggtgaacagctgctactacggcaacaccgtgaccctgcactgcaccagagagggccacttcagcatcgccgtgagcagaaacgtgaccagcccccccctgctgctggacagcgtgagactggccctgagaaacgacagcgcctgcaaccccgtgatggccacccaggccttcgtgctgttccagttccccttcaccagctgcggcaccaccagacagatcaccggcgacagagccgtgtacgagaacgagctggtggccaccagagacgtgaagaacggcagcagaggcagcgtgaccagagacagcatcttcagactgcacgtgagctgcagctacagcgtgagcagcaacagcctgcccatcaacgtgcaggtgttcaccctgcccccccccttccccgagacccagcccggccccctgaccctggagctgcagatcgccaaggacaagaactacggcagctactacggcgtgggcgactaccccgtggtgaagctgctgagagaccccatctacgtggaggtgagcatcctgcacagaaccgacccctacctgggcctgctgctgcagcagtgctgggccacccccagcaccgaccccctgagccagccccagtggcccatcctggtgaagggctgcccctacatcggcgacaactaccagacccagctgatccccgtgcagaaggccctggacctgcccttccccagccaccaccagagattcagcatcttcaccttcagcttcgtgaaccccaccgtggagaagcaggccctgagaggccccgtgcacctgcactgcagcgtgagcgtgtgccagcccgccgagacccccagctgcgtggtgacctgccccgacctgagcagaagaagaaacttcgacaacagcagccagaacaccaccgccagcgtgagcagcaagggccccatgatcctgctgcaggccaccaaggacccccccgagaagctgagagtgcccgtggacagcaaggtgctgtgggtggccggcctgagcggcaccctgatcctgggcgccctgctggtgagctacctggccgtgaagaagcagaagagctgccccgaccagatgtgccagtag

SEQ ID NO: 106393 - DNA, 2340 bp, synthetic construct
  misc_feature 1..2340: note = Description of Artificial Sequence: Synthetic coding sequence
  source 1..2340: mol_type = other DNA
atggccagcttcgtgaccgaggtgctggcccacagcggcagactggagaaggaggacctgggcaccagaatcagcagactgaccagaagagtggaggagatcaagggcgaggtgtgcaacatgatcagcaagaagtacagcgagttcctgcccagcatgcagagcgcccagggcctgatcacccaggtggacaagctgagcgaggacatcgacctgctgaagagcagaatcgagagcgaggtgagaagagacctgcacgtgagcaccggcgagttcaccgacctgaagcagcagctggagagagacagcgtggtgctgagcctgctgaagcagctgcaggagttcagcaccgccatcgaggagtacaactgcgccctgaccgagaagaagtacgtgaccggcgcccagagactggaggaggcccagaagtgcctgaagctgctgaagagcagaaagtgcttcgacctgaagatcctgaagagcctgagcatggagctgaccatccagaagcagaacatcctgtaccacctgggcgaggagtggcagaagctgatcgtgtggaagttcccccccagcaaggacaccagcagcctggagagctacctgcagaccgagctgcacctgtacaccgagcagagccacaaggaggagaagacccccatgccccccatcagcagcgtgctgctggccttcagcgtgctgggcgagctgcacagcaagctgaagagcttcggccagatgctgctgaagtacatcctgagacccctggccagctgccccagcctgcacgccgtgatcgagagccagcccaacatcgtgatcatcagattcgagagcatcatgaccaacctggagtaccccagccccagcgaggtgttcaccaagatcagactggtgctggaggtgctgcagaagcagctgctggacctgcccctggacaccgacctggagaacgagaagaccagcaccgtgcccctggccgagatgctgggcgacatgatctgggaggacctgagcgagtgcctgatcaagaactgcctggtgtacagcatccccaccaacagcagcaagctgcagcagtacgaggagatcatccagagcaccgaggagttcgagaacgccctgaaggagatgagattcctgaagggcgacaccaccgacctgctgaagtacgccagaaacatcaacagccacttcgccaacaagaagtgccaggacgtgatcgtggccgccagaaacctgatgaccagcgagatccacaacaccgtgaagatcatccccgacagcaagatcaacgtgcccgagctgcccacccccgacgaggacaacaagctggaggtgcagaaggtgagcaacacccagtaccacgaggtgatgaacctggagcccgagaacaccctggaccagcacagcttcagcctgcccacctgcagaatcagcgagagcgtgaagaagctgatggagctggcctaccagaccctgctggaggccaccaccagcagcgaccagtgcgccgtgcagctgttctacagcgtgagaaacatcttccacctgttccacgacgtggtgcccacctaccacaaggagaacctgcagaagctgccccagctggccgccatccaccacaacaactgcatgtacatcgcccaccacctgctgaccctgggccaccagttcagactgagactggcccccatcctgtgcgacggcaccgccaccttcgtggacctggtgcccggcttcagaagactgggcaccgagtgcttcctggcccagatgagagcccagaagggcgagctgctggagagactgagcagcgccagaaacttcagcaacatggacgacgaggagaactacagcgccgccagcaaggccgtgagacaggtgctgcaccagctgaagagactgggcatcgtgtggcaggacgtgctgcccgtgaacatctactgcaaggccatgggcaccctgctgaacaccgccatcagcgaggtgatcggcaagatcaccgccctggaggacatcagcaccgaggacggcgacagactgtacagcctgtgcaagaccgtgatggacgagggcccccaggtgttcgcccccctgagcgaggagagcaagaacaagaagtaccaggaggaggtgcccgtgtacgtgcccaagtggatgcccttcaaggagctgatgatgatgctgcaggccagcctgcaggagatcggcgacagatgggccgacggcaagggccccctggccgccgccttcagcagcagcgaggtgaaggccctgatcagagccctgttccagaacaccgagagaagagccgccgccctggccaagatcaagtag

SEQ ID NO: 106394 - DNA, 2019 bp, synthetic construct
  misc_feature 1..2019: note = Description of Artificial Sequence: Synthetic coding sequence
  source 1..2019: mol_type = other DNA
atggccagcttcgtgaccgaggtgctggcccacagcggcagactggagaaggaggacctgggcaccagaatcagcagactgaccagaagagtggaggagatcaagggcgaggtgtgcaacatgatcagcaagaagtacagcgagttcctgcccagcatgcagagcgcccagggcctgatcacccaggtggacaagctgagcgaggacatcgacctgctgaagagcagaatcgagagcgaggtgagaagagacctgcacgtgagcaccggcgagttcaccgacctgaagcagcagctggagagagacagcgtggtgctgagcctgctgaagcagctgcaggagttcagcaccgccatcgaggagtacaactgcgccctgaccgagaagaagtacgtgaccggcgcccagagactggaggaggcccagaagtgcctgaagctgctgaagagcagaaagtgcttcgacctgaagatcctgaagagcctgagcatggagctgaccatccagaagcagaacatcctgtaccacctgggcgaggagtggcagaagctgatcgtgtggaagttcccccccagcaaggacaccagcagcctggagagctacctgcagaccgagctgcacctgtacaccgagcagagccacaaggaggagaagacccccatgccccccatcagcagcgtgctgctggccttcagcgtgctgggcgagctgcacagcaagctgaagagcttcggccagatgctgctgaagtacatcctgagacccctggccagctgccccagcctgcacgccgtgatcgagagccagcccaacatcgtgatcatcagattcgagagcatcatgaccaacctggagtaccccagccccagcgaggtgttcaccaagatcagactggtgctggaggtgctgcagaagcagctgctggacctgcccctggacaccgacctggagaacgagaagaccagcaccgtgcccctggccgagatgctgggcgacatgatctgggaggacctgagcgagtgcctgatcaagaactgcctggtgtacagcatccccaccaacagcagcaagctgcagcagtacgaggagatcatccagagcaccgaggagttcgagaacgccctgaaggagatgagattcctgaagggcgacaccaccgacctgctgaagtacgccagaaacatcaacagccacttcgccaacaagaagtgccaggacgtgatcgtggccgccagaaacctgatgaccagcgagatccacaacaccgtgaagatcatccccgacagcaagatcaacgtgcccgagctgcccacccccgacgaggacaacaagctggaggtgcagaaggtgagcaacacccagtaccacgaggtgatgaacctggagcccgagaacaccctggaccagcacagcttcagcctgcccacctgcagaatcagcgagagcgtgaagaagctgatggagctggcctaccagaccctgctggaggccaccaccagcagcgaccagtgcgccgtgcagctgttctacagcgtgagaaacatcttccacctgttccacgacgtggtgcccacctaccacaaggagaacctgcagaagctgccccagctggccgccatccaccacaacaactgcatgtacatcgcccaccacctgctgaccctgggccaccagttcagactgagactggcccccatcctgtgcgacggcaccgccaccttcgtggacctggtgcccggcttcagaagactgggcaccgagtgcttcctggcccagatgagagcccagaagggcgagctgctggagagactgagcagcgccagaaacttcagcaacatggacgacgaggagaactacagcgccgccagcaaggccgtgagacaggtgctgcaccagctgaagagactgggcatcgtgtggcaggacgtgctgcccgtgaacatctactgcaaggccatgggcaccctgctgaacaccgccatcagcgaggtgatcggcaagatcaccgccctggagtag

SEQ ID NO: 106395 - DNA, 1776 bp, synthetic construct
  misc_feature 1..1776: note = Description of Artificial Sequence: Synthetic coding sequence
  source 1..1776: mol_type = other DNA
atgtgggagagactgaactgcgccgccgaggacttctacagcagactgctgcagaagttcaacgaggagaagaagggcatcagaaaggaccccttcctgtacgaggccgacgtgcaggtgcagctgatcagcaagggccagcccaaccccctgaagaacatcctgaacgagaacgacatcgtgttcatcgtggagaaggtgcccctggagaaggaggagaccagccacatcgaggagctgcagagcgaggagaccgccatcagcgacttcagcaccggcgagaacgtgggccccctggccctgcccgtgggcaaggccagacagctgatcggcctgtacaccatggcccacaaccccaacatgacccacctgaagatcaacctgcccgtgaccgccctgccccccctgtgggtgagatgcgacagcagcgaccccgagggcacctgctggctgggcgccgagctgatcaccaccaacaacagcatcaccggcatcgtgctgtacgtggtgagctgcaaggccgacaagaactacagcgtgaacctggagaacctgaagaacctgcacaagaagagacaccacctgagcaccgtgaccagcaagggcttcgcccagtacgagctgttcaagagcagcgccctggacgacaccatcaccgccagccagaccgccatcgccctggacatcagctggagccccgtggacgagatcctgcagatcccccccctgagcagcaccgccaccctgaacatcaaggtggagagcggcgagcccagaggccccctgaaccacctgtacagagagctgaagttcctgctggtgctggccgacggcctgagaaccggcgtgaccgagtggctggagcccctggaggccaagagcgccgtggagctggtgcaggagttcctgaacgacctgaacaagctggacggcttcggcgacagcaccaagaaggacaccgaggtggagaccctgaagcacgacaccgccgccgtggacagaagcgtgaagagactgttcaaggtgagaagcgacctggacttcgccgagcagctgtggtgcaagatgagcagcagcgtgatcagctaccaggacctggtgaagtgcttcaccctgatcatccagagcctgcagagaggcgacatccagccctggctgcacagcggcagcaacagcctgctgagcaagctgatccaccagagctaccacggcaccatggacaccgtgagcctgagcggcaccatccccgtgcagatgctgctggagatcggcctggacaagctgaagaaggactacatcagcttcttcatcggccaggagctggccagcctgaaccacctggagtacttcatcgcccccagcgtggacatccaggagcaggtgtacagagtgcagaagctgcaccacatcctggagatcctggtgagctgcatgcccttcatcaagagccagcacgagctgctgttcagcctgacccagatctgcatcaagtactacaagcagaaccccctggacgagcagcacatcttccagctgcccgtgagacccaccgccgtgaagaacctgtaccagagcgagaagccccagaagtggagagtggagatctacagcggccagaagaagatcaagaccgtgtggcagctgagcgacagcagccccatcgaccacctgaacttccacaagcccgacttcagcgagctgaccctgaacggcagcctggaggagagaatcttcttcaccaacatggtgacctgcagccaggtgcacttcaagtag

SEQ ID NO: 106396 - DNA, 1434 bp, synthetic construct
  misc_feature 1..1434: note = Description of Artificial Sequence: Synthetic coding sequence
  source 1..1434: mol_type = other DNA
atggcccacaaccccaacatgacccacctgaagatcaacctgcccgtgaccgccctgccccccctgtgggtgagatgcgacagcagcgaccccgagggcacctgctggctgggcgccgagctgatcaccaccaacaacagcatcaccggcatcgtgctgtacgtggtgagctgcaaggccgacaagaactacagcgtgaacctggagaacctgaagaacctgcacaagaagagacaccacctgagcaccgtgaccagcaagggcttcgcccagtacgagctgttcaagagcagcgccctggacgacaccatcaccgccagccagaccgccatcgccctggacatcagctggagccccgtggacgagatcctgcagatcccccccctgagcagcaccgccaccctgaacatcaaggtggagagcggcgagcccagaggccccctgaaccacctgtacagagagctgaagttcctgctggtgctggccgacggcctgagaaccggcgtgaccgagtggctggagcccctggaggccaagagcgccgtggagctggtgcaggagttcctgaacgacctgaacaagctggacggcttcggcgacagcaccaagaaggacaccgaggtggagaccctgaagcacgacaccgccgccgtggacagaagcgtgaagagactgttcaaggtgagaagcgacctggacttcgccgagcagctgtggtgcaagatgagcagcagcgtgatcagctaccaggacctggtgaagtgcttcaccctgatcatccagagcctgcagagaggcgacatccagccctggctgcacagcggcagcaacagcctgctgagcaagctgatccaccagagctaccacggcaccatggacaccgtgagcctgagcggcaccatccccgtgcagatgctgctggagatcggcctggacaagctgaagaaggactacatcagcttcttcatcggccaggagctggccagcctgaaccacctggagtacttcatcgcccccagcgtggacatccaggagcaggtgtacagagtgcagaagctgcaccacatcctggagatcctggtgagctgcatgcccttcatcaagagccagcacgagctgctgttcagcctgacccagatctgcatcaagtactacaagcagaaccccctggacgagcagcacatcttccagctgcccgtgagacccaccgccgtgaagaacctgtaccagagcgagaagccccagaagtggagagtggagatctacagcggccagaagaagatcaagaccgtgtggcagctgagcgacagcagccccatcgaccacctgaacttccacaagcccgacttcagcgagctgaccctgaacggcagcctggaggagagaatcttcttcaccaacatggtgacctgcagccaggtgcacttcaagtag

SEQ ID NO: 106397 - DNA, 1434 bp, synthetic construct; identical to SEQ ID NO: 106396
  misc_feature 1..1434: note = Description of Artificial Sequence: Synthetic coding sequence
  source 1..1434: mol_type = other DNA

SEQ ID NO: 106398 - DNA, 1275 bp, synthetic construct
  misc_feature 1..1275: note = Description of Artificial Sequence: Synthetic coding sequence
  source 1..1275: mol_type = other DNA
atggccgccctgggcgacgaggtgctggacggctacgtgttccccgcctgccccccctgcagctacagatacccctaccccgccgccaccaagggcaagggcgccgccggcggcagctggcagcagagaggcagaggctgcctgcccgccagcagcccctgcagcgccggcgccgccagcctgagcttccccggctgcggcagactgaccgccgccgagtacttcgacagctaccagagagagagactgatggccctgctggcccaggtgggccccggcctgggccccagagccagaagagccggcagctgcgacgtggccgtgcaggtgagccccagaatcgacgccgccgtgcagtgcagcctgggcagaagaaccctgcagagaagagccagagaccccgagagccccgccggccccggcgccgagggcaccaccggcggcggcagcttcagccagcagcccagcagaagaggcctggagcagggcagcccccagaacggcgcccccagacccatgagattccccagaaccgtggccgtgtacagccccctggccctgagaagactgaccgccttcctggagggccccggccccgccgccggcgagcagagaagcggcgccagcgacggcgagagaggccccccccccgccagactgcagggccccgaggagggcgaggtgtggaccaagaaggcccccagaagaccccagagcgacgacgacggcgaggcccaggccgccgtgagagccagctgggagcagcccgccgacggccccgagctgccccccagagaggcccaggagggcgaggccgcccccagaagcgccctgagaagccccggccagccccccagcgccggcagagccagagacggcggcgacggcagagaggccgccgtggccggcgagggccccagccccagaagccccgagctgggcaaggagagactgagattccagttcctggagcagaagtacggctactaccactgcaaggactgcaacatcagatgggagagcgcctacgtgtggtgcgtgcagggcaccaacaaggtgtacttcaagcagttctgcagaacctgccagaagagctacaacccctacagagtggaggacatcacctgccagagctgcaagcagaccagatgcagctgccccgtgaagctgagacacgtggaccccaagagaccccacagacaggacctgtgcggcagatgcaagggcaagagactgagctgcgacagcaccttcagcttcaagtacatcatctag

SEQ ID NO: 106399 - DNA, 1719 bp, synthetic construct
  misc_feature 1..1719: note = Description of Artificial Sequence: Synthetic coding sequence
  source 1..1719: mol_type = other DNA
atggccgcccccagacccagccccgccatcagcgtgagcgtgagcgcccccgccttctacgccccccagaagaagttcggccccgtggtggcccccaagcccaaggtgaaccccttcagacccggcgacagcgagcccccccccgcccccggcgcccagagagcccagatgggcagagtgggcgagatccccccccccccccccgaggacttccccctgccccccccccccctggccggcgacggcgacgacgccgagggcgccctgggcggcgccttcccccccccccccccccccatcgaggagagcttcccccccgcccccctggaggaggagatcttccccagccccccccccccccccgaggaggagggcggccccgaggcccccatccccccccccccccagcccagagagaaggtgagcagcatcgacctggagatcgacagcctgagcagcctgctggacgacatgaccaagaacgaccccttcaaggccagagtgagcagcggctacgtgcccccccccgtggccacccccttcagcagcaagagcagcaccaagcccgccgccggcggcaccgcccccctgcccccctggaagagccccagcagcagccagcccctgccccaggtgcccgcccccgcccagagccagacccagttccacgtgcagccccagccccagcccaagccccaggtgcagctgcacgtgcagagccagacccagcccgtgagcctggccaacacccagcccagaggcccccccgccagcagccccgcccccgcccccaagttcagccccgtgacccccaagttcacccccgtggccagcaagttcagccccggcgcccccggcggcagcggcagccagcccaaccagaagctgggccaccccgaggccctgagcgccggcaccggcagcccccagccccccagcttcacctacgcccagcagagagagaagcccagagtgcaggagaagcagcaccccgtgcccccccccgcccagaaccagaaccaggtgagaagccccggcgcccccggccccctgaccctgaaggaggtggaggagctggagcagctgacccagcagctgatgcaggacatggagcacccccagagacagaacgtggccgtgaacgagctgtgcggcagatgccaccagcccctggccagagcccagcccgccgtgagagccctgggccagctgttccacatcgcctgcttcacctgccaccagtgcgcccagcagctgcagggccagcagttctacagcctggagggcgccccctactgcgagggctgctacaccgacaccctggagaagtgcaacacctgcggcgagcccatcaccgacagaatgctgagagccaccggcaaggcctaccacccccactgcttcacctgcgtggtgtgcgccagacccctggagggcaccagcttcatcgtggaccaggccaacagaccccactgcgtgcccgactaccacaagcagtacgcccccagatgcagcgtgtgcagcgagcccatcatgcccgagcccggcagagacgagaccgtgagagtggtggccctggacaagaacttccacatgaagtgctacaagtgcgaggactgcggcaagcccctgagcatcgaggccgacgacaacggctgcttccccctggacggccacgtgctgtgcagaaagtgccacaccgccagagcccagacctag

SEQ ID NO: 106400 - DNA, 1623 bp, synthetic construct
  misc_feature 1..1623: note = Description of Artificial Sequence: Synthetic coding sequence
  source 1..1623: mol_type = other DNA
gccgcccccagacccagccccgccatcagcgtgagcgtgagcgcccccgccttctacgccccccagaagaagttcggccccgtggtggcccccaagcccaaggtgaaccccttcagacccggcgacagcgagcccccccccgcccccggcgcccagagagcccagatgggcagagtgggcgagatccccccccccccccccgaggacttccccctgccccccccccccctggccggcgacggcgacgacgccgagggcgccctgggcggcgccttcccccccccccccccccccatcgaggagagcttcccccccgcccccctggaggaggagatcttccccagccccccccccccccccgaggaggagggcggccccgaggcccccatccccccccccccccaggtgagcagcggctacgtgcccccccccgtggccacccccttcagcagcaagagcagcaccaagcccgccgccggcggcaccgcccccctgcccccctggaagagccccagcagcagccagcccctgccccaggtgcccgcccccgcccagagccagacccagttccacgtgcagccccagccccagcccaagccccaggtgcagctgcacgtgcagagccagacccagcccgtgagcctggccaacacccagcccagaggcccccccgccagcagccccgcccccgcccccaagttcagccccgtgacccccaagttcacccccgtggccagcaagttcagccccggcgcccccggcggcagcggcagccagcccaaccagaagctgggccaccccgaggccctgagcgccggcaccggcagcccccagccccccagcttcacctacgcccagcagagagagaagcccagagtgcaggagaagcagcaccccgtgcccccccccgcccagaaccagaaccaggtgagaagccccggcgcccccggccccctgaccctgaaggaggtggaggagctggagcagctgacccagcagctgatgcaggacatggagcacccccagagacagaacgtggccgtgaacgagctgtgcggcagatgccaccagcccctggccagagcccagcccgccgtgagagccctgggccagctgttccacatcgcctgcttcacctgccaccagtgcgcccagcagctgcagggccagcagttctacagcctggagggcgccccctactgcgagggctgctacaccgacaccctggagaagtgcaacacctgcggcgagcccatcaccgacagaatgctgagagccaccggcaaggcctaccacccccactgcttcacctgcgtggtgtgcgccagacccctggagggcaccagcttcatcgtggaccaggccaacagaccccactgcgtgcccgactaccacaagcagtacgcccccagatgcagcgtgtgcagcgagcccatcatgcccgagcccggcagagacgagaccgtgagagtggtggccctggacaagaacttccacatgaagtgctacaagtgcgaggactgcggcaagcccctgagcatcgaggccgacgacaacggctgcttccccctggacggccacgtgctgtgcagaaagtgccacaccgccagagcccagacctag

SEQ ID NO: 106401 - DNA, 1248 bp, synthetic construct
  misc_feature 1..1248: note = Description of Artificial Sequence: Synthetic coding sequence
  source 1..1248: mol_type = other DNA
atgaccaagaacgaccccttcaaggccagagtgagcagcggctacgtgcccccccccgtggccacccccttcagcagcaagagcagcaccaagcccgccgccggcggcaccgcccccctgcccccctggaagagccccagcagcagccagcccctgccccaggtgcccgcccccgcccagagccagacccagttccacgtgcagccccagccccagcccaagccccaggtgcagctgcacgtgcagagccagacccagcccgtgagcctggccaacacccagcccagaggcccccccgccagcagccccgcccccgcccccaagttcagccccgtgacccccaagttcacccccgtggccagcaagttcagccccggcgcccccggcggcagcggcagccagcccaaccagaagctgggccaccccgaggccctgagcgccggcaccggcagcccccagccccccagcttcacctacgcccagcagagagagaagcccagagtgcaggagaagcagcaccccgtgcccccccccgcccagaaccagaaccaggtgagaagccccggcgcccccggccccctgaccctgaaggaggtggaggagctggagcagctgacccagcagctgatgcaggacatggagcacccccagagacagaacgtggccgtgaacgagctgtgcggcagatgccaccagcccctggccagagcccagcccgccgtgagagccctgggccagctgttccacatcgcctgcttcacctgccaccagtgcgcccagcagctgcagggccagcagttctacagcctggagggcgccccctactgcgagggctgctacaccgacaccctggagaagtgcaacacctgcggcgagcccatcaccgacagaatgctgagagccaccggcaaggcctaccacccccactgcttcacctgcgtggtgtgcgccagacccctggagggcaccagcttcatcgtggaccaggccaacagaccccactgcgtgcccgactaccacaagcagtacgcccccagatgcagcgtgtgcagcgagcccatcatgcccgagcccggcagagacgagaccgtgagagtggtggccctggacaagaacttccacatgaagtgctacaagtgcgaggactgcggcaagcccctgagcatcgaggccgacgacaacggctgcttccccctggacggccacgtgctgtgcagaaagtgccacaccgccagagcccagacctag

SEQ ID NO: 106402 - DNA, 1458 bp, synthetic construct
  misc_feature 1..1458: note = Description of Artificial Sequence: Synthetic coding sequence
  source 1..1458: mol_type = other DNA
atgggcagagtgggcgagatccccccccccccccccgaggacttccccctgccccccccccccctggccggcgacggcgacgacgccgagggcgccctgggcggcgccttcccccccccccccccccccatcgaggagagcttcccccccgcccccctggaggaggagatcttccccagccccccccccccccccgaggaggagggcggccccgaggcccccatccccccccccccccaggtgagcagcggctacgtgcccccccccgtggccacccccttcagcagcaagagcagcaccaagcccgccgccggcggcaccgcccccctgcccccctggaagagccccagcagcagccagcccctgccccaggtgcccgcccccgcccagagccagacccagttccacgtgcagccccagccccagcccaagccccaggtgcagctgcacgtgcagagccagacccagcccgtgagcctggccaacacccagcccagaggcccccccgccagcagccccgcccccgcccccaagttcagccccgtgacccccaagttcacccccgtggccagcaagttcagccccggcgcccccggcggcagcggcagccagcccaaccagaagctgggccaccccgaggccctgagcgccggcaccggcagcccccagccccccagcttcacctacgcccagcagagagagaagcccagagtgcaggagaagcagcaccccgtgcccccccccgcccagaaccagaaccaggtgagaagccccggcgcccccggccccctgaccctgaaggaggtggaggagctggagcagctgacccagcagctgatgcaggacatggagcacccccagagacagaacgtggccgtgaacgagctgtgcggcagatgccaccagcccctggccagagcccagcccgccgtgagagccctgggccagctgttccacatcgcctgcttcacctgccaccagtgcgcccagcagctgcagggccagcagttctacagcctggagggcgccccctactgcgagggctgctacaccgacaccctggagaagtgcaacacctgcggcgagcccatcaccgacagaatgctgagagccaccggcaaggcctaccacccccactgcttcacctgcgtggtgtgcgccagacccctggagggcaccagcttcatcgtggaccaggccaacagaccccactgcgtgcccgactaccacaagcagtacgcccccagatgcagcgtgtgcagcgagcccatcatgcccgagcccggcagagacgagaccgtgagagtggtggccctggacaagaacttccacatgaagtgctacaagtgcgaggactgcggcaagcccctgagcatcgaggccgacgacaacggctgcttccccctggacggccacgtgctgtgcagaaagtgccacaccgccagagcccagacctag

SEQ ID NO: 106403 - DNA, 495 bp, synthetic construct
  misc_feature 1..495: note = Description of Artificial Sequence: Synthetic coding sequence
  source 1..495: mol_type = other DNA
atggccgcccccagacccagccccgccatcagcgtgagcgtgagcgcccccgccttctacgccccccagaagaagttcggccccgtggtggcccccaagcccaaggtgaaccccttcagacccggcgacagcgagcccccccccgcccccggcgcccagagagcccagatgggcagagtgggcgagatccccccccccccccccgaggacttccccctgccccccccccccctggccggcgacggcgacgacgccgagggcgccctgggcggcgccttcccccccccccccccccccatcgaggagagcttcccccccgcccccctggaggaggagatcttccccagccccccccccccccccgaggaggagggcggccccgaggcccccatccccccccccccccagcccagagagaaggtgagcagcatcgacctggagatcgacagcctgagcagcctgctggacgacatgaccaagaacgaccccttctag

SEQ ID NO: 106404 - DNA, 852 bp, synthetic construct
  misc_feature 1..852: note = Description of Artificial Sequence: Synthetic coding sequence
  source 1..852: mol_type = other DNA
atggatctgtggccgggcgcctggatgctgctcttactcttgttccttctgctcctttttctcctgcccactctgtggttctgctcaccctccgcaaaatacttttttaaaatggctttttacaatggctggatcctatttctggctgttctggctatccccgtgtgtgcggtgagaggcaggaatgtggaaaatatgaagattctcaggctcatgctgctgcacatcaagtatctttacggcattagggtcgaggtgcgcggggcgcatcactttccaccctctcagccatatgtagtagtatctaatcaccagagctccctcgacctgctgggcatgatggaggttcttccagggcggtgtgtgccgatcgccaaaagagagcttctgtgggctgggagtgcaggcctggcctgctggctggcgggcgtgatctttatcgaccgcaaacggacaggcgatgccatcagcgtgatgtcagaggttgcccagacactacttacccaggacgtgcgcgtgtgggtcttccctgaaggcacaagaaatcataacggctctatgcttcccttcaagcgcggggcctttcacctggccgtgcaagcacaggtgcccattgtgcctatcgttatgtcctcatatcaggacttctactgcaaaaaggagcgcagattcacatccggccagtgtcaggtccgtgttttgcccccggtgccaactgaaggcctgactccagacgacgtacccgcactggccgaccgcgtaaggcattcaatgctgacagtgttccgtgaaatctccactgatggacgtgggggaggagactatctcaagaagccaggcggcggcggctag

SEQ ID NO: 106405 - DNA, 852 bp, synthetic construct
  misc_feature 1..852: note = Description of Artificial Sequence: Synthetic coding sequence
  source 1..852: mol_type = other DNA
atggatttgtggccaggcgcttggatgttacttttgttactgtttcttctgctgttattccttttgccaaccctatggttttgtagcccttctgcaaaatacttctttaaaatggcattctacaatgggtggatcctgttcctcgcggtgctggccattccagtgtgcgctgtacgggggcggaacgtagagaatatgaagattctgcggctgatgctgctgcatatcaagtacctttatggaattcgggtggaggtgcgaggcgcacaccatttcccaccttcccagccttatgtagtggtgagcaatcatcaatccagcctggacctgctgggcatgatggaggtgctgccaggccggtgcgtgcctattgctaagagagagcttctctgggcaggaagcgccgggctggcatgctggttggctggagttatttttattgatagaaaacgtactggcgatgccatctctgtcatgagcgaagtggcccagacccttctgacacaggatgtgagggtctgggtgtttcccgaaggcactagaaatcataacggcagtatgttacctttcaaaagaggcgcctttcatctcgctgtgcaggcacaagtgcctatcgtgcccattgtgatgtcgtcataccaggacttttactgcaagaaggaaaggagatttactagtgggcagtgccaggtgagggtcctgccaccagtgcctaccgagggcctgactcctgatgacgtgccagcgctggccgacagagtgagacacagcatgctcacggtgtttcgggagatatcaacggacggcagggggggaggggactaccttaaaaaacctggaggcgggggttag

SEQ ID NO: 106406 - DNA, 852 bp, synthetic construct
  misc_feature 1..852: note = Description of Artificial Sequence: Synthetic coding sequence
  source 1..852: mol_type = other DNA
atggatctgtggcctggtgcttggatgcttttacttctgctttttctgcttctccttttcctacttccaactctctggttttgttcccccagtgcaaaatactttttcaagatggccttttataacggttggatcttattccttgcagtcctggccatcccagtgtgtgcggtgcggggtcgcaacgtagagaacatgaagatactacggttgatgctgctgcatatcaaatatctgtacggtataagggtggaggttaggggggcccatcatttccccccttctcagccgtatgttgtggtttctaatcatcaatccagtcttgatctcctggggatgatggaagttctcccgggtcggtgtgtgccgattgccaagcgggagctgctttgggcaggatccgccggactggcttgttggctggctggggtgatcttcatcgaccggaagagaacaggcgacgctattagtgtgatgagcgaagtggcccagacactgctgacccaggatgtgcgtgtgtgggtttttcccgaaggcacccgaaaccataacggatccatgctaccatttaagcggggggcatttcacctggctgttcaagctcaggttcctatcgttccgatcgtaatgtccagttaccaagacttttactgtaagaaggaacggcggtttacgtcaggacagtgccaggtccgcgtactcccacccgtccctaccgagggactgaccccggatgacgtgccggcactggcagaccgcgttcgtcacagcatgctgaccgtcttccgagagatcagcaccgacgggcggggcgggggtgattacttaaagaaacctggcgggggaggctag

SEQ ID NO: 106407 - DNA, 852 bp, synthetic construct
  misc_feature 1..852: note = Description of Artificial Sequence: Synthetic coding sequence
  source 1..852: mol_type = other DNA
atggacctgtggcccggagcatggatgctgttactcctcctcttccttctgttgctcttccttttgcctacgctgtggttctgtagtccatcagccaagtacttcttcaaaatggctttttacaacgggtggattttgtttctcgcggtcctcgcaattcctgtgtgcgcggtaaggggtaggaacgtggaaaatatgaaaatcctccgactcatgttactgcatatcaagtacctgtacggcattagagttgaggtccgaggtgctcaccacttcccgccctcacagccctacgtcgtagtaagtaaccaccagagcagcctggatttactcggcatgatggaagtgctgcctggacggtgtgtccctatcgcaaaaagggagcttctgtgggcaggttccgcaggcttagcctgttggctggccggagtgatatttatcgaccgtaaacgtactggagacgcaatcagcgtcatgagtgaggtcgcccagacgctcttgacacaagatgttcgggtgtgggtgtttccagagggcactaggaatcacaacggaagcatgttacctttcaaacgtggcgccttccacctcgcggttcaggcgcaggtcccaatcgtgcctatcgtgatgagcagttaccaggatttttactgcaagaaagagcgcaggtttaccagcggtcagtgccaggtcagggttctgccccctgtaccaactgagggcctgacccccgatgacgttcccgctctggccgaccgggtgcgccactcaatgctgaccgtgtttagagaaatctccaccgatggaaggggcggcggtgactatcttaagaagcccggcggcgggggctag

SEQ ID NO: 106408 - DNA, 852 bp, synthetic construct
  misc_feature 1..852: note = Description of Artificial Sequence: Synthetic coding sequence
  source 1..852: mol_type = other DNA
atggacctgtggcccggggcttggatgctcttgttactgctgtttctcttgctcttatttctcctcccaaccctctggttttgttccccttctgccaaatacttttttaagatggccttctacaacggctggatcctatttctggccgtgctcgcaatccccgtgtgcgcagtccgagggaggaacgtcgagaatatgaaaatcctacgcctcatgctgctccatatcaagtacctctacggaattagagttgaggtacgaggtgcacatcatttccccccctcccagccttatgttgtggtgagtaaccatcaatccagtcttgacttactcgggatgatggaagtgctgccgggtaggtgtgtgcccattgctaaaagagaacttctgtgggctggaagtgctgggctggcatgttggctggctggcgtcattttcattgataggaagcgaactggcgatgcaattagcgtgatgagtgaagtggctcagactctactcacacaggacgtaagggtgtgggtgtttccagaaggaactcggaatcacaatggctccatgctgcctttcaagagaggtgctttccatttggctgttcaggcgcaggtgccaatcgtgccaatagttatgtcatcctatcaggacttctattgcaaaaaggaacgtaggttcacctccggacagtgtcaggtccgcgtcctcccaccggtccctactgaggggctcactcctgatgatgtgcccgccctggccgaccgagtgaggcatagcatgttaaccgtgttccgcgaaatctcaacagacggacgcggggggggggactatctgaagaaaccaggaggcggtggatag

SEQ ID NO: 106409 - DNA, 852 bp, synthetic construct
  misc_feature 1..852: note = Description of Artificial Sequence: Synthetic coding sequence
  source 1..852: mol_type = other DNA
atggatttgtggcctggggcatggatgctgctgcttctgctttttctgctgctgctgttcttgctgccgacgttatggttctgtagccccagtgccaaatactttttcaaaatggccttctataacggctggatactttttctggccgttttggcgatcccagtctgtgcggttagggggcgtaacgtagagaatatgaagatactccgcctaatgctgctacacattaagtacttatacggaatccgggttgaggttaggggtgcccatcacttcccgccgagtcaaccatacgtggttgtgagcaatcatcagagctccctggatttactggggatgatggaggtgctgccaggacgatgcgtgcctattgctaaacgagaactgctctgggccggcagcgctggccttgcttgctggctggccggcgtaatttttatcgaccgaaagaggaccggggacgctatctcggtgatgagtgaagtggcccagactctgctgacgcaagacgttcgcgtgtgggtgtttcccgagggcactcgaaatcacaatgggagcatgctgcccttcaagaggggggctttccacctggcagtccaggcacaggttcccatcgttcctattgtgatgtctagctatcaggatttctactgcaagaaagagcgccgatttacaagcggccagtgtcaggtgcgcgtcttgcccccagttccaaccgagggacttacaccagatgacgtgccagcgttagccgaccgtgttaggcactcgatgttgaccgtcttcagggagatctctacggacggacgcggcgggggagactacctcaagaaacccggaggaggtggctag

SEQ ID NO: 106410 - DNA, 852 bp, synthetic construct
  misc_feature 1..852: note = Description of Artificial Sequence: Synthetic coding sequence
  source 1..852: mol_type = other DNA
atggacctctggcctggcgcatggatgctgctacttctgctctttctcttgctgctgttcctcctccctactctgtggttctgcagtcccagcgctaagtactttttcaagatggcattctataatgggtggattctctttctggccgtactggcaattccggtgtgcgccgtccggggcaggaatgtagaaaacatgaaaatcttgaggcttatgctgctgcatataaagtatctgtacggtattagggtcgaagtcaggggcgcacatcactttccacccagccagccctacgtagttgttagcaaccatcagtcctccctggatcttctgggcatgatggaagtcctgcctggtcgatgcgtccccattgccaaaagagaattgctgtgggctgggagtgccgggctggcttgctggttggcgggagtgattttcatcgatagaaaaagaaccggcgatgccatctcggtcatgtctgaggttgcccagaccctgttgacgcaagacgtgcgcgtctgggttttcccagaaggaacaaggaaccacaacggctccatgcttccttttaagagaggcgcctttcatctggcagtccaggcacaggtgcctattgtgcccatcgtgatgagctcctaccaggacttctactgcaagaaagagaggcggttcaccagcgggcagtgccaggttagggtactgccccccgtgcccactgaagggctgacccctgacgatgttcccgccctcgccgatagggtaagacactccatgcttaccgtgtttagagaaatttctactgatggccgggggggaggggactacttgaagaagccagggggcggcggttag

SEQ ID NO: 106411 - DNA, 852 bp, synthetic construct
  misc_feature 1..852: note = Description of Artificial Sequence: Synthetic coding sequence
  source 1..852: mol_type = other DNA
atggacctgtggcccggcgcctggatgcttctgctgcttctgttcttactgctcctgttcttgctccctaccctgtggttttgctctccatcagcaaaatacttctttaaaatggccttctataacggatggatcttgttcttggccgtgcttgcaattccagtctgcgccgtgaggggaaggaacgtggagaatatgaagatacttcgactgatgcttctccacatcaaatacttgtacggcattcgcgttgaagtcagaggagcgcatcacttccctcccagccaaccgtacgtcgtcgtctctaatcaccagtcgtccttagacctgctgggaatgatggaagtactccctggccggtgtgtaccaattgctaaacgcgagctactatgggcaggtagtgcaggtttggcatgctggctggctggggttatattcattgatcgcaaaaggacaggtgacgcaatatccgtgatgtcagaggtagcccaaacccttcttacgcaggacgtgcgcgtttgggtgtttcccgaagggactcgcaaccataatggtagtatgctcccattcaaacgaggggctttccatcttgccgtgcaggcacaggtgcccatcgtaccaattgtcatgagctcctaccaggatttctattgtaagaaggaacgtaggttcactagcggtcaatgccaagttagggtcctgccacctgtgcccacggagggccttaccccagacgacgtgccagccctggctgacagggtccggcacagcatgctgaccgttttcagggaaatctcaacagacggccgaggcggaggcgactacctgaaaaagcctggtggcggcggttag

SEQ ID NO: 106412 - DNA, 852 bp, synthetic construct
  misc_feature 1..852: note = Description of Artificial Sequence: Synthetic coding sequence
  source 1..852: mol_type = other DNA
atggacctgtggccaggagcctggatgttgctacttttactgtttctcctgctcctttttctgctgcctaccttgtggttttgcagccccagtgccaagtactttttcaagatggcattctacaatggatggattttatttctcgccgtcctggcaatcccagtctgtgccgtgcgtggaagaaatgtcgaaaacatgaagatccttagactgatgctcctgcacataaagtatctgtatggtatacgagttgaggtgagaggcgcccatcattttcctccaagccagccttatgtcgtcgtgagcaaccatcaatcgtcattggaccttttagggatgatggaagtactaccagggagatgcgtgcccatcgctaagcgtgagctgctatgggccgggtcagcaggtcttgcctgctggctggccggggttatatttatagacaggaagaggacaggcgatgctatttctgtcatgtccgaagtggctcagactctgctgacccaggatgtgagagtctgggtatttcctgagggtactcggaatcataatggctcgatgctcccttttaaacgaggtgccttccatctcgctgttcaggcacaggttccgattgtgcccatagtcatgagtagctatcaggatttctactgtaagaaggagcgtcggttcacgtcgggccaatgtcaggtacgagtcctccccccagtaccgactgagggtctcacccccgatgacgtcccggcccttgccgaccgggtgaggcactctatgctgactgtatttagagagatcagcaccgatggaagaggaggcggagactatctgaagaaacccggaggcggtggttag

SEQ ID NO: 106413 - DNA, 852 bp, synthetic construct
  misc_feature 1..852: note = Description of Artificial Sequence: Synthetic coding sequence
  source 1..852: mol_type = other DNA
atggacctttggccaggtgcatggatgctgttgctgctcttgtttttactactcttgtttctgctgcccacattgtggttttgttcccccagtgcaaagtatttctttaaaatggccttttacaatggatggatactgttccttgcagtcctggcaatccccgtgtgtgccgtaaggggccgcaatgttgagaatatgaaaattctccgcttgatgctgctccacatcaagtatttatacggcattcgcgtggaggttcgaggagcccaccactttcctccctcacagccttatgtcgtggtgagtaaccaccagagtagtctcgacctcttggggatgatggaagtgctgcccgggaggtgtgtgcctatcgccaaacgagaactgctctgggccggctctgctggactcgcatgctggctagctggggtaatttttattgaccgcaaaagaacaggcgacgccatctcagtgatgagtgaggtagcgcagacactccttactcaggatgtccgggtgtgggtctttccagagggaacaaggaatcacaacggaagcatgctgccatttaagaggggcgccttccacctggccgtgcaggctcaggtgccaatcgtaccaatcgtgatgtcatcctaccaggacttctattgcaagaaggagaggcgctttacatccggacagtgccaggtgagggtcctgccgcctgtcccaaccgagggacttacacccgatgacgtgccagccctggctgatagagtgcgacacagtatgctgaccgtctttagagagatcagtacagacggccgaggggggggagactatctgaaaaagcccgggggtggcgggtag

SEQ ID NO: 106414 - DNA, 852 bp, synthetic construct
  misc_feature 1..852: note = Description of Artificial Sequence: Synthetic coding sequence
  source 1..852: mol_type = other DNA
atggatctgtggcccggcgcctggatgctcctccttcttctgtttttgttgctcctgtttctgctgccaacgttgtggttttgctcgccctccgcgaaatatttctttaaaatggctttctataatggctggattctgttcttggctgtattggccattcctgtatgcgccgtacggggaagaaacgtagaaaacatgaagatcttgaggttgatgctcctgcatattaaatacctgtatggcatccgagttgaggtcagaggggcacatcacttccccccctcccagccttacgtcgtggttagcaaccatcagtcttctctcgacctgctcgggatgatggaagtcctgcccggtcgttgcgtaccgatagctaagcgcgaactgctctgggccggttctgccggcctggcatgttggctagctggtgtgatctttattgaccgcaaaaggaccggcgacgctatttcggtcatgtctgaggtcgctcagacactactcacacaggatgtccgggtgtgggtgttcccagaaggcactaggaatcataacggctcaatgctacctttcaagcggggcgccttccacctggcagtacaagcccaggtccccatcgtgccaatagtaatgagcagctatcaggatttttactgcaagaaagagcgtaggttcacttcaggccaatgtcaggtgcgggtattaccgccggtaccaacagagggattgacccccgacgatgtcccggcactggcagatagagtgcgccacagtatgctcaccgtgttccgggaaatttccacagacgggcggggcggaggtgactacctgaagaaacccggtggcggagggtag

SEQ ID NO: 106415 - DNA, 852 bp, synthetic construct
  misc_feature 1..852: note = Description of Artificial Sequence: Synthetic coding sequence
  source 1..852: mol_type = other DNA
atggacctgtggcccggcgcctggatgcttctgttactcctgttccttctgctcctgttcctgttgccaacactctggttttgcagtccctccgcgaagtatttcttcaagatggccttttataatggctggattctattccttgcagtgttggctatacccgtctgtgctgtgcgcggcagaaatgtggagaacatgaagattctcagactgatgctgctccacatcaagtatctctacggcatcagagtagaagtgcggggcgcacatcattttcctccctctcagccctacgtagtagtgtccaaccatcagagctctctagatctcctaggcatgatggaagtccttccagggcgctgcgtgcccattgccaagagagaactgctatgggccggctcggccgggctagcctgctggctagccggagtgattttcattgaccggaaacggaccggagacgctattagcgtgatgtcagaggtggcgcaaacattactcacccaggatgtgcgtgtgtgggttttcccagagggtacccgaaaccataatggatctatgctgcccttcaaaagaggagcgttccatttagctgtccaggctcaggtgccgatagtaccaatcgtcatgtctagctaccaggacttctattgtaagaaagagaggaggtttaccagtggccaatgtcaggtgcgtgttctgcctcccgtgcccaccgaggggctaacacccgacgatgtccccgcgcttgcagacagagtgagacatagcatgttgactgttttcagagaaatttcaacagatggacgaggtggcggggactacctcaaaaaacctggagggggaggatag

SEQ ID NO: 106416 - DNA, 516 bp, synthetic construct
  misc_feature 1..516: note = Description of Artificial Sequence: Synthetic coding sequence
  source 1..516: mol_type = other DNA
atgatggaggtgctgcctggtagatgcgttcccattgctaagcgagagctcctgtgggcgggcagcgcagggctggcctgttggttggcaggagtgatcttcatcgaccgcaagagaaccggggatgcaatttctgtcatgtcagaagtggctcagacactgctcacccaggatgtgagggtctgggtcttcccagagggaacacggaatcataatggttctatgctcccatttaagcgcggtgctttccatctagccgtgcaggcccaggtccctatcgtccccattgtgatgtcttcttaccaagatttctactgcaaaaaagaaagaaggtttacgtctggtcagtgccaagttcgcgttctgccaccagttcccaccgaaggcttgacgccagacgacgttcctgccttggctgatcgcgtaaggcatagcatgctcacagtgttcagagaaatctccaccgatggtaggggcggcggcgattacctcaagaagcctgggggcgggggctag

SEQ ID NO: 106417 - DNA, 852 bp, synthetic construct
  misc_feature 1..852: note = Description of Artificial Sequence: Synthetic coding sequence
  source 1..852: mol_type = other DNA
atggatctgtggcctggcgcatggatgcttctacttttactctttctcctactcttatttcttctgcctactttgtggttttgtagtccaagtgccaagtacttttttaagatggcattctataacggctggatccttttcctggctgtgctcgctattccggtgtgtgctgtgaggggacgcaacgtcgagaacatgaaaattctccgtctcatgctgctccatattaagtacctctacggcattcgcgtggaggtgcgcggcgcccaccactttccaccctcacagccgtacgtggtcgtcagcaaccaccagtctagcctggacctgctggggatgatggaggtgctgcccggacgctgcgtgcccattgctaaacgagaactcctctgggcagggtctgctgggctcgcatgttggctggccggggtcatctttatcgaccggaagcggaccggagacgctatctcagtcatgagcgaggtggcccagaccctcctcacacaggacgtgagagtgtgggttttcccagaaggcacccggaaccataatgggagtatgctaccttttaaacgaggggccttccatctggctgtccaggcacaggtcccaattgttcccatagttatgtcttcatatcaggatttttactgtaaaaaggagcgacgttttacgtcgggtcagtgccaagtgcgggtgttaccaccagtgccgacagaggggctgacaccggatgacgtcccagcccttgctgatagggtgagacatagcatgttaactgtattccgagaaatctccactgatgggcgcggggggggcgactacctcaagaaacctggaggcggcggctag

SEQ ID NO: 106418 - DNA, 852 bp, synthetic construct
  misc_feature 1..852: note = Description of Artificial Sequence: Synthetic coding sequence
  source 1..852: mol_type = other DNA
atggacctctggcctggcgcctggatgctgctgttattactttttctactactcctctttcttctccccacgctgtggttttgtagcccaagcgccaagtatttctttaagatggctttctacaacggttggatactcttcttggcagtgttggctattcccgtgtgtgcagtcaggggacgaaacgtggagaacatgaagatcttgaggctgatgctgctgcatataaagtacctgtacggcatcagagtggaagtgagaggggctcaccatttcccgccttctcagccctatgtggtggtctctaaccatcagtcctctctagacctgctgggaatgatggaagtgctgcctgggcgctgcgtgccaatagctaaaagagaactactgtgggccggcagtgcagggttggcatgctggctggcgggtgttatctttatagaccgaaagaggacaggagatgcaatctccgtgatgagcgaagttgctcagacacttctgacgcaggatgtgagggtgtgggtgttccctgaggggacccggaaccataatggatcaatgttgcctttcaagcgcggtgcatttcatctagctgttcaggcccaggttcccatcgtacccatcgtaatgagctcctaccaggacttttactgtaagaaagagcggcgctttacatctggtcagtgtcaggtgagggttctgcctcctgtccccaccgagggcttaacacccgacgatgtaccagcacttgcagaccgcgtgagacactctatgctcacagtattcagggaaatctcaaccgatggtcgggggggaggcgactacctgaagaagccgggaggcggcgggtag

SEQ ID NO: 106419 - DNA, 852 bp, synthetic construct
  misc_feature 1..852: note = Description of Artificial Sequence: Synthetic coding sequence
  source 1..852: mol_type = other DNA
atggatctttggcccggtgcctggatgttattactgttactttttcttttgttactctttctcctgcccaccttatggttctgcagtccaagcgccaagtactttttcaagatggccttttacaatggttggattcttttccttgctgtgctcgccatccccgtctgcgcagtaagaggcaggaacgttgagaatatgaagattttgcgtcttatgctcctccatattaagtacctctatgggatcagggttgaggttcggggtgcacatcattttccccccagccaaccttatgtagtggtctcgaatcaccagtcctcgttggatctactgggtatgatggaagtgctgcctggcagatgcgtcccgatcgccaagcgcgaactactgtgggccggtagcgcggggctggcgtgctggctggccggcgtgatctttatcgatcggaagaggaccggcgacgccatctccgttatgagtgaggtcgcacagaccctccttacccaggacgtgagggtttgggtgtttcctgagggcacacgcaaccacaacgggagcatgctcccttttaagaggggcgcgttccaccttgccgtgcaggcgcaggtgcctattgtcccaattgtgatgtcctcataccaggacttctactgcaagaaagagcggagattcacctctggccagtgtcaggtccgggtcctgccccccgtgccaacggaggggttgactccagatgacgttccagctcttgccgacagggtgcggcattcaatgttgacggttttccgggagataagtacggacggaaggggtggtggggattacctgaagaagcctggcggcggagggtag

SEQ ID NO: 106420 - DNA, 852 bp, synthetic construct
  misc_feature 1..852: note = Description of Artificial Sequence: Synthetic coding sequence
  source 1..852: mol_type = other DNA
atggacctgtggcccggcgcgtggatgctgctcctcctcctgtttctgctcctgctcttcctgctacctactttatggttttgtagtccttctgcgaagtatttttttaaaatggcgttttataatgggtggatcctgtttctcgcagtcctggcaatacccgtctgtgctgtgcgcggacggaatgtggagaatatgaaaatattaaggctgatgctccttcacattaagtatctatacgggataagggtggaagtccgtggggctcaccattttccacctagccagccttacgtcgtggtctccaatcatcaatccagcttggatcttcttggcatgatggaggtgctgccgggccgctgtgtgcccattgccaaacgcgagctcctgtgggcaggatccgcgggactggcgtgttggctggctggtgtcattttcatagaccgaaagaggacgggcgatgccattagtgtcatgagcgaagtggcacagacattgctgacgcaggatgtccgggtgtgggtcttcccagagggaaccaggaaccacaatggctccatgctccctttcaagcggggggcattccacttggccgtacaggcccaggtgcccattgtgccaatcgtaatgtcctcctaccaggacttctactgtaagaaggagcgtcgctttacaagtgggcaatgtcaagtgcgcgtgttgcctcctgtccccaccgagggactaaccccggacgacgttcctgcgctggcagatcgggtgcggcatagcatgctgacagtgttccgtgagatcagcaccgatggaagaggcgggggtgattacttaaaaaagccaggtggtggaggttag

SEQ ID NO: 106421 - DNA, 852 bp, synthetic construct
  misc_feature 1..852: note = Description of Artificial Sequence: Synthetic coding sequence
  source 1..852: mol_type = other DNA
atggatctgtggcccggcgcctggatgctactcttattgctctttcttcttctgctctttttgctgcccaccctgtggttctgctccccctcagcgaaatatttttttaagatggcgttctacaacggctggattctatttctggccgtgttggccattcctgtgtgcgctgtgagagggaggaacgttgaaaacatgaagattctccgtctgatgctgctgcatatcaagtacctttacggcattagggttgaggtcagaggcgctcatcatttccctccaagccagccatacgtcgtggtgagcaaccatcaatcctctttggacctgctaggaatgatggaggtgctccctggaagatgtgtcccaatcgcgaaacgcgagttgctgtgggcaggttccgctggtctggcctgctggcttgctggcgtcatatttattgatcggaagcggactggtgatgcaattagcgtgatgagcgaagtggcccagacactgctcacacaggatgtacgggtctgggtattccctgagggtacccgcaaccataatggctctatgctcccttttaaaagaggtgcgtttcacctggcagtgcaggctcaggtgccgatcgtccccattgtcatgtccagttatcaggacttctattgtaaaaaagaacgacgattcacaagcggtcagtgtcaggtacgggtcttgccccctgttcccactgagggtctcacccctgacgatgtgccagcccttgcagacagggttcgacacagcatgttaacagttttccgtgagatttcaacagatggccgaggcggcggcgattatctgaagaagccaggaggaggcgggtag

SEQ ID NO: 106422 - DNA, 852 bp, synthetic construct
  misc_feature 1..852: note = Description of Artificial Sequence: Synthetic coding sequence
  source 1..852: mol_type = other DNA
atggatctgtggccaggggcttggatgctcctgctcctcttgttcttgctccttctattcctactccctacactgtggttttgttctccgtcagcaaagtacttttttaagatggccttttacaatgggtggatattgttccttgcagtgctcgctataccagtatgtgccgtaaggggcagaaatgtcgagaatatgaaaattttacggctgatgctgctccacataaaatacctctacgggatcagagtggaagtgagaggtgctcaccatttcccgccttctcagccctacgtcgttgtgtcaaaccaccagagtagcttagacttgctgggcatgatggaggtgttacctggacgatgcgtcccaattgccaagagggagctcctgtgggcaggatctgccggcctggcttgctggctggcgggtgttatcttcatcgaccgcaagagaacgggagacgcaatcagcgtgatgtctgaagtggcgcaaaccctgctgacccaagacgtcagagtgtgggtgtttcctgagggcacacggaaccataatggatccatgctacctttcaagcggggtgctttccacctcgcagtgcaggcccaagtgccgattgtgcccatcgtgatgtcgtcataccaggatttttactgcaaaaaagagcgtcgcttcacatccggacagtgtcaggtacgcgtactcccacctgtaccgacagaaggccttaccccagatgatgtaccagcgcttgctgaccgcgttcgccattctatgctgactgtgttccgggagatctctaccgacggtcgcgggggtggcgactacttaaaaaagccgggcggcggcgggtag

SEQ ID NO: 106423 - DNA, 852 bp, synthetic construct
  misc_feature 1..852: note = Description of Artificial Sequence: Synthetic coding sequence
  source 1..852: mol_type = other DNA
atggatctgtggcctggggcctggatgctcttattactgttatttctgcttttgctgttcctccttcctacactgtggttctgcagcccttctgccaaatacttcttcaagatggccttctataatggttggatcttattccttgcagtactggccattccggtttgcgcggttcgcggaagaaacgtggagaacatgaagatcctgcggctgatgcttcttcatatcaaatacttgtacgggatacgcgtggaagtcagaggcgcccaccattttcctccaagccagccctacgtcgtggtcagcaatcatcaaagttcattggatctgctaggcatgatggaggtcctgcccgggcgttgtgtcccgatcgcgaaacgagagttgctgtgggccggcagtgctgggctcgcttgctggctggccggcgtgattttcatcgacaggaagagaaccggggacgccatttccgtgatgagtgaggttgcacagacactcctgactcaggatgtgagggtgtgggtattccctgaggggactcggaaccacaatgggtccatgctcccgtttaaacggggcgcatttcacctcgctgtgcaggcgcaggtaccaattgtccctatcgtaatgtccagctatcaggatttctactgcaagaaggaacgcaggtttacaagtggccaatgccaggtgcgagtgctcccccctgtgcctaccgagggactcactcctgacgacgtgcctgcccttgctgacagagtgagacatagcatgctgaccgtttttcgggagatcagtactgacggacgggggggaggcgattatctaaagaaacccggtggggggggttag

SEQ ID NO: 106424 - DNA, 852 bp, synthetic construct
  misc_feature 1..852: note = Description of Artificial Sequence: Synthetic coding sequence
  source 1..852: mol_type = other DNA
atggatctatggcccggtgcctggatgctactgctgctgctgttcctcctcctgttgtttcttctacccactctctggttttgtagcccgagtgccaaatacttcttcaagatggctttttataatggctggattctattcttggctgtcctcgccataccagtgtgtgccgtgcgcggccggaatgtggagaatatgaagatcctaagactgatgctcctccacattaaatatctttacggcattcgcgtcgaggtcagaggcgctcatcattttcccccttcacagccgtatgtcgtggtgtctaaccaccagagttccctcgatcttttggggatgatggaggtcttacccggaagatgtgtgccaattgcaaagcgcgagctcctgtgggctggctctgccggacttgcgtgctggctggccggagttatctttattgatcgcaaacgcaccggagacgccatatcggtcatgtccgaagtggcccagaccctattgacccaggatgtcagggtgtgggtttttccggagggaacccgaaatcacaacggcagcatgctcccctttaaaaggggcgcctttcacctggctgtgcaagctcaggtgccaatcgtgccaatcgtgatgtcctcataccaggatttttattgtaaaaaagagaggcgctttacatcagggcaatgccaggtgcgcgtgctgccccccgtgcctacagaaggcctcacccccgacgatgtgcccgccctcgctgatcgcgtgcgccatagcatgctgaccgtgttccgcgaaatatcaactgatggccgcggagggggcgactatttaaagaagccaggcgggggtggctag

SEQ ID NO: 106425 - DNA, 852 bp, synthetic construct
  misc_feature 1..852: note = Description of Artificial Sequence: Synthetic coding sequence
  source 1..852: mol_type = other DNA
atggatctctggcctggagcctggatgctgcttctcctattgtttctcctcctgttgtttcttctgcctaccctgtggttttgttcgccatctgcaaaatactttttcaagatggcattttataatgggtggatcctcttcttagccgtgctggccatccctgtgtgcgcagtccggggcagaaacgtggagaacatgaagatccttagacttatgctgctgcacatcaaatacctgtatggtatccgcgtagaggtgcggggtgcccaccattttcccccaagccagccatacgtcgtcgtgtccaaccaccagagttcactggatcttcttggtatgatggaggtgcttccaggcaggtgtgtgcccatagctaagagagagttactctgggctggctctgcgggcctagcctgctggctcgcaggggttatttttattgataggaagcgaacaggggacgccatcagtgtgatgtctgaagtcgcccagactctgctgacccaagacgtaagagtgtgggtttttcccgaaggtaccaggaaccacaacgggagcatgctgccattcaagcggggagcattccacctggctgtccaggcacaagtgcctatcgtacccatcgtgatgtcatcatatcaggacttttactgcaaaaaagagcggcgatttacctctggtcagtgccaggttcgtgtactgcctccggtacctacagagggattgactccagacgacgtgcccgccctggcagatagggtacgccacagtatgttaacagtcttccgggaaatcagtacggacggtaggggaggtggcgactatcttaaaaagccagggggcggcgggtag

SEQ ID NO: 106426 - DNA, 852 bp, synthetic construct
  misc_feature 1..852: note = Description of Artificial Sequence: Synthetic coding sequence
  source 1..852: mol_type = other DNA
atggacctctggcctggtgcatggatgctgctgctactgctatttttactcctcctgttcctgctgccaactctgtggttttgcagcccttccgcaaagtattttttcaaaatggccttttacaacgggtggattctatttctggccgtcttagccattcccgtgtgcgctgtgcgcggcaggaatgtcgaaaacatgaagattctgcgtctgatgcttctgcatatcaagtatctgtatggcattcgggttgaggttcgcggcgctcaccactttccgccctcccagccgtatgtagtcgtctccaatcatcaatcctcactggaccttctgggtatgatggaggtactgccaggtcggtgtgtgcccattgctaagagagagctgctgtgggcaggctcagctgggctggcctgctggttagccggtgtgattttcattgaccggaagcggactggcgacgctatctctgtgatgtccgaggtggcccagactttattaactcaggatgttcgcgtttgggtgtttcccgaggggacgagaaaccataacggatctatgctgcccttcaagcgcggagcttttcacctcgccgtccaggcccaagtgcccattgttcctatcgtgatgtccagctatcaggatttttattgtaagaaagagcggagattcacctccggacaatgccaggtgcgcgttctaccacccgtgcctacagaagggctcacgcccgatgacgtccccgccctggcggaccgggtgagacacagcatgctcaccgtttttagagagatctctaccgacgggcggggtgggggcgactacttgaagaagccaggagggggcggctag

SEQ ID NO: 106427 - DNA, 852 bp, synthetic construct
  misc_feature 1..852: note = Description of Artificial Sequence: Synthetic coding sequence
  source 1..852: mol_type = other DNA
atggatctgtggccaggcgcttggatgttgctcttgttgctgtttttattgctgctctttctccttcctacgctttggttctgcagcccatcagccaagtatttctttaagatggcgttctacaacggctggatactgttcttagcggttctggccataccagtgtgcgcagtacgcggccgcaatgtcgagaatatgaaaattttgcgtttgatgctccttcacattaagtacctctacggcatccgggtggaggtcaggggtgcgcaccatttcccgccttcgcagccatacgttgtggtgagcaatcaccagagctccttggatctcctgggaatgatggaagtactccctgggaggtgtgtacctatcgccaagagagagcttctgtgggccgggagcgccggcctcgcttgttggctggccggtgttatcttcattgataggaagaggacgggggatgctataagtgtaatgtctgaagtggcccagaccctcctgacacaagatgtcagagtctgggtgtttccagaaggaaccagaaaccataacggcagcatgctgcccttcaagcggggagccttccatctcgccgtccaggcccaagtgcccattgttccaatcgtcatgtcttcttaccaggatttctactgcaagaaggagcgtcggtttaccagcggacaatgtcaagtgcgcgtgctgccccctgtcccaactgaagggctcacgcccgatgacgttcccgcccttgcagaccgggttcgccatagcatgctcacagtgtttagagaaatcagcactgatgggcgcggtgggggtgattacctgaaaaagcccgggggtggcggctag

SEQ ID NO: 106428 - DNA, 852 bp, synthetic construct
  misc_feature 1..852: note = Description of Artificial Sequence: Synthetic coding sequence
  source 1..852: mol_type = other DNA
atggacctttggcctggagcatggatgctcctgttgcttttattcctgcttctgctgtttctgttaccgacactctggttctgctccccaagcgctaaatacttctttaagatggctttctataatggatggatcctttttcttgccgtactggctatacccgtatgtgctgtccgcggcaggaatgtcgagaatatgaaaattctgcgtctgatgctactgcatatcaaatacctctacggcatccgggtggaggtgcgcggagcccaccactttcccccatcacaaccctacgtcgttgtctcgaaccaccagtcgtccctggacctacttggcatgatggaagtcctgcccggcagatgtgtgccaatcgccaagcgggaattgttgtgggccggctcagccgggctcgcatgctggctggccggggtgatctttatcgacagaaagcgcactggagacgccatatctgtcatgtctgaagtggctcagaccctactgacgcaggacgtaagggtatgggtgtttcctgagggcaccagaaaccataatggcagcatgcttcccttcaagcggggtgctttccacttggccgtgcaagcacaggtacccattgttccgatcgtgatgtcttcttaccaggatttctactgtaagaaggagcgccggttcactagcggtcagtgtcaggtccgggtgctaccacctgtgccaacagaggggctgacccctgacgacgtccctgccttagcagatagggtgaggcacagtatgctcactgtctttcgtgaaatttcaacggatgggcgtgggggaggtgactacttgaaaaaaccaggggggggagggtag

SEQ ID NO: 106429 - DNA, 852 bp, synthetic construct
  misc_feature 1..852: note = Description of Artificial Sequence: Synthetic coding sequence
  source 1..852: mol_type = other DNA
atggacttgtggcccggagcctggatgttgctgttgctgctgttccttttactcctgtttttactgccgaccctgtggttctgtagcccgtccgcaaagtatttctttaaaatggcattctacaatgggtggattctctttctggccgtgctggccataccagtgtgcgctgtgagaggccgcaacgtggaaaacatgaagatcctgcgactgatgcttttacatatcaaatatttatacggaatccgggtggaggttcgcggtgcccaccacttcccccccagtcagccatatgttgtggtgtcgaatcaccaaagctccctcgacctgctagggatgatggaggttcttcctgggagatgtgtgcccatcgccaagcgggagctcctttgggctgggtcggctggactggcatgttggctcgcgggggtgatcttcatagaccggaagcgtactggcgatgccatatctgtaatgtctgaagtagcccagaccctgcttacgcaagacgtgcgagtgtgggtcttccccgaggggacaaggaaccacaacgggagtatgctcccttttaaacgcggcgctttccatctggccgtgcaggcccaggtgcctatagtgcctatagtgatgtcttcataccaggatttctactgcaaaaaagaaaggagattcaccagtggccagtgtcaagtcagagtactgccaccggttcccacagaagggctgacaccagatgacgtgcctgcactggcagacagagtccgccattctatgctcacggtctttcgagagatttcgaccgatggaaggggggggggggattacctgaaaaaacccggtggtggcggatag

SEQ ID NO: 106430 - DNA, 852 bp, synthetic construct
  misc_feature 1..852: note = Description of Artificial Sequence: Synthetic coding sequence
  source 1..852: mol_type = other DNA
atggacctatggccaggtgcttggatgctcttgttgctgctgtttctgctcctcctattcctcttacctactctctggttttgctcaccaagtgctaagtacttctttaaaatggccttttataatggctggattttgttcctggctgtcttggcaatcccggtctgtgctgttcggggcagaaatgtcgagaacatgaagatcctacggctcatgctgctgcatataaaatacctgtatgggatccgagtggaggtgcgaggtgctcatcattttccgcccagccagccttacgtagtcgtgtcaaaccaccagtcttccctggaccttctgggaatgatggaggtactgcccgggaggtgtgtgccaatagcaaaaagagaactgctgtgggccggctccgctggcctggcctgttggctggccggagtgattttcatagacagaaagcgcaccggggatgccattagtgtaatgagcgaagtggcacaaaccctgttgacccaggacgtgcgtgtctgggtcttccccgaggggacaagaaaccacaacggctccatgctcccatttaaaaggggggcctttcacctcgctgtgcaagctcaggtcccaattgtgcctatcgtcatgtcttcgtaccaggatttctactgtaaaaaagagaggcgctttacgagcggccagtgtcaggtgagggtactgcccccggtaccaacggaggggctcactcctgatgatgtgccagccctggccgatagagtaagacactcaatgttgaccgtctttagggaaatcagcactgatggccggggcggaggagattatctgaaaaaacctggcggagggggctag

SEQ ID NO: 106431 - DNA, 852 bp, synthetic construct
  misc_feature 1..852: note = Description of Artificial Sequence: Synthetic coding sequence
  source 1..852: mol_type = other DNA
atggacctctggccaggggcatggatgctcctcctgcttcttttcttgctcctgctgtttctcttgcctaccctatggttctgctctccgtccgccaaatacttttttaagatggctttctacaatggctggatcctgtttctagcagtactagcgatacccgtctgtgcagtgagaggacgcaacgtcgaaaacatgaaaattttacggttaatgctcctgcatattaaatacctctatggaatccgggtagaggtgcggggggcccatcatttccctccttctcaaccctacgtggtggtatcaaatcatcagagtagccttgatctgctcggcatgatggaagtgctgcccgggagatgcgtcccaatcgcgaagagggaactactgtgggcaggaagcgcaggtcttgcctgctggctggcaggagtcatcttcatcgacaggaagagaacaggggatgccatctctgtgatgagcgaggtcgcccagacattactgacccaagatgtaagagtctgggtatttcccgagggcaccaggaatcacaacggaagtatgctgcctttcaaacggggagctttccacctcgcagtgcaggcccaagtgcccatcgtgccgatcgtgatgagctcctaccaggatttctattgtaaaaaagagagacgctttacctccggtcagtgtcaagtgcgtgtactgccccctgtacccaccgagggactgacacctgatgatgtgcccgcattggccgacagggtgaggcattccatgctgaccgtgtttagagaaatttccaccgatggcaggggcgggggagactatcttaaaaaacccggcgggggcggctag

SEQ ID NO: 106432 - DNA, 852 bp, synthetic construct
  misc_feature 1..852: note = Description of Artificial Sequence: Synthetic coding sequence
  source 1..852: mol_type = other DNA
atggacttatggcccggcgcctggatgttactcctgctcttattccttctcctgcttttcctgctccctacactgtggttctgttctccgtcagcgaaatacttcttcaaaatggcgttctacaacggttggattctgttccttgctgtgctggcgatcccagtttgtgcagtcagagggcgaaacgtagagaatatgaaaattcttcgactgatgctcctccatatcaagtatctgtatggaatcagagttgaagttcgcggagcacaccattttcctccgagccagccatacgtggtcgtctctaatcaccagtccagcctggaccttctaggcatgatggaagttctcccaggtcgatgtgtgcctatagccaagcgggagctcctctgggctggatcggccgggctggcgtgttggctcgcaggtgtgatcttcatcgaccgcaagcgtaccggggatgccatatcagttatgagcgaggtcgcacagactctgctgactcaggacgtccgagtgtgggtgtttcccgagggcacacggaaccataatggctcgatgttgcccttcaaaaggggggcttttcatttggcagtccaggcacaggtaccgattgtaccgatcgtaatgtcaagctaccaagacttctattgcaaaaaagagcgaagattcacctctggccagtgccaggtgcgtgtactgccccctgtgccgaccgaagggctgactcccgatgatgttccagccctggcagacagagtccggcacagtatgttgaccgtgttccgcgaaatctctaccgatggtcgaggggggggggattatctgaagaaacctggcggcggtggctag

SEQ ID NO: 106433 - DNA, 852 bp, synthetic construct
  misc_feature 1..852: note = Description of Artificial Sequence: Synthetic coding sequence
  source 1..852: mol_type = other DNA
atggacctatggccaggcgcctggatgcttctgcttcttctctttttgctgctactgttcctgctgccaacgctttggttttgtagtccctctgccaaatatttcttcaagatggccttctacaacggctggatcctttttctcgccgtgctggccatacctgtgtgcgcagtccgcgggaggaacgtggaaaatatgaaaattctcagacttatgttgctgcatataaagtacttgtacggtattcgtgtcgaggttcggggggcgcaccatttcccacccagccaaccatacgtcgtggtcagtaaccatcagtcgagtctcgacctcttaggcatgatggaagtgctgcccggacgctgcgttcccatcgcaaaacgcgagctcttgtgggccggtagtgcagggcttgcttgttggttagccggcgtgattttcattgatcgtaagagaactggggatgcgatctctgtcatgtctgaagtcgctcagacactgttgacgcaggacgtccgcgtgtgggtctttcctgagggcacccggaatcacaatggcagcatgctgcccttcaaaagaggggctttccacttagctgtgcaagcccaagtcccgattgtgcccattgttatgtccagctatcaggacttctactgcaaaaaagaaagaaggtttacgtccggccaatgccaggtgcgggttttgccccccgtgcctacagagggcctaactccggatgacgttcctgcattggccgatagggtccggcattctatgttaacagtattccgcgagatttccaccgacggaagaggcggtggggactatcttaagaagcctggggggggaggatag

SEQ ID NO: 106434 - DNA, 852 bp, synthetic construct
  misc_feature 1..852: note = Description of Artificial Sequence: Synthetic coding sequence
  source 1..852: mol_type = other DNA
atggacctgtggcctggggcatggatgctgttgctcctgctgtttctgctgctgctgtttttactgcccacactgtggttctgctcacccagcgcgaaatacttcttcaagatggccttctacaatggttggatactttttttagcagttcttgccatacccgtttgtgctgtccgcggtaggaacgtcgaaaacatgaagatcctgagacttatgttgttgcatattaagtatctgtatggaatcagggtcgaagttcgcggggcccaccactttccaccgagtcagccgtatgttgttgttagtaaccaccagagctccctggatctcctgggcatgatggaggttctgccagggcgatgtgtgcccatagccaagagggaactcctgtgggccgggagcgcgggattggcttgctggctggcgggtgtgatatttatcgacaggaagcggacaggcgatgcgatttccgtgatgagtgaggtggcgcagacactgttgacccaggacgtgagggtctgggtattccccgagggaactagaaaccataatggttcaatgttgcccttcaagagaggcgcctttcacctggcggtgcaagcacaggtaccaatcgtgcccatcgtgatgtcatcttaccaggacttctactgtaagaaagagcgccgtttcacttcagggcagtgccaagtgcgagtgttgccacccgtccctactgaaggtttgacccctgacgatgttcccgcgttagccgaccgtgtacgacactcaatgctgacagtgttcagagagatctcgactgatggacgagggggcggtgattacttgaagaaaccaggtggcggtgggtag

SEQ ID NO: 106435 - DNA, 852 bp, synthetic construct
  misc_feature 1..852: note = Description of Artificial Sequence: Synthetic coding sequence
  source 1..852: mol_type = other DNA
atggacctgtggcctggggcgtggatgttattgctactgcttttcctcctcctgttatttctattgccgacgttatggttctgctcgcctagcgccaaatacttcttcaagatggctttttacaacggttggatactgtttttggcagtacttgccatccctgtttgcgctgtgcggggaagaaatgtagagaatatgaagatcctaaggctcatgctgctccacattaaatacctgtatgggattcgcgtggaagtacggggggcacatcacttccccccatcacagccttatgtggtcgtatcaaaccaccagagctctctcgacctcctaggcatgatggaagtgctgcccgggcggtgcgtgccaattgcaaaacgcgaattactgtgggccggaagcgcgggccttgcctgttggctggctggcgtcatcttcatcgataggaagcgaaccggcgacgcaatcagcgtcatgagcgaggtagctcaaaccttactcacgcaagatgttcgagtctgggtgtttccagaaggtacccgcaaccacaatggcagtatgctgccatttaagcgaggtgcatttcacttggccgtgcaggcacaggtgccaatcgtacccatcgttatgtcctcgtaccaggacttctactgtaagaaggaacggcggttcacttccgggcagtgtcaggttcgggtgcttccaccagtgccgaccgaggggctcaccccggacgatgtgcctgctcttgccgaccgggtgaggcattccatgttgactgtatttcgagagatttctaccgatggacggggcggcggggattacctcaaaaagccgggcggcggtgggtag

SEQ ID NO: 106436 - DNA, 852 bp, synthetic construct
  misc_feature 1..852: note = Description of Artificial Sequence: Synthetic coding sequence
  source 1..852: mol_type = other DNA
atggacctctggcctggcgcttggatgctcctccttctactgtttcttcttctgctattccttcttccgacactgtggttttgttccccaagcgcaaaatacttttttaagatggctttctataacggctggatcctgttcctcgcggtgcttgctattcctgtctgcgccgtgaggggccgaaacgtggagaacatgaaaattctccgcctcatgctgctccatattaagtacctgtacgggattcgcgtcgaggtcagaggggcgcatcatttcccaccctcacaaccatacgtggtcgtttccaatcaccagagctcactcgatttactgggaatgatggaagtcctgcctggaagatgtgttccaatcgctaagcgagagctcctttgggccggctctgctgggctggcctgctggctagccggagtaatctttattgaccggaaaagaactggcgacgcaatcagtgttatgagtgaagttgctcagaccctgctcacgcaggacgttcgagtttgggtgttcccagagggtacaagaaatcacaacggctcaatgctacccttcaaacgcggagctttccatcttgcggtgcaggcacaagtgccaattgtaccaattgtgatgtcaagctaccaggatttttattgtaagaaggaacgacggttcacgtccgggcagtgtcaggtgcgggtcctaccacccgtgcccacggaaggtctgaccccagatgacgtccccgccttggctgacagagtccgccactcaatgctgaccgtgtttagagaaatatccacagatgggaggggaggaggggactacttaaaaaagcctggtgggggtggctag

SEQ ID NO: 106437 - DNA, 852 bp, synthetic construct
  misc_feature 1..852: note = Description of Artificial Sequence: Synthetic coding sequence
  source 1..852: mol_type = other DNA
atggatctgtggcctggagcgtggatgttgctgctcctccttttcctgttactgctgtttttgctgccgaccctttggttttgcagtccttccgccaagtacttttttaaaatggccttctataatggatggattctgttcttagccgttttggcgatacccgtgtgtgcggtgagaggacggaatgtcgaaaacatgaagatcttacgtctgatgttactccatataaagtacctgtacggcatcagagtggaggtgaggggcgctcatcatttcccccccagccagccttatgtggttgtcagcaatcaccagagttcactcgatctgctgggcatgatggaggtgctgcccgggcgttgtgtgccaatcgctaaaagggagctgctgtgggcggggagcgccggcctggcttgctggctggccggggtcattttcattgatcggaaaaggacgggggacgctatctctgtcatgtccgaggtcgcccagactttactaactcaggacgttcgggtgtgggttttccccgaggggacacggaaccacaatgggagcatgctgccttttaaacgaggggcctttcacctggcagtccaggctcaggtgccaattgtccccatagtgatgtcatcttatcaagacttctactgtaagaaggagcgccgctttacttccggtcagtgccaggtcagagtgctgccacctgtgcctacagaggggctgacccccgatgacgttcccgctcttgcagacagggtcaggcacagtatgctaacagtgtttcgggagattagcacagatggacgtggcggcggggattacctcaagaaacccggcggtgggggttag

SEQ ID NO: 106438 - DNA, 852 bp, synthetic construct
  misc_feature 1..852: note = Description of Artificial Sequence: Synthetic coding sequence
  source 1..852: mol_type = other DNA
atggatctgtggcccggtgcttggatgctgttgcttctgctctttctgctactgctatttttgctgcccacgctatggttctgttctccctccgctaaatacttttttaagatggccttctacaacggctggattctatttctggccgtcctcgcaattccagtctgcgccgtgcggggtagaaacgttgagaacatgaagatcctccgactcatgttgctgcacatcaagtacctttacggcatccgagtggaggtgcgcggggcccatcactttccacctagtcaaccgtacgttgtcgtcagcaatcaccaatcctccctagacttattgggaatgatggaggtgctccccggtagatgcgtgccaatcgctaagcgcgaattactgtgggcaggcagcgccggcctggcttgctggctcgccggggtaattttcatagatcgcaagagaactggcgatgcaattagtgtaatgagtgaggtcgcacagaccctgctgacacaggacgtgcgcgtatgggtgtttcctgaaggtacccgaaaccacaacggatctatgctccctttcaaaagaggcgctttccaccttgcagtgcaggcccaggtgcccatcgtgcccattgtcatgtcttcatatcaggacttctattgtaagaaggagaggcggtttacctccggccaatgtcaagttagggtattacctcccgtgccaactgaggggcttacacccgatgacgtacccgcgctagccgatcgcgtgagacacagcatgctaaccgtgtttagagaaatctcgaccgacggacggggaggcggagattatctgaagaaaccaggaggtggaggctag

SEQ ID NO: 106439 - DNA, 852 bp, synthetic construct
  misc_feature 1..852: note = Description of Artificial Sequence: Synthetic coding sequence
  source 1..852: mol_type = other DNA
atggatttgtggcctggagcctggatgcttctgcttctcctctttctgttgttgctctttctgctgccaactctgtggttttgcagtccttccgccaaatatttctttaagatggctttctataacggctggattctgtttctagcagtcttggccatcccggtgtgcgcagtgcgaggaaggaatgtggagaacatgaagattctgagactgatgctactgcatatcaaatatctctatgggatcagagtggaagtcagaggtgcacaccattttccaccttcgcaaccatacgtagtggttagcaatcatcagtccagcctggacctcttagggatgatggaggtcctgcctgggaggtgtgtacctattgcaaagagagagctactgtgggcaggctctgccgggcttgcatgctggctagcgggggtgatttttatagatagaaagaggactggggatgctatctcagtgatgtctgaggtggctcaaaccttactcacacaagatgtccgtgtctgggtgtttcccgaggggactagaaaccacaacggttcaatgctgccctttaagagaggcgctttccatctggctgtacaggctcaggtgccaatcgtccccatcgtgatgtccagttatcaggacttttattgcaagaaagagcgccgttttacttccggacagtgtcaagtgcgtgtgctgccacccgtaccaaccgaagggctgacccctgatgatgttcccgccctcgctgatagagtcaggcactcgatgttgacagtgttcagagaaatctctacagacggccggggcggcggcgattatttaaagaaacctggcggcggaggctag

SEQ ID NO: 106440 - DNA, 852 bp, synthetic construct
  misc_feature 1..852: note = Description of Artificial Sequence: Synthetic coding sequence
  source 1..852: mol_type = other DNA
atggacctgtggcccggggcctggatgcttctgttgctgctatttctgctcttgctcttcctgttgcccaccctttggttctgcagccctagcgccaagtacttcttcaaaatggctttttataatgggtggattctttttctggcggtgttggctataccagtttgcgcggtgaggggacggaacgtggagaatatgaagatcctcagactaatgctcctccatatcaagtacctctacggtattcgagtagaggtgcgaggggctcatcacttccctccctctcagccgtacgtcgtggtcagcaatcaccagagcagccttgacctgctaggaatgatggaggtgttgcccggaaggtgcgtgccgatagccaagcgggagttactttgggccgggtctgctggtctggcctgttggctcgcaggcgtcatttttattgaccgcaagagaacaggtgacgcaatttctgtcatgtccgaggtggcgcagacattattgacacaagacgtgagggtttgggtgttcccggaaggaaccagaaatcacaacggctcaatgctgccctttaagaggggcgcatttcatctggctgtgcaggcgcaggtgcccatcgttcccattgtcatgagctcttaccaggatttttactgtaaaaaggaacggcgctttacatcgggacaatgccaggtaagggtgctaccgcctgtccctacagaaggcttaaccccagacgatgtcccagccctggctgacagggtgcgccattccatgctgaccgtcttcagggagatcagtactgatggcaggggaggtggggactatctcaaaaagcccggtgggggagggtag

SEQ ID NO: 106441 - DNA, 852 bp, synthetic construct
  misc_feature 1..852: note = Description of Artificial Sequence: Synthetic coding sequence
  source 1..852: mol_type = other DNA
atggatctgtggccgggcgcctggatgttactgcttctcctatttctcctgttactgttcttactccctacactctggttttgctcacctagtgctaagtatttttttaagatggcattctacaatggctggatcctcttcttggccgtcctggccatccccgtatgcgcagtgcggggccggaacgtggaaaacatgaaaatcctaagactgatgctccttcacattaaatatctgtacggcatcagggtggaagtgagaggcgcccaccacttccctcccagtcagccatatgtagtggtatcgaaccaccagtcatccctcgatctactggggatgatggaggtgctgcccggtaggtgcgttccaattgccaaacgggaactgctctgggccggcagcgccggtctcgcatgttggcttgcgggagtgattttcatcgaccggaaacggaccggcgacgcaatttcggtgatgtctgaggtggcacagaccctcctgactcaggacgtgcgcgtgtgggtcttccctgaagggacccgcaatcacaacggatctatgctgccattcaagcgaggcgcctttcatctcgcagtccaggctcaagtgcccatcgtacctatcgttatgagcagctatcaggacttttactgcaaaaaggagagaaggtttacaagtgggcagtgtcaggtgcgtgtcctgccgccagtacccactgaaggcctcactcctgacgatgtgcccgcactggccgaccgcgttagacattccatgctgaccgtgtttcgtgagatctccacagacggcagaggcggcggtgactatttgaaaaagcctggtggtgggggatag

SEQ ID NO: 106442 - DNA, 852 bp, synthetic construct
  misc_feature 1..852: note = Description of Artificial Sequence: Synthetic coding sequence
  source 1..852: mol_type = other DNA
atggatctttggccaggggcatggatgttgctcttgctgctgttcctcctgcttctgttcttgcttcccactctttggttctgctctccgtcggccaagtatttttttaagatggccttttataatgggtggatcttatttctggctgttctagctatcccagtgtgcgcggtacgcggacggaatgtggagaacatgaagatacttcgactgatgctgctgcatatcaaatatctgtatggaattcgagtcgaagtcagaggtgcccaccattttcccccttcacaaccgtatgttgtggtcagcaaccatcagtcgtccctggacctgttggggatgatggaagtgttgcccggacgatgcgttccaatagctaagcgagagctactgtgggctgggtcagcaggtctagcctgttggctggccggggtcatttttatcgatcgcaagcgcacaggggatgcaataagcgtgatgtccgaggtagctcagacattgctgacccaggatgttcgtgtatgggtcttccctgaaggtacccgaaatcacaatggctctatgctgccgtttaagagaggtgcctttcacttggctgtgcaggcccaggtacctattgtcccaatcgtgatgtctagctatcaagacttctattgcaaaaaagaaaggcgcttcacaagtggacagtgtcaggtccgggtactaccccccgttccaaccgaaggtctgacccctgatgacgttcccgcgctggctgatagagtgcggcattccatgttgacggtcttccgcgaaatctctacagacggtcgaggaggcggggattatctgaagaagccaggcggaggaggttag

SEQ ID NO: 106443 - DNA, 852 bp, synthetic construct
  misc_feature 1..852: note = Description of Artificial Sequence: Synthetic coding sequence
  source 1..852: mol_type = other DNA
atggatctgtggccaggagcctggatgctgctcctcctgctctttctgctactgttatttctcttgccgaccctgtggttttgctccccatctgctaaatatttttttaaaatggccttctacaacggttggattttgtttctcgccgtcttggccatacccgtgtgcgcagtacgcggacgcaacgtggagaatatgaagattctgagattaatgcttttacatatcaaatatctttacggaatcagggtggaggtcagaggtgcacatcactttccgccaagccagccctatgtcgtcgtgagcaaccatcagtcttctctcgaccttttgggaatgatggaagtcctgccaggaaggtgcgtgccaatagccaagagggaactgctctgggctggatccgccgggttagcttgctggctagccggagtcatctttatcgatcgcaagcgcaccggagatgccatctctgtgatgtctgaggttgctcagactctacttacacaggacgtcagagtgtgggtgttcccagaggggacccgaaaccacaacggaagcatgttgccttttaaaaggggcgcattccatcttgcagttcaggcacaggtgcccatagtacccatcgtgatgagttcttaccaggatttctattgtaagaaggaacggcgattcacttccggccaatgtcaggtccgcgtgctaccccccgtgcccaccgaaggcttgactcccgacgacgtgccagcgctagccgatcgggtccgtcactccatgctcacagtgttccgcgagatctctacggatggacgtggcggtggcgattacctcaagaagccaggaggcggtggttag

SEQ ID NO: 106444 - DNA, 852 bp, synthetic construct
  misc_feature 1..852: note = Description of Artificial Sequence: Synthetic coding sequence
  source 1..852: mol_type = other DNA
atggatctgtggccaggagcctggatgctcctcctgcttctgtttttgctgctgctcttcctgctgcccaccctctggttctgtagtccaagcgcgaaatacttttttaagatggccttttacaacggttggatactgtttctggctgtcctcgccatccctgtctgcgctgtgcggggccgaaatgtggagaatatgaaaatcctgcgcctcatgctgctgcacatcaagtatttatatggcatccgtgtggaagttcgcggtgctcatcacttccctccgtcacagccatacgtggtagtctcaaaccaccagtcaagtctggatttgcttggcatgatggaagtgctcccaggaaggtgcgtgcctatcgctaaacgcgaattgctttgggccggcagcgcagggctggcctgttggctcgctggcgtcattttcatcgataggaaaagaactggggatgctatttccgttatgagcgaggtggcacaaaccctattgacacaggacgtaagggtttgggtgttccctgaaggcacacggaaccataatgggtctatgttgccattcaagcggggcgcatttcacttagcagttcaggcacaggtgccaatcgtgcccatcgttatgtcaagctatcaggatttctactgcaagaaagaaagaagattcacatcaggacagtgccaggtaagggtgcttccacccgtgcctactgaggggctcacaccggacgacgtgcctgcgctagctgaccgcgtgaggcactctatgcttacagtattccgcgaaatcagcacagatggccgcgggggcggggattacctgaagaaaccgggtggcggaggatag

SEQ ID NO: 106445 - DNA, 852 bp, synthetic construct
  misc_feature 1..852: note = Description of Artificial Sequence: Synthetic coding sequence
  source 1..852: mol_type = other DNA
atggacctctggcctggcgcctggatgctgttactgctgctctttctgcttttattattcctgctgcccacgttatggttctgtagtccttcagctaaatatttctttaagatggccttttataacggctggatcctgttcctggctgttctggctattccagtgtgcgcagtccgaggccgtaacgtagaaaacatgaagattctacggctcatgctgcttcacattaaatatctttatgggatccgagtcgaagttcggggagctcatcacttccctcctagccagccttatgtcgtggtgagcaaccaccagagttccttggatctgctggggatgatggaagttctgcccgggcggtgcgtgccgatcgctaaaagggagctactgtgggccggttccgccgggttagcgtgttggctggctggggttatctttattgaccgcaagcgaaccggagatgccattagtgtcatgagcgaggtggcacagaccttactcactcaggatgtgcgcgtgtgggtctttcctgagggtacaaggaatcacaacggcagcatgttaccatttaagagaggcgcgttccacctggcagtacaggctcaggtgcccattgttcctatcgtgatgtcttcttaccaagatttctactgcaagaaggagcggaggtttaccagtggacaatgtcaggtacgtgtgctgcctcctgtcccaactgaggggctgacacccgacgacgttcctgccctggccgatagggttcgccactccatgctaacagtattcagagagatttccaccgatggacgaggaggaggggactatctcaagaagcccggaggtggcgggtag

SEQ ID NO: 106446 - DNA, 852 bp, synthetic construct
  misc_feature 1..852: note = Description of Artificial Sequence: Synthetic coding sequence
  source 1..852: mol_type = other DNA
atggacttgtggccgggggcgtggatgctgctgttactgctcttcctgcttctcctcttcctgctgcccacactctggttttgtagcccttccgccaaatatttcttcaaaatggcattttacaatggatggattctgtttctggccgtactagcaatcccagtttgcgcggttaggggccgaaacgtggagaatatgaagattctgagactgatgctgttgcatatcaaatacctgtacgggattcgggtcgaagtgagaggcgcccatcatttcccgccaagccagccctatgtagtagtgtccaaccaccagtcctctctggatctgttgggcatgatggaagtgttaccagggcgatgcgtccctatagctaaacgagaactgctgtgggcagggtcggcaggactggcctgctggcttgcgggagtgatctttatagataggaaaaggacaggcgatgccatctcagtgatgagcgaagttgctcagaccctgctgacacaggacgtccgggtttgggtatttcccgaaggaacacgcaatcacaatggaagtatgctgccttttaagcgaggcgccttccatctggctgtgcaggcccaggttcctatcgtgcccattgttatgtcatcttaccaggacttttactgcaagaaggagaggcggttcacctccggccagtgccaggttagggtcctccctcctgtgcccactgaggggctgacccccgacgacgtgccggccctggcagatcgtgttcgccactcgatgcttactgtgttccgggaaatcagcaccgatggacgagggggcggcgactatcttaagaagccaggagggggaggatag

SEQ ID NO: 106447 - DNA, 276 bp, synthetic construct
  misc_feature 1..276: note = Description of Artificial Sequence: Synthetic coding sequence
  source 1..276: mol_type = other DNA
cacagcgcatctactccaattttgacacacagccatcccgcccaggggatgatggaagttctgcctgggagatgcgtgcccattgctaaacgcgaactcctgtgggcaggaagcgctggccttgcctgttggctggctggggtgattttcattgatcgaaagcgaaccggtgatgccatcagcgtcatgagtgaggtggcccagactctgctcactcaggatgtgtcccaccccggattgttattgcaagaaggggcatccctgcacctggggtag

SEQ ID NO: 106448 - DNA, 276 bp, synthetic construct
  misc_feature 1..276: note = Description of Artificial Sequence: Synthetic coding sequence
  source 1..276: mol_type = other DNA
cactcggcctcaacgccaatcctgacgcactctcatccggctcaaggcatgatggaagtgcttccagggcggtgcgtgccaatcgctaaacgcgagctgctttgggctggttccgccggcttagcctgttggctcgctggagtcatattcatcgatagaaaaaggaccggtgacgctatctccgtcatgtccgaagtagcccagacactcctgacccaggacgtgtcccacccaggtctgcttctgcaggagggagcgtccctgcacctgggctag

SEQ ID NO: 106449 - DNA, 276 bp, synthetic construct
  misc_feature 1..276: note = Description of Artificial Sequence: Synthetic coding sequence
  source 1..276: mol_type = other DNA
cacagcgcatctacacctattctcacacactctcaccccgcgcaggggatgatggaagtactacctggccggtgcgtgccaatagcaaagagggaattgttatgggccgggtctgcaggactcgcgtgctggttagcaggcgtgatattcatagacagaaaacgcaccggagatgccatctccgtgatgtcagaagtggctcagacccttctcacacaggatgtaagccatccgggcctgctgttgcaagagggcgcatctcttcatctcggatag

SEQ ID NO: 106450 - DNA, 516 bp, synthetic construct
  misc_feature 1..516: note = Description of Artificial Sequence: Synthetic coding sequence
  source 1..516: mol_type = other DNA
atgatggaggtgctgccagggcgctgcgtcccgatagcaaaacgagaactactatgggcagggagtgcgggcctggcttgttggctggccggcgtcatttttatcgaccgaaagagaactggagacgccatcagcgtcatgtccgaggtggcccaaacactgctgacccaggacgttagagtgtgggtgtttccagaggggaccaggaaccataatggtagcatgctcccctttaagcgcggcgccttccatttagccgtgcaagctcaagtgcccatagttccaatagtgatgtcatcttaccaggatttttattgcaaaaaggaacgccgattcacatcaggccagtgtcaggttcgcgtgctgcctcccgtgcccactgaaggtttaacaccagacgatgtccctgctctggcggatcgggtgagacacagcatgttaacagtgttccgcgaaattagtacagatggcaggggcggcggtgactatctaaagaagcccggagggggcggctag

SEQ ID NO: 106451 - DNA, 516 bp, synthetic construct
  misc_feature 1..516: note = Description of Artificial Sequence: Synthetic coding sequence
  source 1..516: mol_type = other DNA
atgatggaggttctgcccgggaggtgcgtacccatcgctaagcgagagctgctttgggcaggatccgcgggtctggcctgctggcttgccggcgtgatcttcatcgaccgaaagagaaccggcgacgccatcagcgtgatgtctgaagtggcacaaacgttgcttacacaggatgtcagagtttgggtgttcccagaaggcactaggaatcacaatggctcaatgctcccatttaaaagaggcgctttccatcttgcagtgcaggcgcaggtgcctattgtgcctatagtgatgtcctcctatcaggatttttactgtaagaaggaacggcgctttactagcggccagtgccaagtgcgggtcctgccccctgtccctaccgaaggcttgaccccggacgacgttccagccctggcggacagggtgcgacattcgatgctgaccgtgttcagagagattagtaccgatggaaggggggggggcgactatcttaagaaaccaggcggcgggggatag

SEQ ID NO: 106452 - DNA, 276 bp, synthetic construct
  misc_feature 1..276: note = Description of Artificial Sequence: Synthetic coding sequence
  source 1..276: mol_type = other DNA
cactcagcatcaaccccgattctgacccattcccaccccgctcaagggatgatggaggtgctcccagggcgatgtgttcctattgcaaaaagggagttgttgtgggctgggtcggccggactggcttgttggctggctggagttatattcattgaccgaaaaagaacgggtgatgccatcagcgtcatgagtgaagtcgcccaaactctacttacgcaggacgtcagccaccccggcttgctgctgcaggaaggtgcctccctccatctgggatag

SEQ ID NO: 106453 - DNA, 276 bp, synthetic construct
  misc_feature 1..276: note = Description of Artificial Sequence: Synthetic coding sequence
  source 1..276: mol_type = other DNA
catagcgctagtacacctattttgacgcatagtcatccagcgcaaggaatgatggaggttctccctggacgttgcgtccccatcgcaaagagggaactactgtgggcgggatccgcaggtctcgcatgctggttagccggcgttatatttatagaccgcaaaagaaccggggacgccatctctgtgatgtcagaagtagctcaaaccctattaacacaagacgtctcccaccctggtttgctgttgcaagagggggcgtcattacatctcggctag

SEQ ID NO: 106454 - DNA, 276 bp, synthetic construct
  misc_feature 1..276: note = Description of Artificial Sequence: Synthetic coding sequence
  source 1..276: mol_type = other DNA
cattctgcctctactccaattttaactcacagtcacccggctcagggtatgatggaggtgcttccaggtcgctgtgtgcccatcgctaagcgggagctcctgtgggcaggcagtgccggactcgcgtgttggcttgctggggtcatcttcattgaccgaaaaagaacgggcgatgcaattagtgtaatgtccgaagttgctcagacactgttgacccaggatgtgtctcatccaggcctgttacttcaggaaggagctagcctccacctcggatag

SEQ ID NO: 106455 - DNA, 516 bp, synthetic construct
  misc_feature 1..516: note = Description of Artificial Sequence: Synthetic coding sequence
  source 1..516: mol_type = other DNA
atgatggaggtgcttccagggaggtgtgttcctattgcaaagcgcgagttgctgtgggcggggtccgccggcctcgcctgttggctagctggtgtaatctttatagatcgcaagaggactggcgacgcaatatcagttatgtcagaagtagcccaaaccctcctgacccaggacgtgcgggtgtgggtctttccagaaggtaccagaaaccataatggatcaatgctgccattcaagcggggggccttccacctcgcagtccaggctcaagttcccatcgtacccatcgttatgtcatcttaccaagatttttactgcaagaaggagcggcggtttacctctgggcagtgccaagtacgagtgctacctcctgtcccaaccgaagggctcaccccagacgatgtacccgctctggccgatcgggtccgacacagtatgctgaccgtatttcgggaaatcagtacagatgggcggggggggggcgactatcttaaaaaacccgggggaggcgggtag

SEQ ID NO: 106456 - DNA, 516 bp, synthetic construct
  misc_feature 1..516: note = Description of Artificial Sequence: Synthetic coding sequence
  source 1..516: mol_type = other DNA
atgatggaggtcttgccggggcgctgcgtgccaattgcaaagcgagaactactatgggcaggatccgccgggctggcatgctggctggctggcgtgatctttatcgatcggaagaggacaggagacgccatctctgttatgagtgaagtggctcagacattgcttacacaggacgtcagagtctgggtctttcccgaggggacaagaaaccataacggatctatgctgccatttaagcggggcgcgttccatttggccgtccaagcccaggtgcctatcgtccccattgtgatgtcatcttatcaggatttttactgtaaaaaggagcgccgcttcacctcggggcagtgtcaggtgagagtgttgcctcctgtccccacagagggtctgacaccagacgatgttccagctctagccgaccgagtcagacatagcatgctcacagttttcagagaaattagcactgatggcagaggaggtggcgattacctgaaaaagcctggtgggggcggatag

SEQ ID NO: 106457 - DNA, 276 bp, synthetic construct
  misc_feature 1..276: note = Description of Artificial Sequence: Synthetic coding sequence
  source 1..276: mol_type = other DNA
cacagcgcctcaacccccatactgacccactcacacccagctcagggcatgatggaagtacttccgggccggtgcgtccccattgcaaagagagagttactctgggccggcagcgccggcctggcttgttggttagcaggtgtgatatttatcgatagaaaacgaacaggcgacgcaataagtgttatgagcgaggttgctcagaccctgcttacgcaggatgtctcccaccccggcctcctccttcaagaaggcgctagcctccatctagggtag

SEQ ID NO: 106458 - DNA, 516 bp, synthetic construct
  misc_feature 1..516: note = Description of Artificial Sequence: Synthetic coding sequence
  source 1..516: mol_type = other DNA
atgatggaggtgctgccaggccgttgtgtaccaatcgccaaacgcgaacttctctgggcaggatccgctgggctggcatgctggctcgccggtgttattttcattgatagaaagagaacaggcgacgctatttcggttatgtccgaggtggcccagacccttctgacacaggatgttcgtgtctgggtgttccccgaggggacacgaaaccataacggaagcatgctccccttcaagaggggggctttccatctggccgtgcaagctcaggtgcctatcgtaccaatcgtcatgtcctcctaccaggacttctactgcaaaaaggagcgccggttcacaagtggacaatgccaagtgagggtgctgccccccgtgcctacagaaggtcttacgcccgatgatgttccagccttggctgatcgggtgcgtcattccatgctcaccgttttcagggagatatctacagatggacggggaggtggggactatttgaagaagccgggaggaggcgggtag

SEQ ID NO: 106459 - DNA, 516 bp, synthetic construct
  misc_feature 1..516: note = Description of Artificial Sequence: Synthetic coding sequence
  source 1..516: mol_type = other DNA
atgatggaagtactgcctgggcggtgtgttccaatcgctaaacgcgagctcctgtgggctgggagcgcagggcttgcctgttggctcgccggggtgatcttcatcgaccggaaaaggacaggtgacgcaatctctgttatgtcggaggttgcccagaccctgcttacccaggatgtcagagtctgggtttttcccgaggggacgcggaaccataatgggtcaatgttaccttttaagcggggcgccttccacctcgccgtgcaggcccaggtaccgatagtgccaatcgtcatgagcagttatcaagatttttattgcaaaaaagagcgtagattcacaagcgggcaatgtcaagtaagggtgcttccccctgtgccaaccgagggactcaccccggatgatgtccccgccctggcagaccgggtcaggcattccatgttaactgtgttcagggagattagtacagatggcagaggcgggggcgattacctcaagaagcccggcgggggtggctag

SEQ ID NO: 106460 - DNA, 741 bp, synthetic construct
  misc_feature 1..741: note = Description of Artificial Sequence: Synthetic coding sequence
  source 1..741: mol_type = other DNA
atggaattgtggccttgtctggctgcagcccttcttctgttgctcttgctcgtgcagttaagccgggccgctgagttttatgcgaaagtcgcactctactgtgccctctgcttcacagtctctgctgttgcctcactggtatgtttactcagacatggcggaagaactgtcgaaaacatgagcatcatcgggtggtttgtgcgctcttttaagtacttttacggcttgaggtttgaagttcgggatcctaggcgactgcaggaagcccgtccctgcgtgattgtgagtaaccaccagagtattctcgacatgatgggactgatggaggtgctgccagagcgatgtgttcagattgctaagcgggagctgctgttccttggccccgtcggacttataatgtacctaggcggtgtgtttttcatcaatagacagcggtcgtctaccgccatgacggttatggccgatctgggcgagcggatggtgagggagaacgtgccaatagttccggtcgtctactctagtttttcaagcttctataacacaaagaaaaagtttttcacttctggtaccgttactgtacaggtactcgaagccattcctaccagcgggttaaccgccgccgatgtcccggccctggtcgatacctgccacagggcaatgaggaccacttttctgcacatctccaaaacgcctcaggagaacggggcaaccgccggcagtggcgtgcagccagcacaatag

SEQ ID NO: 106461 - DNA, 837 bp, synthetic construct
  misc_feature 1..837: note = Description of Artificial Sequence: Synthetic coding sequence
  source 1..837: mol_type = other DNA
atggagctgtggccctgtctcgccgccgctctcctcctgctcctgctgctggtacagctgagtcgcgccgcagagttttacgctaaggttgctctgtactgcgctctatgttttaccgtgtctgctgtggcttcgctagtatgtctgctgcgacacgggggacgtactgtggagaacatgagtattatcgggtggtttgtacggagctttaaatacttttatggcctgcgcttcgaagtgagggacccaagacggctgcaagaagcccgcccttgcgtgattgtctcaaaccaccagagtattctcgacatgatgggactgatggaagttcttccagaacgctgtgttcagatcgccaaacgggagctgctattcctgggacccgtcgggctgatcatgtatctgggcggcgtatttttcatcaatcggcagcgctcaagcacagcaatgactgtgatggcggacctgggcgagcgcatggtgagggaaaacctgaaggtctggatctaccccgagggaacgcggaatgataacggcgacctactgccatttaagaaaggagcattttacctggccgtacaggcccaagtgcctatcgttcccgtggtgtactcttcgttctcttctttttacaacacaaagaaaaaatttttcacatccggtacagtgaccgtgcaggttttagaggcgatccctacgtccggtttgacagccgccgacgttcccgcgttagtggatacctgccacagggccatgcggacgacgttcctgcacatctcaaagactccacaggagaacggagctaccgcagggagcggggttcaacccgcgcaatag

SEQ ID NO: 106462 - DNA, 837 bp, synthetic construct
  misc_feature 1..837: note = Description of Artificial Sequence: Synthetic coding sequence
  source 1..837: mol_type = other DNA
atggaattgtggccatgcctagctgccgcactgctgcttctactgctgctggtccaactgtctagagcagcggagttttacgctaaagtggctctgtactgcgcactttgcttcacggtcagcgcagtggctagtctggtgtgcttgctgcgccatggtggtagaactgtggagaatatgagcatcattggttggtttgtgcggtctttcaaatacttctacggcctcaggttcgaagtacgcgaccctagaagactccaggaggcgaggccttgtgtgatcgtgtccaatcatcagagtatcctagatatgatgggcctaatggaagtccttcccgaacggtgcgtgcagatcgccaagagggagctcctgttcctggggcccgtcggcctgattatgtatcttggtggcgtgtttttcatcaacaggcagcgcagctcgactgccatgaccgtcatggcggatttgggagagcgcatggtgcgggagaaccttaaggtgtggatttaccctgagggcactagaaacgataatggggacctcctgccctttaaaaaaggcgccttttacctggcagttcaggcccaggttcccattgtccctgtggtctatagttcattctcttctttctacaacactaaaaagaaatttttcacatcaggtacagttactgtccaagtgctcgaagccataccaacaagtgggctcaccgcagctgatgttcctgctctggtcgacacctgtcacagggctatgcgcaccactttcctgcatatatctaagactccgcaggagaacggggcaactgccgggtcgggcgtgcaacctgctcaatag

SEQ ID NO: 106463 - DNA, 1371 bp, synthetic construct
  misc_feature 1..1371: note = Description of Artificial Sequence: Synthetic coding sequence
  source 1..1371: mol_type = other DNA
atgtttctgctccttcccttcgatagcttaatcgtgaatctactggggattagcctgaccgtcctcttcaccttgctgctcgtgtttatcattgttcctgctatcttcggggtgtctttcgggattagaaaactctacatgaaatcattgctcaagatcttcgcctgggctaccttgcggatggagcgcggggcaaaggagaagaaccaccaactgtataaaccttacaccaatggtataatagctaaggacccaacctctttggaggaggagatcaaggagattcgccgtagcggcagctccaaggcgttggacaacacaccggagttcgaactgagcgacatcttttacttctgtcgaaaaggaatggaaactatcatggacgacgaagtcaccaagaggtttagcgcggaagagctcgagagttggaacctgctctcaagaaccaactacaatttccagtacattagcctgcggctaacagtgttgtgggggttaggggtgctcatccggtattgtttcctgctgcccctacgaatcgcccttgccttcacgggcattagcctcctcgtcgtagggacaactgtcgtcggctatcttcctaacggccgcttcaaggagttcatgtcaaagcatgttcatttgatgtgttataggatttgtgttagggctcttactgccataattacctatcatgaccgagaaaatagacctagaaacggcgggatctgcgtcgccaaccacactagtcccatcgacgttataatcctggcgtccgacggatactatgcaatggtaggtcaggtgcacggtggcctgatgggcgttatccagcgagcaatggtcaaggcctgcccccatgtatggttcgagcggagtgaggtcaaagatcgccacctcgtggccaaaaggcttactgaacacgttcaagataaatctaagttgcccatcctcatttttccagaagggacatgtatcaacaataccagcgtgatgatgttcaaaaagggctctttcgaaattggagccactgtataccccgtagccattaaatacgacccccagttcggggacgcgttctggaactcctccaagtatggcatggtgacctatctcctgagaatgatgacttcctgggccatcgtttgctccgtgtggtatcttccaccaatgacacgtgaagctgacgaagatgctgttcaattcgctaacagggtaaaaagtgccatcgcgaggcagggcggcttggtcgatctgctgtgggatggaggactcaagagagaaaaggtcaaagacacctttaaggaagagcaacagaagttgtattccaagatgatcgtggggaaccacaaagatcgctctcggtcgtag

SEQ ID NO: 106464 - DNA, 1305 bp, synthetic construct
  misc_feature 1..1305: note = Description of Artificial Sequence: Synthetic coding sequence
  source 1..1305: mol_type = other DNA
atggagggcgcagaactcgccggaaaaatcttatctacctggctaacccttgtgctgggatttatcttgcttccctcagtcttcggcgttagcctaggaatcagcgagatttacatgaagatcctcgtcaaaactctcgagtgggccaccatcagaatcgagaagggcacgcccaaagaatcaattcttaagaattcggcaagtgttggcataattcaacgagatgagtcccccatggaaaaagggttgagcgggctcagaggacgggacttcgagctgagcgacgttttttatttttccaagaaaggactagaggcgattgtcgaagatgaggtgactcagcgattttctagtgaggagctagtttcttggaaccttctgacccgtaccaatgtcaacttccagtatatttcgctccggctaaccatggtttgggttctgggcgtgatcgtccggtattgtgtgctactaccattacgtgtgaccttggcttttatcggcatctcactgttggtcattggcaccacactagtaggccagctgcctgacagtagccttaaaaattggttgtccgagctggtgcacctcacttgttgtagaatatgtgtccgcgctctttccgggactatccattaccacaataaacagtataggccacaaaaaggaggtatctgcgtggccaatcataccagtcccattgatgtgctgatcctgaccactgatggctgctacgcaatggtgggccaggtacacggtggcctgatgggcataatccagcgagcgatggtcaaggcttgcccccacgtgtggtttgaacgttctgaaatgaaggaccggcatcttgtgacaaagcgcctgaaggagcacattgcggataaaaagaagcttccaattctcattttccctgaaggcacctgtataaacaacacgtctgtgatgatgtttaagaaaggttcattcgaaatcgggggcaccatccaccctgtcgcaattaaatacaacccacagtttggagatgccttttggaatagtagcaaatacaacatggtctcctatctcctcaggatgatgacttcctgggcaattgtgtgtgacgtttggtacatgccgccaatgactagggaagaaggagaagatgccgtgcagtttgctaatcgcgtcaagagcgccatcgcgattcaaggagggttgactgaacttccctgggacggaggcctcaagagagccaaagtaaaggacatctttaaggaagagcagcagaaaaattacagcaagatgatcgtcggtaacgggagcttatcctag

SEQ ID NO: 106465 - DNA, 1305 bp, synthetic construct
  misc_feature 1..1305: note = Description of Artificial Sequence: Synthetic coding sequence
  source 1..1305: mol_type = other DNA
atggaaggagccgagcttgccggtaagattctttcgacttggctgaccttagtactcggctttatattgttaccctcggttttcggtgtgtctctagggatttcggaaatctacatgaaaatactggtcaagactctcgaatgggccaccattcgaattgagaagggaacccccaaagaatccattcttaagaacagtgcatccgtcggcatcatccagagagatgagagcccaatggagaagggcctctccgggttacgtggacgggattttgaattgtctgacgtcttctatttctctaagaaaggactggaggctattgttgaagacgaagtgacccaacggttttcctcggaggagctggtgtcctggaatcttctgactcggacaaacgtgaacttccagtacatatctctgagactgaccatggtgtgggttttgggggtgatagtgagatactgcgttttgttacccctacgggttacattggccttcataggcatctcactgctggtcatcggtaccaccctcgtgggccagcttcctgactcttccctgaaaaactggctatccgaactggttcatctcacatgctgccgaatatgtgtaagagctcttagcggaactatccactatcacaataaacaatatagacctcagaagggtggcatctgtgtcgccaatcacaccagcccaattgacgtgttaatactcactacggacggttgttacgctatggtggggcaggtgcacggcggccttatgggtatcatccagcgagcaatggtgaaagcttgtcctcacgtttggttcgagcggagcgagatgaaagaccggcacttggtcactaaacgcctgaaggagcatatcgccgacaaaaagaagctgccaatacttattttcccagagggtacatgcataaataatacaagcgtgatgatgtttaagaagggctcattcgagattggcgggaccattcatcccgtagcaattaaatacaatccacaatttggcgacgcattttggaactcttccaagtacaacatggtaagttacctcctccgcatgatgacctcatgggcgatcgtgtgcgatgtgtggtacatgcctccgatgaccagggaggagggcgaggacgctgtacagtttgcgaatagagttaaatccgccattgctattcagggaggcctgactgaactgccatgggacgggggcctcaaacgagctaaggtcaaagacatctttaaagaagaacaacaaaagaattattccaagatgatcgttgggaacggctccctgtcctag

SEQ ID NO: 106466 - DNA, 1506 bp, synthetic construct
  misc_feature 1..1506: note = Description of Artificial Sequence: Synthetic coding sequence
  source 1..1506: mol_type = other DNA
atgtttactctgccgcagaaggattttcgtgcaccgaccacttgcctggggcccacctgtatgcaggacctgggttccagccacggcgaagacctcgagggtgagtgctctagaaagctggaccagaaattacctgagctgagaggggtgggtgatccagctatgatttcaagtgatacctcttatctgagctctcgcggccggatgatcaaatggttctgggattccgcagaggaaggttataggacctaccacatggacgagtacgacgaggataagaacccatctggaattataaaccttgggaccagcgagaacaagctctgttttgacctgctgagctggaggctcagccagcgggatatgcaaagagtcgaacccagcctgctgcagtacgctgactggagggggcacttgttcttgcgcgaggaagtggctaaattcctgagtttttactgtaagtctcccgtacctctacgtccagagaatgtggtggtgctgaacgggggcgcatctttattttcagccctggctaccgtgctttgtgaggccggggaagccttcctcattcccacgccgtactatggcgctatcactcaacatgtatgtttgtacgggaatatacgcctggcgtatgtgtacctcgacagcgaggtgaccggcctcgatacaagaccattccagctgacagtagagaaattagagatggcactcagggaagctcatagtgagggggtgaaggtgaaaggcctcattctgatctccccgcagaatccactgggcgatgtttactcccccgaagagctacaggagtatcttgtttttgccaagcggcataggttgcatgtgattgttgatgaggtctacatgctgtctgtcttcgaaaaaagtgttggttaccggagcgtgctcagtctggaaaggctgcctgatccccaacgaacacatgtgatgtgggcaacaagcaaggatttcggaatgtcagggcttaggtttggaactctatatacagagaaccaggatgttgctactgctgtcgcaagcttgtgtcgctaccatggcttgagcggcctggtgcagtaccagatggctcagttacttcgggatcgcgattggatcaaccaggtgtatctgcccgagaatcacgcacgacttaaggccgcgcacacctatgtctccgaagagctgcgcgccctgggtatcccttttctgagccggggagctggattctttatatgggtagacctacggaagtacctgcccaaaggtacattcgaagaggagatgcttctgtggaggcggttcctggataacaaggtgctgttgagctttggcaaagccttcgaatgcaaagagcccggttggttccgattcgtgtttagcgaccaggttcatcgcctgtgtctgggaatgcagagagtccaacaagtgttggctggtaagtcacaagtggctgaggatccacgaccttcccagtctcaggagccaagtgaccagcggaggtag

SEQ ID NO: 106467 - DNA, 477 bp, synthetic construct
  misc_feature 1..477: note = Description of Artificial Sequence: Synthetic coding sequence
  source 1..477: mol_type = other DNA
atgtttacccttccccagaaagattttcgggcgccgaccacctgtcttggccctacctgcatgcaggatctcgggagcagtcatggagaagatttggagggagaatgtagtagaaagctggatcagaaactgcccgagcttcggggtgtgggcgaccctgcaatgatctcctctgacacttcataccttagcagcagaggacgaatgatcaagtggttctgggatagtgcggaggaagggtatcgtacatatcacatggacgaatatgacgaggacaaaaacccctctggcattatcaatctggggacctctgaaaacaaactttgttttgaccttcttagctggagaccacccggtggaagtggccaagttcctgtctttctgctgcaagaacccagcacaccgcagacaagggagtgcgggtgtcctgaatggtggtgcctggccctactctgttcagggcacggggccgtttag

SEQ ID NO: 106468 - DNA, 420 bp, synthetic construct
  misc_feature 1..420: note = Description of Artificial Sequence: Synthetic coding sequence
  source 1..420: mol_type = other DNA
atgtttactttaccacaaaaggacttccgggcccctaccacctgcctcggccctacgtgcatgcaggatcttggtagttcgcatggagaggaccttgaaggggaatgttcccgtaagctcgatcagaagctgcctgaactgcgaggcgtcggagatcctgccatgatctcctctgatacaagttacttatcgtcacgggggaggatgatcaagtggttttgggattcagcagaggagggatacagaacataccatatggacgagtatgacgaagataagaacccgagcggcattattaacctgggcacatccgaaaataaactctgttttgacctcttatcctggcggctcagccaaagggatatgcagagggttgaaccctctctgctgcagtatgcagattggcgcgggcatctgtag

SEQ ID NO: 106469 - DNA, 234 bp, synthetic construct
  misc_feature 1..234: note = Description of Artificial Sequence: Synthetic coding sequence
  source 1..234: mol_type = other DNA
atgttcacactgccccaaaaagattttcgagcccctactacatgtctaggaccaacttgcatgcaagacttggggagttctcatggcgaagacctagagggcgaatgctctcgcaagctcgaccagaaactgccagagcttagaggcgtgggggatcctgcgatgatttcgtccgacacatcttatctgtcatctagaggccgaatgatcaaatggttttgggatagcgcctag

SEQ ID NO: 106470 - DNA, 780 bp, synthetic construct
  misc_feature 1..780: note = Description of Artificial Sequence: Synthetic coding sequence
  source 1..780: mol_type = other DNA
atgtctaagtataagcttatcatgctgagacacggagagggagcttggaacaaagagaatagattctgctcttgggtggaccaaaaattgaatagcgaggggatggaggaggcccggaattgcggtaagcagttgaaggctcttaacttcgaatttgacctcgtttttacttctgtgttgaaccgaagcattcatacggcctggctgatccttgaggagttaggccaggagtgggtaccagtcgaaagcagttggcgccttaacgaacgacattacggtgccttgatcggattaaacagggagcagatggctctgaaccacggagaggaacaggtgcgcctgtggcggcgttcctacaacgtgacacctccacctattgaagaaagccatccatactatcaagaaatctataatgacagaaggtacaaggtgtgcgacgtccccctggaccagttaccaaggagcgaaagcttaaaggatgtgctggaaaggctgctgccgtactggaacgagaggatagccccagaagttctaagggggaaaacaattctgatctccgcccacggtaacagttctagggcactgctgaaacatctcgagggtatcagtgatgaggacataatcaatatcaccctgcctactggcgtccctattcttctggagctggatgaaaacctgcgtgcggtggggcctcatcagttcctcggcgatcaggaagcaattcaggcggccatcaagaaagtggaggaccagggcaaggtcaaacaggcgaaaaaatag

SEQ ID NO: 106471 - DNA, 780 bp, synthetic construct
  misc_feature 1..780: note = Description of Artificial Sequence: Synthetic coding sequence
  source 1..780: mol_type = other DNA
atgtccaaatacaaactaattatgcttcgccacggagagggggcatggaataaggagaaccgcttctgtagctgggtcgaccagaaattgaactctgaaggaatggaagaggcaaggaactgcggcaagcagcttaaagcactaaatttcgagttcgacttagtgtttacatctgtcctgaaccgatctatacacactgcctggttgatcctcgaagaactgggccaggagtgggtaccagtggaatcaagttggcgactgaacgaacggcattatggtgctctgattggccttaaccgtgaacagatggccctgaaccacggggaggaacaggtgcgactctggcgccgaagctacaatgttactccccctccaatcgaggagagtcatccatattaccaggaaatttacaacgacaggagatataaggtatgcgacgtaccactggatcagctacccagaagcgagtctctgaaggacgtgcttgagaggcttctgccatactggaacgagaggatcgctcccgaggtgttgagaggcaagactattttaattagcgcccatggcaattcctctcgtgccctactgaagcacttagagggtatcagtgacgaggacatcatcaatataactctgcccacaggagtacctattctgcttgagttggatgagaatctccgtgccgtcggacctcaccagtttttaggggatcaggaggccatccaggccgccatcaaaaaagtagaagatcaaggaaaagtcaaacaggcaaaaaaatag

SEQ ID NO: 106472 - DNA, 780 bp, synthetic construct
  misc_feature 1..780: note = Description of Artificial Sequence: Synthetic coding sequence
  source 1..780: mol_type = other DNA
atgtctaagtacaagctgattatgctgcgccacggcgagggggcatggaataaagaaaatcgcttctgttcatgggtggatcagaaactgaactctgaagggatggaagaggccagaaattgcggaaaacagctgaaagctctcaatttcgagtttgatctagtttttacttctgtcctcaacagaagtatacacacagcatggctgattctcgaggagctgggccaggaatgggtacccgtcgaatcatcttggaggctgaatgaaaggcattatggcgctctgataggattaaacagggagcagatggccctgaatcacggggaggagcaggtgcgcctgtggagaaggtcatacaatgttacaccgcctcccatcgaggagagccacccttactatcaagagatatataacgatcggagatataaggtatgtgatgttccattggatcagctcccacgaagtgagtccctaaaggacgtcctggagcgcctgctgccatactggaacgagaggatagcaccagaggtgttaagaggtaagaccattctgataagcgcccatggaaactctagtcgagcactgttgaaacatctagagggtatcagtgacgaagatatcattaacatcaccctgccaaccggcgtgcctattctgctggaactcgacgaaaatttacgcgctgtagggccacaccagttcctgggtgaccaggaggccatacaagctgctataaaaaaggtggaggaccagggcaaggtaaaacaagctaagaagtag

SEQ ID NO: 106473 - DNA, 237 bp, synthetic construct
  misc_feature 1..237: note = Description of Artificial Sequence: Synthetic coding sequence
  source 1..237: mol_type = other DNA
atgtctaagtacaagcttattatgctgcgacatggcgaaggagcttggaacaaggaaaaccggttctgttcatgggtggatcagaaactgaactcagagggtatggaggaggcgcgcaattgcggaaaacagctgaaagcgctcaattttgagttcgatctcgtttttacaagtgtcctgaatcggagcatacacaccgcatggctgattcttgaagaacttggtcaagaatggtag

SEQ ID NO: 106474 - DNA, 894 bp, synthetic construct
  misc_feature 1..894: note = Description of Artificial Sequence: Synthetic coding sequence
  source 1..894: mol_type = other DNA
atgaatcgtggtttctcccgcaagagtcacactttcctgcccaaaattttttttcgcaagatgagctcctcgggagcgaaggacaaacctgaattgcaatttcccttccttcaggatgaggacacagttgctactttactggaatgcaagaccctgttcatcctgcgtggactgcccgggtccggaaagtcgacacttgcccgcgtaatcgttgacaagtatcgggacgggaccaagatggtgtccgctgacgcctacaagattacccctggcgcccgcggggctctgaaagaactgcggcaattcgttccaggcgatgagcctcgggagaagatggacctggtgacgtattttggcaagagacctcccggggttctacattgtacaacaaaattttgtgattacggaaaggcaccaggtgcagaggaatacgctcagcaggatgtattaaaaaaatcgtatagtaaagcgttcaccttgacaatttccgcactctttgtgactcccaagaccaccggcgcaagggtcgagctcagtgaacagcagctgcagctatggccttccgacgtagacaagctgtcccctacagataacttgcctaggggtagtagagcccatattaccctcggttgcgccgccgacgttgaagccgtgcagaccggcttggatcttttagagattctgcgccaggagaagggtggttcacggggagaagaggtgggggagctgtcacgcggcaaactctattccttaggcaacggcaggtggatgctgacgttagccaagaatatggaagtaagggctatctttactgggtattatggcaaaggcaaacccgtcccaactcagggtagcaggaagggtggagcattgcaatcctgtactattatttag

SEQ ID NO: 106475 - DNA, 1206 bp, synthetic construct
  misc_feature 1..1206: note = Description of Artificial Sequence: Synthetic coding sequence
  source 1..1206: mol_type = other DNA
atgtctagtagcggtgcaaaggataaaccagaactacagtttccatttcttcaagatgaggacacggtggccaccttgctggagtgcaagaccctgtttatcttgcgtggactcccagggtctgggaagtccacactggcccgcgtgattgtcgacaagtaccgggacggcactaagatggtgtcagccgatgcctataagattacaccaggtgccaggggtgcttttagcgaagagtataaacgcctagacgaagatctcgcagcttattgtcgcagaagggatatcagaattttggttctggatgatacaaaccatgaaagagagagacttgagcagctctttgagatggctgatcagtaccagtaccaggtggtactagttgaacctaaaacagcatggcgactagactgcgctcagctgaaggagaagaaccagtggcagctgtcggccgacgacctgaagaagctgaagccgggcttagaaaaggacttcctgcccctctactttggctggttcttgactaagaagagtagcgaaactctaagaaaggcaggccaggtgtttctggaagaactcggcaaccacaaggcattcaagaaggaactccgccagttcgttccaggtgacgagccgcgagagaaaatggacctggtcacctatttcgggaaaagaccccccggagtcctccattgtacgacaaaattctgtgattacggaaaagcgcctggcgcagaagagtatgctcagcaggacgttctaaagaaatcttattcaaaggccttcaccttgaccatctctgctctcttcgtgacaccgaaaactaccggggcgagggtcgagctgagcgaacagcaactgcagttgtggcccagcgacgttgacaaattgtcccctacagacaacctgcctagaggttcaagggcacacattacactgggttgcgctgccgacgtggaggctgtgcaaacggggctggaccttctggagatactcaggcaggagaaaggtggctcccgcggagaggaggtgggcgagttatcacgaggaaaactgtatagcttgggaaatggccgctggatgctcactcttgctaagaacatggaggtccgagcaatttttactggatactacggtaaggggaagcctgttcccacacagggcagcagaaaagggggcgctctgcaaagctgtacaatcatatag

SEQ ID NO: 106476 - DNA, 1266 bp, synthetic construct
  misc_feature 1..1266: note = Description of Artificial Sequence: Synthetic coding sequence
  source 1..1266: mol_type = other DNA
atgaatcgcggcttttccaggaagtctcacacattcctccctaagatattcttcagaaagatgagttccagcggcgctaaggacaagcctgaattacagttccctttccttcaagacgaggacaccgttgcaactctgttagagtgtaagaccctgttcatattgcggggtctgccaggaagtggcaagtcgaccctggctagggttatcgtggacaaataccgtgacggcaccaaaatggtatctgccgacgcttacaagattacaccgggcgcaagaggagccttcagtgaggagtataagaggctggatgaagacctggccgcgtactgtcggcgcagagatattcgaatcctagtgctcgacgatacaaaccacgagcgggagcggcttgagcagctgtttgaaatggcagaccagtatcagtatcaggttgtcctcgtcgagcccaagactgcatggagactggactgtgctcaattgaaagaaaagaatcagtggcagctctcagccgacgatctgaagaagctcaaacctggcctcgagaaggactttcttccactttactttggatggttcctcactaagaagagctccgagacgctccgaaaagctggacaggtgttcctggaagagcttggcaaccataaggccttcaagaaagagctcagacagtttgtgcctggcgacgaaccacgcgaaaaaatggacctcgttacgtacttcgggaaacggcccccaggcgtcctgcactgtacaaccaaattttgtgattacggaaaagctcccggggccgaggaatacgctcagcaggatgttctgaagaagagctactccaaagcctttactcttactattagcgcccttttcgtcaccccaaaaacaaccggggctagagtggaactttctgaacagcagttgcagctgtggcccagtgatgttgacaaactgtcgcctactgataatctgccccgcgggtcgagagcccatatcacgctaggctgcgccgccgatgtagaggctgtgcagacagggctagatctgctagagatcttgcggcaggaaaagggagggtcacgcggtgaggaggttggggagctttctcgaggaaagctgtactccctgggaaatgggcggtggatgctgacgcttgctaagaacatggaagtcagggctattttcacaggctactatggaaaagggaaacccgttccaactcagggttccagaaaaggaggagcactgcagtcatgcacaatcatctag

SEQ ID NO: 106477 - DNA, 174 bp, synthetic construct
  misc_feature 1..174: note = Description of Artificial Sequence: Synthetic coding sequence
  source 1..174: mol_type = other DNA
atgagcagttccggtgcaaaggacaaacccgagctacagtttccattcctgcaggatgaggatacagtagctaccttactggagtgtaagacactgttcatattacgaggattaccaggatccgggaaaagcacactggcccgggtcatagttgataagtaccgagatgggtag

SEQ ID NO: 106478 - DNA, 1419 bp, synthetic construct
  misc_feature 1..1419: note = Description of Artificial Sequence: Synthetic coding sequence
  source 1..1419: mol_type = other DNA
atgaaattccttatatttgctttcttcggcggggtgcacttattaagcctgtgttcagggaaagctatatgcaaaaacggcattagtaaaagaacattcgaggaaattaaggaggaaatcgcttcctgcggagacgtcgccaaagctataataaatctggccgtatatggcaaggcacaaaacaggtcctacgagagactagccttactagtcgataccgtgggcccccgtttatctgggtcaaaaaatcttgagaaagccatccagatcatgtaccaaaacctccagcaggatggcctggaaaaagtgcatctcgagcccgtacggatcccacattgggaaaggggggaggagtccgccgtgatgcttgaaccgcgcatccacaagattgcaatcctgggattaggatctagtattgggacgccgccagaaggcatcaccgctgaggtgctggtagtcacatcatttgacgagctccaacggagagcgagcgaagcgaggggaaaaatcgtggtatataatcagccctatattaactattccaggacggtgcaatataggacacaaggagccgtggaagcagctaaagtcggtgcgctggccagtctgataagatcggttgcgagctttagcatctactctccccacaccggcattcaggagtaccaggacggagtccctaagattcctaccgcttgcatcactgttgaagacgccgaaatgatgtcgcgtatggcctcccatgggatcaaaatcgtgatccagctcaagatgggagccaaaacctaccctgacaccgacagttttaacaccgtggctgaaatcacggggagcaaatatcccgagcaggtggttctggtgagcggtcatcttgatagttgggacgtcggtcagggcgccatggatgatgggggtggggcatttatttcatgggaggcgttgtctctcatcaaggacttaggacttaggcccaaacggacactcaggctcgtgttatggactgctgaagaacaggggggagttggcgcgtttcaatattaccagctccacaaggtcaacatcagtaactacagcctcgttatggagtctgatgcgggcacttttctgccaacgggtctgcagttcacagggtctgaaaaggcacgagctattatggaggaagtgatgtccctgctccagcctctgaatatcacccaggttctctctcatggggaaggcacagatattaacttttggatccaggccggagtccctggagcatcgctgttagacgatctgtacaaatacttcttttttcaccactcccacggtgatacgatgaccgtcatggatcctaagcagatgaacgttgctgctgcagtctgggccgttgtcagctatgtggtggccgacatggaggagatgttaccccggtcctag

SEQ ID NO: 106479 - DNA, 981 bp, synthetic construct
  misc_feature 1..981: note = Description of Artificial Sequence: Synthetic coding sequence
  source 1..981: mol_type = other DNA
atgtctggacttggcaaaaagcatctcctgctgatgggagaatttttttcctacggcaccaaaatactttaccagaataccgaagctctgcagagtaagttcttcagcccgctccagaaagcgatgctgccccctaatagcttccagggcaaggtagcatttattaccggtggtggcacggggcttggcaagggcatgaccaccctcctgagctctctaggggcacagtgtgtgatagctagtagaaaaatggatgtgctgaaggccaccgctgaacagataagtagccaaactggcaacaaagtccacgctatccaatgcgacgtgagagatcctgatatggtgcagaatactgtttccgaattaatcaaggtggcgggccatccaaacattgtcatcaataacgcagccggaaatttcatttctcctaccgaaagactgagcccgaatgcttggaaaactatcaccgatatcgtgctgaatggcaccgcttttgtgactctagagatcggcaagcagctaattaaagcacaaaaaggcgccgcttttttgagcatcacaaccatttatgctgaaaccgggagtggatttgtggtgccctctgcctccgcgaaggccggtgtcgaagccatgtctaaatccctagcagccgaatggggcaagtacggaatgcggttcaatgttattcagccaggtcctatcaaaacaaagggggcattttccaggctggacccgactgggaccttcgagaaagaaatgattgggcggattccttgcggacggctcggcactgtagaggagctggccaaccttgcggcatttctgtgcagcgactacgcctcctggattaatggggctgtcatcaaatttgacgggggagaagaggttctgattagcggcgagtttaacgacctgaggaaagtaacgaaagagcaatgggatacaatcgaggagctgattcgcaagacaaaaggcagttag

SEQ ID NO: 106480 - DNA, 1551 bp, synthetic construct
  misc_feature 1..1551: note = Description of Artificial Sequence: Synthetic coding sequence
  source 1..1551: mol_type = other DNA
atggaaccagccgtttcgttggccgtctgcgctctgttgtttctgctctgggtgagactcaaaggtctcgaattcgtcctgatccatcagagatgggtgttcgtttgtctgttcctgctgccgctttccctcatcttcgatatttactattacgtgagggcatgggtggtgtttaaacttagttcagctcctcgactccacgaacagcgtgtgcgagatattcagaagcaggtaagggagtggaaagagcaaggttctaaaacctttatgtgcactgggcgtcctggctggcttaccgtgagtctacgcgtcggcaaatacaaaaagactcacaagaacatcatgataaacctcatggatattctggaggtcgatacaaagaagcagattgtgagagttgaacccttagtgaccatgggccaggttaccgcgctgcttacatcaataggatggacactgccggtgttgcccgagctggacgacctcacagtgggtgggttgatcatgggtaccggaatagaaagttcctcccataagtatggcctgttccagcatatctgcacagcatacgaactggtcctcgcagatggcagctttgtacggtgcactccaagcgagaactcagacctgttttatgctgttccatggtcctgtggtacgctgggcttcctggtggccgccgaaattagaattattccagcaaagaagtatgtcaagctgaggttcgaacccgtacgaggtttggaagccatttgtgctaagttcacccatgaatcgcaaaggcaggagaatcactttgtggaggggctcttgtactccctggacgaagcagtcatcatgaccggcgtcatgactgacgaagctgagccgtccaagctcaattcgattgggaattactacaaaccttggtttttcaagcacgttgaaaactacttaaaaaccaaccgagaaggcctcgagtacatacctcttaggcattattatcaccggcatactcggagcatattctgggagctgcaggacattattccattcggcaacaacccaatttttaggtatctattcgggtggatggtacctcctaagatctctctgctgaagctcacccagggcgaaactctgcgtaagctgtatgaacagcatcacgtcgtccaggatatgttagttcccatgaagtgtttgcaacaggctcttcatactttccagaatgatatccacgtgtatccaatttggctgtgtccctttattctgccatctcagcccggtttagttcaccctaaaggaaatgaagccgagctttacattgacatcggcgcttatggtgaacccagagtaaagcacttcgaggctcgaagctgtatgcgccagctggagaagtttgtgcggagcgtgcacgggtttcaaatgctctatgcagattgctacatgaatcgggaagaattctgggagatgttcgatggctccctttaccataaattgcgcgaaaaactcgggtgccaagacgcattccccgaagtgtacgataagatttgtaaggccgcgcggcattag

SEQ ID NO: 106481 - DNA, 465 bp, synthetic construct
  misc_feature 1..465: note = Description of Artificial Sequence: Synthetic coding sequence
  source 1..465: mol_type = other DNA
tagagccttttgaagctcactcagggggagacgctgcggaaactgtacgaacaacaccacgtggtgcaggacatgctggttcctatgaagtgtctgcagcaggccctacacaccttccaaaacgacattcacgtatacccaatctggctgtgtccttttatcctgccttcccagccaggtcttgtccaccctaaggggaatgaggctgagctgtatattgacatcggtgcttatggagaaccacgggtgaaacatttcgaggcaaggagctgcatgaggcagctggagaagtttgtcaggagcgtgcatggattccagatgctttacgctgactgttacatgaatagggaagaattttgggaaatgttcgatggttccctgtaccacaaacttcgggaaaagcttggttgccaggacgcctttcctgaagtctatgacaaaatctgcaaggccgcccggcattag

SEQ ID NO: 106482 - DNA, 1428 bp, synthetic construct
  misc_feature 1..1428: note = Description of Artificial Sequence: Synthetic coding sequence
  source 1..1428: mol_type = other DNA
atgggagccggggaacagaatcgccaatccgctcactgcgtacagggcatctgtgggtacctggagggcgacgaggagggagaagaaggcgaagtgcgcagtacccaggttcgtgagtggaaggagcagggctcgaagactttcatgtgtaccggacgacctggatggcttacagtgtctctgagggttggcaagtataagaaaacccacaagaacatcatgataaatctgatggacatcctggaagttgatacaaagaagcagattgtcagggtggagccactggtgacaatgggccaggtgacagcactgctcacttcaataggatggacactgcctgtgctgcccgagctcgacgacctgacggtcggaggactgatcatgggcactggcatagagtcttcttctcacaagtatggcctttttcaacatatctgtactgcgtatgaactggtattggccgacgggtcttttgtgcgttgtacacccagtgaaaatagtgatctgttctatgctgtcccttggagctgcggaactttggggtttctcgtggctgccgaaatccgaattatcccagcaaaaaagtacgtcaagctcaggttcgaaccggtccgaggcctcgaagctatctgcgcgaagtttacacacgaaagtcagagacaggaaaatcactttgtagaaggtctgctatattctctagacgaggcagtaatcatgacaggtgtgatgacagacgaggcagaaccgagcaagctcaactcaataggtaactattataaaccatggttttttaagcacgtcgaaaattacctcaagactaaccgggaaggcctcgagtatattccgctccgccactactatcaccggcatacaaggagtatcttttgggagcttcaggacataattccatttggaaacaatccaatatttcggtatctgttcggctggatggtgccacccaagatatccttgcttaagctaacacagggcgagactctgcggaagctgtacgagcagcatcatgtggtgcaggatatgctcgtgccaatgaagtgtctgcaacaggcattgcacaccttccaaaacgacatccacgtataccccatctggctctgtcctttcattttgccttctcaaccagggttggttcacccgaagggcaatgaggccgaactgtacattgacattggagcatacggggaacccagggtgaagcatttcgaggcaagatcttgcatgcgccagctagagaaattcgttcgatctgttcatgggttccagatgctgtatgcggactgttacatgaatcgtgaggaattctgggagatgttcgatggttccctatatcataagttgagagaaaaactcgggtgccaggacgcattccctgaagtgtatgacaagatttgcaaagcagcacggcactag

SEQ ID NO: 106483 - DNA, 903 bp, synthetic construct
  misc_feature 1..903: note = Description of Artificial Sequence: Synthetic coding sequence
  source 1..903: mol_type = other DNA
atgggaaccggcattgagtcctccagccataaatacggcctctttcagcatatatgcaccgcctatgagctggtgctagcagatggctcattcgtccgctgtaccccctcagagaattctgatctgttctatgcagtgccctggagctgcgggacactcggttttctggtagcagccgaaatacgaattatccccgccaaaaagtacgtaaagcttagattcgaacctgtaagaggtttagaagctatatgtgcaaaattcacccatgaaagtcagagacaggagaatcacttcgtggaggggctgttatactccctggatgaagccgtgattatgacaggcgtgatgaccgacgaagctgagccatccaaggacatcattccttttggtaataacccaatctttagatatctgttcgggtggatggtgcctccgaagatctctcttctcaagctaacccagggagaaacgctgcgaaagctctacgaacagcaccatgtcgtgcaagacatgcttgtgccaatgaagtgcctccagcaggctctgcatactttccagaatgacattcacgtttatcccatctggctatgcccatttatactccccagccagcccggactagttcatcccaaaggcaatgaggcagaactatacatcgacataggggcttacggcgaacctcgcgtgaaacactttgaagcgcggagctgcatgaggcagctggagaaatttgttagatctgtgcatggcttccagatgttatatgccgactgctatatgaatagagaggagttctgggagatgttcgatgggtctctttaccataaactgagagagaagctgggatgtcaggacgcttttcccgaggtgtacgacaaaatatgtaaggcagccaggcattag

SEQ ID NO: 106484 - DNA, 729 bp, synthetic construct
  misc_feature 1..729: note = Description of Artificial Sequence: Synthetic coding sequence
  source 1..729: mol_type = other DNA
atggagcctgctgtttctctggcagtatgcgcactcttattcctcctgtgggtcagactaaaggggcttgaatttgtgcttatccaccaacgttgggtgttcgtctgtctgtttctgcttccactgtccctgattttcgatatctactactatgtccgggcttgggtggtgttcaaactcagcagcgctcctcggcttcatgaacaaagggtgcgagacattcaaaagcaagtaagggaatggaaggaacaaggctccaaaacgtttatgtgcacaggccgccctgggtggctgaccgtatcacttagggtcggtaagtataagaagactcacaaaaatatcatgataaacctcatggacattttggaagtcgatacttttcagaacgacatccacgtgtatccaatatggctctgccccttcattttgccctcccagcctggcctggtccatccaaagggcaacgaggcagaactgtatatcgacattggcgcttacggcgagcctagagttaaacacttcgaggcacgttcctgcatgcgacagctcgagaagttcgtgcgctctgttcacgggttccagatgctgtacgcagactgctacatgaatcgtgaggagttctgggagatgttcgacggcagcctgtaccataaactgagagaaaagctcgggtgccaagatgcctttcctgaggtgtacgataaaatctgcaaggccgctagacactag

SEQ ID NO: 106485 - DNA, 1203 bp, synthetic construct
  misc_feature 1..1203: note = Description of Artificial Sequence: Synthetic coding sequence
  source 1..1203: mol_type = other DNA
atgatggatcttcggaatacccccgcaaaatcgctggataaattcatcgaagactatcttcttcccgatacctgcttcaggatgcagattaatcatgctatcgacattatttgcgggtttctaaaggaacgctgtttccggggctcctcctaccctgtatgcgttagcaaggttgtaaaaggtgggtctagtggtaagggcaccactctaaggggacgttcagacgccgacttggtggttttcctgagtccgctcaccactttccaggatcagctaaacagacgcggggaattcatccaggaaatcagacggcagctggaggcatgccaaagggaacgtgccttcagcgttaaattcgaggtccaagccccaagatgggggaacccccgggcactttccttcgtcctttcttcgctgcagctgggcgagggagtggagtttgatgtgctgccggccttcgacgcccttggccaacttacaggcggttataaacccaaccctcaaatctacgtgaaactgatagaggaatgcaccgatctacagaaggaaggagaattctccacgtgttttactgaactgcaaagggatttcttaaagcagcgccctacaaagctgaagagcctgatcagactggtgaagcattggtatcagaactgcaagaagaaacttggtaagctgccacctcagtatgccctcgagctgctgacagtgtacgcctgggaacgcgggagtatgaaaacccacttcaataccgcgcagggattccgtaccgttttggagctggtgatcaactatcagcagctgtgcatttactggaccaaatactacgactttaagaatcccatcatagaaaaatatttgaggcgtcaactaacaaagcctagacctgtgattctggatcccgctgatcccaccggtaaccttggtgggggcgatccgaaaggctggcggcaattggctcaggaggctgaggcttggctgaattacccttgttttaagaactgggatggaagtcccgtgagttcctggatcctactggcagagtctaattccgctgacgatgagacagacgatccaaggcgataccagaagtacggttatatcggcacgcacgagtatccccattttagccacagaccatccacgctccaggccgcttctactccccaggccgaggaggattggacctgcaccatcctttag

SEQ ID NO: 106486 - DNA, 1146 bp, synthetic construct
  misc_feature 1..1146: note = Description of Artificial Sequence: Synthetic coding sequence
  source 1..1146: mol_type = other DNA
atgatggacctccggaatacaccagccaagtcgctggataagtttatagaggactatctgcttccagacacttgcttccgcatgcagataaatcatgctattgatatcatctgcggtttcctgaaagagcgatgctttaggggatccagctaccccgtttgcgtgagtaaagtcgttaagggtggctcctccggaaagggaaccaccttgagaggccgttctgatgccgatctggtggtcttcctgtcaccactaaccactttccaggaccagctcaatcgcagaggtgaattcatacaggagatcaggcgccagctcgaggcttgtcagcgcgaaagggccttcagcgtgaaattcgaggtacaagccccacgatggggaaacccaagggctctcagcttcgtgctgagttcactgcagctaggcgagggcgttgagttcgacgtgttaccagccttcgatgccctggggcaattgacgggaggatacaagcctaacccacaaatatacgttaagttaatcgaggaatgtacagatctccagaaggaaggcgagttctctacctgctttactgagttgcagcgggacttccttaaacagaggccgactaagctaaagagtctaattcggctggtgaagcattggtaccaaaactgtaagaagaagctagggaaactgcctccccagtacgctcttgagctattaaccgtatatgcctgggaacgcggcagcatgaaaacccacttcaatacagcgcagggctttagaacagtgttggaactcgtaatcaactatcaacaactgtgcatctactggaccaagtactatgattttaagaatcctattatcgagaaatatctgcgccgccagctgaccaagccccgccctgtaatcctcgatccagccgaccccactgggaatttagggggcggcgatcctaaggggtggcggcagttagcccaggaggctgaagcctggctcaattacccctgttttaaaaactgggatggatcacccgtatcctcttggatcctgctggtgaatttaacactggtgggccgcaggaactatatcatttccgagcacgccgtgaacctgcagcaaacacggggagccagcctgagctacagtttccaagtggcctag

SEQ ID NO: 106487 - DNA, 1245 bp, synthetic construct
  misc_feature 1..1245: note = Description of Artificial Sequence: Synthetic coding sequence
  source 1..1245: mol_type = other DNA
atgatggatcttagaaacacacctgcgaaaagtctggacaagttcatcgaagactacctgctcccagacacgtgctttcgcatgcagataaaccacgcgatcgacatcatctgtggctttctgaaggaacgctgcttccgcggctctagctatccggtatgtgtgtccaaagtggtgaaggggggcagttcaggaaaaggaaccactctgaggggaagaagcgacgcagatctggtcgtgtttttgtctccgttaactaccttccaggaccagctgaatcgtcggggagaatttattcaggaaatccgtcgccagctggaggcctgccagagagaacgtgcgttcagcgtgaagttcgaggttcaagctccccggtgggggaacccccgagctctgagttttgtactgtccagtctgcaacttggagagggcgtggagttcgatgtgctccctgcattcgacgcacttgggcaactgacaggtgggtacaagcccaacccacagatttacgtgaaactaatagaggaatgtactgacctccagaaagagggcgagtttagcacgtgcttcactgaactgcagcgagatttcctaaagcaacggcctacgaaactcaagtccctgattagactggtgaagcactggtatcaaaactgtaaaaaaaagctcgggaagttacctccacagtacgccctggaactgctgacggtgtatgcttgggaacgtggcagcatgaaaacgcatttcaatacggcacaggggttccgcactgtgctcgagctggtcatcaattaccaacagttatgtatttattggaccaaatactatgatttcaaaaacccgataatcgagaagtacctgaggcggcagctgaccaagccaagacctgtgatattggaccctgccgatccaaccgggaacctgggcgggggtgaccctaaaggctggcgccagctggctcaggaggccgaggcctggctgaactacccttgttttaagaattgggatggcagtccagtctcaagctggatattgcttacccagcacaccccaggtagcatccatcccaccggccggaggggtctggacctgcatcacccactgaacgcctccgctagctggggcaaggggcttcagtgctacctcgaccagtttttacattttcaggtggggcttctgattcagcgaggccagtcgtcttccgtgagctggtgtattattcaggatcgcactcaggtttcttag

SEQ ID NO: 106488 - DNA, 1095 bp, synthetic construct
  misc_feature 1..1095: note = Description of Artificial Sequence: Synthetic coding sequence
  source 1..1095: mol_type = other DNA
atgatggacctcaggaacacccctgccaaatctctggacaagtttatcgaggattacttactcccagatacttgctttcgcatgcagattaaccatgccatagatattatctgcgggtttttaaaggagcgctgttttcgcggttctagttatcctgtctgtgtgtccaaggtggtcaagggaggttccagcggcaagggcactaccttgcgtggccgcagtgatgcagacctggtagtgtttctgagtccattgactacatttcaagatcagctgaatcgcaggggggagttcatccaggagatcagaaggcagctggaggcctgtcagcgggagcgagccttcagtgtgaagttcgaagtccaggcccccaggtggggaaacccgagagctctgagctttgtgctcagcagcctccagctgggggaaggcgtggagtttgacgtactgcccgcttttgacgcgctaggccagctgacaggggggtacaagcccaatcctcagatatacgtcaagctgatcgaggagtgcactgatctacagaaggagggagagttcagtacttgctttaccgagttgcagcgcgatttcttgaaacaacgccccacaaagttaaaaagtctgatccggctcgtcaagcattggtaccagaactgcaagaagaaactcggcaaactcccacctcaatacgcactcgaactgcttaccgtttacgcctgggagcgaggttccatgaagactcattttaacaccgcacaggggttcaggaccgtgcttgagctcgttatcaattaccaacagttgtgtatctactggactaagtactacgacttcaagaatccgataattgagaaatacctccgacgccagctcacaaaaccaaggccagttatcctcgaccccgccgatccgaccggcaatcttggtggcggggatccaaagggatggaggcaactcgcccaggaggctgaggcgtggctcaactatccgtgttttaaaaactgggacggctcccccgtcagcagttggattcttctggtcaggcctcccgcaagttctctgcctttcattcccgcccccctacatgaagcctag

SEQ ID NO: 106489 - DNA, 2160 bp, synthetic construct
  misc_feature 1..2160: note = Description of Artificial Sequence: Synthetic coding sequence
  source 1..2160: mol_type = other DNA
atgggtaacggcgaaagccaacttagctccgtgccagcccaaaagctgggctggttcattcaggaatatttgaaaccatacgaggagtgtcaaaccctcatcgatgaaatggttaacactatctgcgatgtgctgcaggagcctgaacagtttcccctggtgcaaggggtagcaatcggaggtagctatgggagaaaaactgtgcttcgggggaacagcgacggaaccttggtgctcttcttcagcgacttaaagcagtttcaggaccagaagagatcccagagggatatcctcgacaaaacgggcgataaattaaagttttgcttgttcacaaagtggctcaagaacaactttgagatccagaagtctttggacggattcacaattcaggtcttcaccaaaaatcaacggatttccttcgaggtactggcggcctttaacgccttgagtcttaacgacaaccctagtccctggatataccgggaactgaagcgctccctcgacaagactaacgcctcacccggcgagtttgctgtttgttttactgagctgcagcagaagttttttgacaatagaccaggtaaactgaaggatctcatcttactgatcaagcactggcaccagcagtgccagaagaagattaaggatcttcctagcctaagcccatatgctttagagctgctcactgtttatgcatgggagcagggttgtaggaaagataactttgatatagctgaaggcgttagaaccgtgttggagcttatcaaatgtcaggagaagctgtgtatctactggatggtgaattataactttgaggatgaaacgattagaaacattctgctgcatcagctccagagtgcgcgccctgtcattctcgatcctgtggatcctactaacaatgtgtcgggagataagatctgctggcaatggttgaaaaaagaagcacagacctggttgacgtcccctaatctcgacaatgaactgccagctcccagttggaacgttttgcctgcccccctgtttactacccctggtcacctactagataaattcatcaaggagtttctccagcctaataaatgcttcctggaacagatcgattctgccgttaacattatccggacctttcttaaggagaactgctttaggcagagcacagcgaagatccagattgtacggggcgggagcaccgcaaaaggtacagctctaaagacaggcagcgacgccgatctggtcgtgttccataattctctgaagtcatacacaagtcaaaaaaacgagcggcacaagatcgtcaaggaaatccatgagcaactgaaagccttttggagggaaaaggaagaggagctggaagtcagcttcgagccacctaagtggaaggcccccagggtgctgtcattctctctgaagtcaaaggtgctgaatgaatcagtgtctttcgacgtgcttcctgccttcaacgccctcggccagttgagcagtggatctaccccttctccagaagtgtacgccggcctcattgatctgtataaatcatcagacctcccagggggcgagttcagcacgtgctttactgttctgcagagaaattttattagaagccgcccaacaaaactgaaggaccttattcggttagtcaagcattggtataaggagtgtgaaagaaagttgaaaccgaagggctccctgcctcccaaatacgccctggaactcctgacaatatatgcctgggagcagggatccggggtgcccgacttcgacactgcagagggtttccgcaccgtattggagcttgttacacagtatcagcagctctgtatcttttggaaagtcaactacaactttgaagacgagacggtgcggaaatttctgctttcgcaactgcagaaaacccgccccgtaattctggaccctgctgagcccactggggacgtcggggggggcgacagatggtgctggcatctcctggctaaggaggctaaggaatggttgtcttctccttgtttcaaggatggaacaggaaaccccattcctccatggaaagtacctactatgcaaacacccggatcatgtggcgcgcgcattcacccaattgtgaatgagatgttttccagccgtagtcacagaatccttaacaataatagcaaaaggaacttttag

SEQ ID NO: 106490 - DNA, 2064 bp, synthetic construct
  misc_feature 1..2064: note = Description of Artificial Sequence: Synthetic coding sequence
  source 1..2064: mol_type = other DNA
atgggcaacggcgaatcacaactgtcttccgtgccagctcagaagcttggctggttcattcaggaatacctaaagccatatgaagagtgccagacgcttatcgatgagatggtgaacactatctgcgacgtgctgcaagagcctgagcaattccccctggtgcagggggtcgctatcgggggctcgtacggccgtaaaacagtcctacggggcaattcagacgggacacttgtccttttctttagcgatctgaaacaatttcaggaccagaaaaggagtcagcgtgacattctggacaaaactggggacaagttaaaattctgtctctttactaaatggttgaagaataattttgaaattcagaagtctttggatgggtttacaatccaggtgttcaccaagaatcagaggatcagcttcgaggttttagccgctttcaacgccctaagcctaaacgacaacccttccccatggatctacagagagttgaaaagaagtctcgacaagaccaatgcttcccccggggagttcgctgtgtgcttcacagagctgcagcagaagttctttgacaatcgtcccgggaagcttaaagatctgattctcctgattaaacactggcatcagcaatgccaaaagaaaatcaaggatctgccttccctcagtccttacgctttagaactgttgaccgtgtatgcatgggaacaggggtgtcgaaaggacaactttgatatagccgaaggggtgcgaacagtgctcgaattgattaagtgtcaggagaaattatgtatttattggatggtcaattacaatttcgaggatgaaacaataagaaacatcttgttacaccagctgcaatctgccagacccgtgattctggaccccgtcgaccccaccaacaacgtgtccggggacaaaatatgctggcagtggctgaagaaagaagcccagacctggctgacatcacccaacttagataatgaacttccagctccatcatggaacgtcctaccggccccactgttcactactcctggacatctgttggacaaattcattaaggagtttttgcagcctaataaatgttttctggaacagatcgactcagctgtgaatattattcggacttttcttaaagagaattgtttccggcagagtaccgctaagatacagatcgttcgtggtggcagtaccgcaaaaggcactgcactcaaaacgggaagcgatgccgacctggtggtgtttcataatagcctgaaatcctacactagccagaaaaatgaacggcacaaaattgtcaaggaaatccatgaacagcttaaagctttttggagggagaaggaggaagagctggaagtgagcttcgagcctccaaagtggaaagccccacgagtgctttcctttagcttgaaatccaaagtgctcaatgaaagtgtatcgtttgacgttctgccggcatttaacgctctgggacagctctcaagcggcagtacgcccagtccggaggtgtatgcaggactaatcgatctatataagagttcagatttgcccggtggggaatttagtacttgttttacagtgttgcagaggaactttattcgctccaggcctaccaagctcaaagacctgatacgcctcgtgaagcattggtataaggagtgcgagcggaagcttaaaccaaaaggctccctgccacctaaatacgctcttgagctgctgaccatctatgcatgggagcaagggtcgggcgttcctgattttgacacagctgaaggttttcggaccgtgctggagctggtaacccagtatcagcagctctgtatcttctggaaggtcaactataacttcgaagatgagacagtgcggaaattccttttgtcccagctgcaaaaaacaaggcccgtcattttggacccggcagagcccaccggagacgtcggcggaggcgaccgatggtgttggcacctgttggccaaggaggcgaaggagtggctttcgagcccctgtttcaaggatgggaccggtaaccccattccaccatggaaagtcccagtgaaggtgatctag

SEQ ID NO: 106491 - DNA, 519 bp, synthetic construct
  misc_feature 1..519: note = Description of Artificial Sequence: Synthetic coding sequence
  source 1..519: mol_type = other DNA
atgggtaacggggaaagtcagttgtcaagtgtccccgcccagaagctgggttggtttatccaggagtacctaaagccctacgaggagtgccagactcttatcgatgaaatggtgaacacaatttgtgatgtgctgcaggagcccgagcaattcccacttgtgcagggggtcgcaattggggggagctatggccggaagacagttctgagggggaactcggatggtacactggtgttgttcttctctgatcttaaacagtttcaagaccagaaacgcagtcagagagatattctggacaagacaggggataaactgaaattctgcctgtttactaagtggctgaaaaataacttcgaaatccagaaaagtctcgacgggttcaccattcaagtctttactaaaaaccaacgcatttccttcgaggtgttggcagcttttaacgccctgtccaaacactgttgggtctctggagaaaagagccagcggagtggatgtcagaccgctctctgcaacctgtag

SEQ ID NO: 106492 - DNA, 1053 bp, synthetic construct
  misc_feature 1..1053: note = Description of Artificial Sequence: Synthetic coding sequence
  source 1..1053: mol_type = other DNA
atggcaactgtgggagcccctaggcacttttgtcgctgtgcatgcttctgtactgataatctgtacgtcgcgcgatacggcctccatgtgcggtttagaggagagcagcagctgcggagggactatggacccatactgagaagtcggggctgtgttagcgccaaagatttccagcaactgctcgccgaactcgagcaggaggtggaacgtaggcagagattgggccaggagtccgctgcacgaaaggcgctcatcgccagtagctaccacccggcccgacctgaggtatatgattctttacaggatgcagccctggcacccgaatttctggctgtcacagagtactcagtctctcccgacgccgacctgaagggccttttacaaagactggagaccgtctctgaggagaaacgtatatacagagtccccgtattcaccgcccctttctgccaagccctgctcgaagagctcgaacatttcgagcaatccgacatgcctaaaggtcggcccaatacgatgaacaactatggcgtgttgctccatgagctgggtctcgatgaacctctcatgacgcctcttcgtgagcgattcctgcaacctctcatggcattactgtatcctgattgcggaggtgggaggctggactctcacagggcctttgttgtgaagtacgctcccggccaggatctcgagctgggctgtcactatgacaacgccgagttgacgctcaatgtggccctggggaaggtattcactggtggggcactctacttcggcggactgtttcaagcccctacagcactgactgaaccactcgaggtggaacatgtcgtgggacaaggcgtgctgcaccgggggggccaactgcacggtgctcggcctttaggaaccggggaacggtggaatctggtcgtgtggctcagggcgagcgcagtgcggaattctttgtgtcctatgtgctgtcgcgagcctgacctggtggacgacgagggattcggagacggctttacgagggaggaacccgcaaccgtggacgtctgcgccctgacctag

SEQ ID NO: 106493 - DNA, 3261 bp, synthetic construct
  misc_feature 1..3261: note = Description of Artificial Sequence: Synthetic coding sequence
  source 1..3261: mol_type = other DNA
atggacctgtactccacccccgctgccgcattagaccgatttgttgcccgtagactccagccccgcaaagaatttgtggagaaggcaaggagagctctcggggccttagccgctgctctaagagaacgtggcggcagactaggagctgcagccccccgtgtcctcaagaccgtgaagggtggctcctctgggcgaggaacggccctgaaaggcggctgtgatagcgagcttgtgatctttctggactgtttcaaatcatatgttgaccagagggctaggagggcggagatcctcagcgagatgagggcatccctggaaagctggtggcagaaccctgtgccaggtctgcgacttacttttccggaacagtccgtccccggcgccctacagtttcgactcacgagcgttgacctcgaggactggatggatgtttcgctggtccctgccttcaacgtgttagggcaggctggatccggcgtgaaacctaagccccaagtgtacagtacactgcttaactctggatgccaagggggggaacacgctgcctgcttcacagagttaagacggaattttgtcaacatccgccctgcaaagctcaagaacctgattctgctggtgaagcattggtaccaccaggtgtgcctgcaagggttatggaaagaaactctccctcctgtgtatgcgttagaactcctcacaatcttcgcttgggaacagggatgtaagaaagatgccttctccttagcggaaggattgcgcaccgtcctaggattgatccagcagcaccagcatctttgcgtcttttggaccgtaaattacggattcgaggacccagctgtgggacagttcctgcagcggcaactcaagagaccacgcccagtcatccttgatcccgccgacccaacgtgggacctgggcaatggcgcagcctggcattgggacctgctagctcaggaagcagcctcatgctacgatcatccttgttttcttcggggaatgggtgaccccgtccagagctggaagggaccaggcctgccacgcgcaggctgctcgggattggggcatcccattcagctggatccaaatcagaagactccggagaattccaaatctttaaacgccgtatatccacgggcaggttccaagccccccagctgtccggctccagggccgactgggcagccggcgagttcttcagttccggggatggcactggatctgtcccagattcctaccaaggagctcgacaggtttatccaggatcatctgaaaccatcgccccagtttcaggagcaggtaaagaaagctattgacattattctcaggtgcctacatgaaaattgtgtgcataaggcctctagagtgtccaaaggagggtcttttggtagaggtactgacctccgggatggatgcgatgttgagctgatcatcttcctgaattgctttaccgattataaggatcaagggccgagacgcgccgagatccttgacgagatgcgtgctcagttggagtcatggtggcaagatcaggtgccgtcactgtcactgcaatttcctgagcaaaatgtgcctgaggccttgcaatttcagctggtatctacagccctgaaaagttggacagatgtctcccttctgcctgccttcgatgctgtaggccagttgtcctctgggacgaagccaaacccacaagtctattcccgacttttgacctccggttgccaggagggtgagcacaaggcctgtttcgcggagttacgtagaaactttatgaacatccgtcctgtaaaactgaagaatctcattctgcttgttaagcactggtatcggcaggtggccgctcagaataagggaaaaggaccggcccccgcatcattgccgcccgcctatgccttggaactgctgaccatctttgcctgggagcagggttgccggcaggattgttttaacatggcccaaggattccgcaccgtgctgggtcttgtgcagcaacatcagcaactgtgcgtatactggactgtgaattattcaaccgaggatcctgctatgcggatgcaccttttgggccagctcaggaaacccagacccctggtgctggaccccgcagatcccacctggaatgtcggccacggctcgtgggagttactggcacaggaagctgccgccctgggcatgcaggcatgttttctatctagggacggaacgagcgtccaaccctgggatgtcatgccagccctgttgtaccagacccctgcgggcgatttagataaattcatctccgagttcctccagcccaatagacaattcttagcacaggtgaataaagccgttgatactatatgtagttttctgaaggaaaattgcttcagaaattcgcccatcaaggtaattaaagtggttaaaggcggaagcagcgcaaaaggcaccgccctgcgggggcggtcggacgctgacttggttgtcttccttagctgtttttctcagtttaccgaacagggaaataagagagccgaaatcatctctgagatccgtgctcaattggaagcctgccagcaagagcgacagttcgaggtgaagtttgaggtatcgaaatgggagaatccgcgcgtcctgtcattcagcctcacatcacagacaatgcttgatcagagtgtagatttcgatgtgctgcccgcgttcgacgccttaggacagctggtgtccggaagccgcccgtcctcccaagtgtatgtcgatctgatccattcttactctaatgcaggggagtacagtacctgctttactgagctgcagagggatttcatcataagccggcctacgaagttgaagtcactgattcggctcgtgaagcattggtaccagcagtgtactaagattagcaagggaagaggaagtctgcctccccagcacggattagagttattgacagtctacgcgtgggaacagggggggaaagactcccagtttaacatggcagaggggttccgaactgtcttagagctggtcactcagtaccggcaactctgtatttactggaccatcaattacaatgccaaagacaaaacagtgggtgattttcttaaacaacaactgcagaaaccccggcccatcatactggaccctgcggatccgacgggaaatctgggtcacaacgctcgttgggatctactcgctaaggaagccgccgcctgtactagtgctttgtgctgtatggggagaaatgggatccctatccagccttggcctgttaaggcagccgtatag

SEQ ID NO: 106494 - DNA, 1545 bp, synthetic construct
  misc_feature 1..1545: note = Description of Artificial Sequence: Synthetic coding sequence
  source 1..1545: mol_type = other DNA
atggctctcatgcaggagctgtactccactcccgcctccagacttgatagcttcgtcgctcaatggctccagccacacagggaatggaaagaggaagtgctcgatgccgtgcggacagttgaggaattccttaggcaggagcacttccagggaaagagaggcctcgatcaagacgtgagagtcctaaaagttgtcaaagttggatccttcggtaatggaacggtgctgcgcagtaccagggaggtggagctagtggccttcctctcatgctttcactccttccaagaggcagccaaacaccataaggacgtgctccggctgatttggaagacgatgtggcaaagccaggacctcctggacctgggcctcgaagacctcaggatggaacaacgagtgcctgatgccctcgtctttaccattcagactcgcggaacagccgagccaattactgtgacgatcgtacctgcctacagggctctggggcctagtctgccaaactcccaacccccccctgaggtttacgtgtctctcatcaaggcttgcggtggacccggaaacttttgcccatctttctctgagctgcaaaggaactttgtgaagcacaggcctacaaagctcaagtctttgctgcggctagtcaaacattggtaccagcagtacgtgaaggcgaggagtccacgcgctaacctgccaccactgtatgctcttgagctcctcaccatctacgcttgggagatggggaccgaggaagatgagaattttatgctggacgagggattcacaaccgtaatggatctcttgcttgaatatgaggtgatttgcatatactggaccaagtactacactctgcacaacgcaatcattgaggactgcgtccgaaaacaattgaagaaggaacgccccatcatcctggaccctgccgacccgacactaaacgttgccgaggggtatcgttgggatatcgttgcccagcgcgcaagtcagtgcctgaaacaagattgttgttatgataatcgagagaaccccatttccagttggaatgtcaaacgagcccgcgatatccatctgaccgtcgagcagcgtggctatcccgacttcaacctcattgtgaatccttacgaacctatccgcaaggtgaaagagaaaattcgtcgtacaaggggctattccggactgcagaggctgtctttccaagtgccagggtccgagcgtcagttgctctccagtcggtgcagcttggccaagtacggaatcttttcccacacgcatatctatctgttggagacaattccctctgaaatccaggtgtttgttaagaatcctgatggaggcagctacgcctatgctattaatccaaatagcttcatactgggcctgaagcagcagatcgaggaccagcagggcctccctaagaaacaacaacagcttgagtttcaaggacaggtcctccaagattggctgggcctcggcatctacggcatacaggatagtgacaccctaatcctgagtaagaagaagggtgaggctctgtttcctgcaagctag

SEQ ID NO: 106495 - DNA, 768 bp, synthetic construct
  misc_feature 1..768: note = Description of Artificial Sequence: Synthetic coding sequence
  source 1..768: mol_type = other DNA
atggccctgatgcaagaactgtactctacacccgcttctcggctcgattctttcgttgcccagtggctccagccacacagggagtggaaagaggaagtcttggacgctgtgaggaccgttgaggagttcctcaggcaagagcactttcagggcaaacgggggctggaccaggatgtcagagttttgaaagtggtgaaagtgggaagcttcggaaatggaaccgttctccgaagcacacgtgaggtagagcttgtagcttttctcagctgtttccactccttccaggaggccgccaaacaccataaagatgtactgaggctgatttggaaaactatgtggcagtcgcaggacctgctggatcttggactggaggatctaaggatggagcagagggtccctgacgcacttgtgttcactattcagacccgggggaccgccgaaccgatcaccgtaaccatcgttcctgcctaccgggccctgggaccatctttgccgaattcacagccacctcctgaggtttacgtgtcattgatcaaggcctgcggtggcccggggaacttctgcccctccttttccgaactccagcgtaactttgtaaagcaccggcccacaaagctcaagtccctcctccgcctcgtcaaacactggtaccagcaagctcatcaccctggcagcggcagaccccaccctcagagaggacgacgcgttcagatgggtcatcggtgtagcgagggcctgccagtccccgagacgggactgctcctgtag

SEQ ID NO: 106496 - DNA, 1737 bp, synthetic construct
  misc_feature 1..1737: note = Description of Artificial Sequence: Synthetic coding sequence
  source 1..1737: mol_type = other DNA
atgcctgactccaatttcgcagaaagaagtgaggagcaggtttctggggctaaagtaattgcccaagctcttaagactcaggacgtagagtatatcttcggtattgtgggaatcccggtgacggagattgccatcgctgcacagcagcttgggatcaagtatatcggcatgaggaacgaacaggcagcctgctatgcggcctccgccatcggctatctgacttcgcgtcctggtgtctgtctcgtggtcagtggtccgggactgattcacgcactcggcggtatggctaacgctaacatgaactgttggccactgctagtgataggaggctcctccgagcggaaccaggagactatgggcgctttccaggaatttccacaagtcgaggcctgtaggctgtacacaaaatttagcgccagaccaagctccatcgaggcaattccctttgtgatagaaaaagcagttagatccagcatctatggccggcctggtgcctgctatgtggacatcccagctgatttcgtgaacctccaggtgaatgtgaactcgattaagtacatggagcgttgtatgtccccacccatctcaatggctgagacaagcgcggtttgtacagccgcatcagttattcgcaatgctaaacagccactgcttatcatcggcaaaggcgccgcttatgcgcatgccgaggagtccattaagaagctggtggaacaatataaactgccattcctgcccacgccaatgggaaagggagttgtccctgacaaccacccttactgcgtcggggctgcacgctctcgggcactccaatttgcagacgttatcgtcctgttcggagcacggctgaactggattctccacttcgggctgccaccccggtatcaacccgacgtgaagttcatccaagtcgacatctgtgccgaagaactgggcaataacgtgaagccagcagtgacactcttggggaatatccatgcagtaaccaaacaactgctagaagagctcgataaaaccccatggcagtatcctcccgaaagcaagtggtggaaaaccttgagggagaaaatgaagtcgaatgaggcagcttccaaagaactggcttcgaagaaatctctcccaatgaactattatactgttttttatcatgtgcaagagcaactacctcgggattgcttcgtcgtgtcagagggagcaaacaccatggacatcgggcgcactgtcttgcagaactacctgcctcgccatcggctggacgctggcacattcggcacgatgggcgtcgggctggggttcgccatcgccgccgccgtggtggcaaaggacaggagcccgggccaatggattatctgtgtagaaggcgactctgcatttgggttctccggaatggaggtggagacaatatgcaggtacaacctgcccattattctcctcgtggtgaacaataacggtatctaccagggttttgatactgacacttggaaggaaatgctgaagttccaggacgcgacagccgtggtcccccctatgtgtttgttgcctaattcacactacgaacaagtaatgactgcatttggggggaaagggtacttcgtacaaacacctgaagaactgcaaaagagccttaggcaatcactggctgataccactaaacccagtctcatcaatattatgatcgagcctcaagccaccagaaaggcccaggacttccactggctcacccggtccaatatgtag

SEQ ID NO: 106497 - DNA, 1563 bp, synthetic construct
  misc_feature 1..1563: note = Description of Artificial Sequence: Synthetic coding sequence
  source 1..1563: mol_type = other DNA
atgcctggctccctgccattgaacgccgaagcctgttggcccaaggacgtaggcattgtagccctcgagatctactttccgtcacaatatgtggaccaggctgaactggagaagtacgatggtgtggacgctggcaaatatactatcgggctaggccaggccaagatgggattttgcacggatagggaggacatcaattcactctgtatgacagtcgtgcagaatctgatggagcgaaataatttgtcatacgactgcatcgggcggcttgaggtagggactgagacaatcattgacaagagcaagtccgtgaagacaaatttgatgcagctgttcgaagagagcggcaacaccgacatagaggggatcgatacaacaaatgcctgctatggaggaaccgccgccgtcttcaatgctgtgaattggatagagtcctccagctgggatggtcgctatgcccttgttgttgctggagatattgctgtgtatgccactgggaacgctaggcccacaggaggcgttggcgccgtggccctgctcattggcccaaacgcacccctgattttcgagcggggactccgcggaacacacatgcagcacgcctacgacttctataagccagatatgttatccgagtaccccatagttgacggcaagttaagcatccagtgctacctctcagctctcgatcgatgctactccgtatattgcaagaagattcacgctcagtggcaaaaggagggcaatgacaaggacttcaccctgaatgactttgggtttatgattttccattcgccttattgcaaactggtgcagaaaagcttagctcggatgcttttgaacgactttcttaacgaccagaaccgcgataaaaactcaatttattccgggctggaagcctttggagatgtgaagttagaagacacctacttcgaccgggatgtggagaaggcattcatgaaggcatcatcagagttgttttcacagaagacgaaggcgtcattgctggtgtccaaccagaatgggaacatgtatacgtcgagcgtatatggatctctggcttctgtactggcacagtactctccccagcagcttgccggtaaacgaattggggtgttcagctacggctccggcttggccgccacactgtactccctgaaagtaacacaagacgccactcccggcagtgccttagataaaataaccgctagtctgtgcgacctgaaatcaagactggattcacgcacgggcgtggcccctgatgttttcgctgaaaatatgaaactccgagaagatactcaccatctggtgaactacatccctcaggggtcaattgattctttatttgaagggacgtggtacctcgtcagggtcgacgaaaagcatcgcaggacctatgctaggcgtccgacacccaatgacgacacactggatgaaggcgtgggactggtgcactcgaatattgccactgagcatattcccagccccgcgaagaaagtgccgagactccctgccacagctgcggaacctgaagccgctgtgatctcaaatggagaacattag

SEQ ID NO: 106498 - DNA, 1563 bp, synthetic construct
  misc_feature 1..1563: note = Description of Artificial Sequence: Synthetic coding sequence
  source 1..1563: mol_type = other DNA
atgccaggttccctccctctgaacgccgaggcgtgttggccgaaggacgttggaatcgttgcacttgaaatttattttccctcccagtacgtggatcaggccgaactggaaaaatatgacggagtcgacgctggcaagtacactattgggctcggacaggctaaaatgggcttctgcacagaccgggaagatatcaattcattgtgtatgacagtcgtgcagaatttgatggagaggaacaatctcagctacgactgcatcggtcgcctggaagtcgggactgaaaccattattgataagtccaagagcgtcaaaaccaacctcatgcagctctttgaagaatctggcaatacggatatcgagggtatcgacaccacgaatgcatgttatggcgggactgctgctgtattcaacgcggtgaattggattgaaagttctagctgggacggtcgatacgcactggtagtcgccggggatattgctgtgtatgcaactggcaacgcccgacctactggcggagtgggggcagtggctctgctgattgggcccaacgcccccctcatctttgagagaggcctgcggggaacccacatgcaacacgcttatgacttctacaaaccggacatgctatctgaataccccatagtggatggcaagctgtccatccagtgctacctgtctgccctggatcggtgctacagtgtttattgcaaaaaaattcatgctcagtggcagaaggagggaaacgacaaagattttacactaaacgactttggattcatgatttttcacagcccatactgcaaattggtgcagaagtctctggcccgtatgctgctgaatgactttctcaatgatcagaaccgcgataagaattcaatctactcggggcttgaggccttcggtgatgtcaagcttgaagatacttactttgatagagacgtggagaaagcatttatgaaggcatcctcagagctgttcagccaaaagaccaaggctagtctgctggtgtccaaccaaaatgggaacatgtacacctcctcagtttatggctccctggccagcgtgcttgcccaatactcacctcagcaattggctggaaagcggattggtgttttttcttacggtagcggcctcgcggcgactttatattcactgaaggtgacccaggatgccacacccggctctgccttagacaagatcaccgcctcactgtgcgatcttaaatctagattagacagtagaaccggtgttgcaccagatgtgttcgcagagaacatgaagctcagagaagatactcaccatctggtgaactatattccacaggggtccatcgactctcttttcgagggtacatggtacttggtgagagttgacgagaaacatcggcggacctatgctcggaggccaacacccaacgatgacactcttgacgaaggggtggggctggtccattccaacatcgccacagaacacattccaagtccagcaaagaaagtgccccgccttccagctactgccgctgagcctgaggccgcagtgatttctaatggcgaacactag

SEQ ID NO: 106499 - DNA, 291 bp, synthetic construct
  misc_feature 1..291: note = Description of Artificial Sequence: Synthetic coding sequence
  source 1..291: mol_type = other DNA
atgcctggcagcctgccacttaatgccgaggcgtgctggccgaaggatgtaggcattgtggccctggagatctacttcccttcgcaatatgtggaccaggccgaactggagaaatatgatggcgttgatgccggtaagtacaccatcgggcttgggcaggccaaaatgggcttctgtactgatcgggaagatatcaacagcctgtgcatgacagtggtgcaaaacctgatggaaagaaataatcttagttatgactgcattggaagactagaggtcggcacagaaacatag

SEQ ID NO: 106500 - DNA, 1530 bp, synthetic construct
  misc_feature 1..1530: note = Description of Artificial Sequence: Synthetic coding sequence
  source 1..1530: mol_type = other DNA
atgccgggctccctgcccctaaacgcagaggcttgctggcccaaggatgtgggcattgtggcactggagatctacttccccagtcaatatgtggaccaggcagagcttgagaagtatgacggcgtggacgcggggaagtacactatcggactcgggcaagcgaaaatggggttctgtaccgaccgcgaggatattaactctctgtgcatgacagtggtccaaaatctaatggagcggaataacctctcctatgattgcatcggcaggcttgaagtgggaactgaaaccataatcgataaatctaagtcagtgaaaacaaatttaatgcagcttttcgaagagtctggcaacactgatatagaaggaattgacaccaccaacgccgtaaattggatcgagagttcctcatgggacggccggtacgccctagtggtcgccggggatattgctgtgtacgcgacaggcaacgcgagacccaccgggggagtgggcgcagttgccctcctgattggacccaacgcaccactaatttttgagagggggcttcgagggactcacatgcaacatgcttacgacttttataagcccgatatgctgtccgagtacccaattgtggacgggaaactgtcaatccagtgctacctcagcgccttggaccggtgctattcagtgtactgtaaaaagattcatgcccagtggcaaaaggagggcaacgacaaagatttcacactgaacgactttgggtttatgatctttcactccccttactgtaaactcgtacagaaaagcctggcacggatgctgcttaatgattttctgaatgatcagaacagggataagaactctatctactcgggcctggaagcattcggtgatgtgaagctagaggatacttattttgaccgggatgtggaaaaggccttcatgaaggcgtcctctgaactcttctcccagaagactaaagctagtctgctggtctcaaaccagaacgggaacatgtacacctctagcgtatacggctccttagcttctgtcctcgctcaatactcccctcagcagctcgctggaaagcgcatcggtgtgttctcatacgggtccgggctcgccgccacactgtactccctcaaggtgacacaagacgctacacctggctctgcactcgataagatcaccgctagtctctgcgacttgaaaagtaggctagacagtcgtaccggcgttgctcccgatgtgttcgccgagaacatgaagttgcgggaagacacccaccacctcgttaactatattcctcagggctcaattgactcactcttcgagggcacatggtatttggtgcgtgtggatgaaaaacaccggaggacatacgctagaagacctacccccaatgatgatacactagatgagggggttggcttggtgcactccaatatagctactgagcatatcccttccccagccaaaaaggtgccccggctgccggccaccgcagctgaacctgaagctgcagtcatctccaatggtgaacattag

SEQ ID NO: 106501 - DNA, 1527 bp, synthetic construct
  misc_feature 1..1527: note = Description of Artificial Sequence: Synthetic coding sequence
  source 1..1527: mol_type = other DNA
atgcagaggttactgaccccagtgaaaaggattctccaactgactagagccgtgcaggagactagcttgacacccgccagattactccctgtcgcccaccagaggttctctacagccagcgctgtacccctggcaaagacagatacttggcctaaggatgtcgggatactcgcgctggaggtgtattttcccgcccaatatgttgatcagacagacctggagaaatacaataacgtggaggcagggaagtataccgtggggctgggccaaactagaatgggcttttgttccgtgcaggaggatattaattcactatgcctgactgtggtgcagagactgatggagaggatccagttaccatgggactcagtgggacggcttgaggtcggcaccgagacaattatagataagagcaaagccgtcaaaactgtgcttatggagctgttccaggacagtggtaatacagatatcgagggaattgatacaaccaacgcttgttacggcggcaccgccagtctcttcaacgcggccaattggatggagtcctcaagttgggatggcaggtacgccatggtagtttgtggggacatagcggtgtacccctccggaaacgctcggccgaccgggggggccggagcggtcgccatgctgattgggcccaaggctcccctcgccttagaaaggggcttgagaggaactcacatggagaatgtgtacgatttttacaaacctaacctcgcttctgagtacccaattgtggatggaaaattgagtatccagtgctacttgcgggcactggaccggtgttacacatcgtatagaaagaaaattcagaatcagtggaaacaagcgggctccgacaggcccttcacccttgatgaccttcagtacatgatatttcacacccccttttgtaagatggtccagaaatcgttagcacggctcatgtttaacgacttcctcagtgcttcatcggacacacagactagcctctacaagggattggaagcgttcggcggcctgaaacttgaagacacctacaccaacaaggatctggacaaggccttacttaaggcctctcaggacatgtttgacaagaagactaaggccagtctctatctttccacccacaacggtaacatgtacacctcttctctctacggctgtctggcatcgctgctgtcgcatcattcagcccaagaactggccggatctcgcattggagcattcagttatggttcaggccttgccgcttcattcttcagctttagggtctctcaggacgcggctccgggaagccccctggataaattggtttcttctacctcagacctgcccaagcggctagcatcacggaagtgcgtgtcaccagaggagtttacggaaatcatgaatcagagggaacagttttatcataaggtaaatttctctccaccaggcgacactaatagcctgttccccggaacctggtatctcgagcgagtagacgaacagcaccggagaaaatacgcaagaaggccagtgtag

SEQ ID NO: 106502 - DNA, 1401 bp, synthetic construct
  misc_feature 1..1401: note = Description of Artificial Sequence: Synthetic coding sequence
  source 1..1401: mol_type = other DNA
atgcaaaggcttctcacccccgtcaagcgaattctccagcttacaagagccgtgcaggagacgagcctgactccagccaggttgctcccagtggcccaccaacgtttctcgacagctagcgcagtgccactggcgaagacggatacatggcccaaagatgtggggatactggcgctcgaggtgtacttccctgcgcagtatgttgaccagacagatctggaaaagtacaataacgtggaggccgggaaatataccgtaggcctgggccagactcgcatgggattctgctccgttcaggaggatattaacagcctttgtcttaccgttgtgcagagactaatggaaagaatacagttgccctgggactctgtcggccggctcgaagttggcacagaaacaataatcgataaatctaaagcggttaagacagttctgatggaactctttcaggactcagggaacacagacattgaaggcatcgatacgaccaatgcgtgttacggcgggactgccagtttattcaatgcagctaattggatggaatcctctagttgggatggactccgtggcacccatatggagaacgtgtacgacttctataagcccaatctcgctagcgaataccccattgtggacgggaagctgtctatacagtgctatttacgcgcccttgaccggtgctatacgtcctatagaaaaaaaattcagaaccagtggaagcaggccggttccgatagaccgtttaccctggacgatctccagtacatgatctttcacacgcccttctgtaagatggttcagaaaagcctggcgagactcatgtttaatgatttcctctccgcttcatctgacacccagaccagcctctacaagggtctcgaggcgtttgggggcctcaaattggaagacacatacacaaacaaggacctggataaagcgctgctgaaggcctcacaggatatgttcgataaaaaaacaaaagcttctctctacctttccacacacaatggcaatatgtacacatcgtcgctctacggctgtctcgccagcctcctgagccaccactcagctcaggaactcgccggttctaggattggggccttttcttacggctcgggactggcagccagctttttcagctttcgtgtctctcaggatgcagcaccaggctctcctttggacaagctggtgagttctacatctgatttacccaagcgtctagcatcgcgcaaatgcgttagcccagaggagttcaccgaaatcatgaaccagagagagcagttttatcataaagtcaacttctctccgccaggcgacacaaatagtctgtttcccgggacctggtaccttgagcgggtcgacgagcagcatcgcagaaagtacgctcgtcgtcccgtgtag

SEQ ID NO: 106503 - DNA, 1161 bp, synthetic construct
  misc_feature 1..1161: note = Description of Artificial Sequence: Synthetic coding sequence
  source 1..1161: mol_type = other DNA
atgggtcagcgcgagatgtggagactgatgtcaagatttaatgcttttaaaaggaccaacactatcctgcatcacctgcggatgtcaaaacatactgacgccgccgaggaagtgctgctggagaaaaagggctgtaccggagtcatcacacttaatcgaccaaagttcctaaatgctctgacgctcaacatgatccgacaaatctacccccagttgaaaaaatgggagcaggatccagaaacgttcctaatcatcataaagggtgccggcggcaaggcattctgcgcgggaggggacatccgcgtcatttctgaagccgagaaggccaaacaaaagatagcaccagtgttcttccgcgaagagtacatgctcaacaacgccgtcggttcatgccagaaaccatacgtggcattgatccacgggatcacaatgggaggtggagttgggctctccgtccacggccagtttcgggtcgctaccgaaaagtgcctgttcgcaatgcccgaaaccgccattggtctgtttcccgacgtcgggggcgggtattttctgcctaggctccaaggaaaacttggctattttctcgcacttactggctttcgattgaagggacgcgacgtctatcgggccggtatagccacccacttcgtggactccgaaaaactggctatgctggaagaggatctgcttgcccttaaatcaccctctaaggagaacatcgcaagcgtcctggagaactatcataccgagtccaagatcgacagagataaatcgttcatcttggaggaacatatggataagatcaattcctgtttctccgcgaataccgttgaagagattatagaaaatcttcagcaggatggctcgtcattcgcacttgagcagttaaaagttatcaacaagatgagtcccactagtctgaagattaccctccggcagctgatggaaggatcttctaagaccctacaggaagttcttacaatggagtatagacttagtcaggcatgtatgaggggacacgattttcacgagggcgttcgagccgtgttgatcgataaagatcaatctcccaaatggaaaccggcagacctgaaggaggtcaccgaggaagacctgaacaaccacttcaaatcactgggatcctccgaccttaaattttag

SEQ ID NO: 106504 - DNA, 1017 bp, synthetic construct
  misc_feature 1..1017: note = Description of Artificial Sequence: Synthetic coding sequence
  source 1..1017: mol_type = other DNA
atgggccagcgcgagatgtggcgactgatgagccgctttaacgcgtttaagagaacaaacaccattcttcaccatctgaggatgtcaaagcacactgacgcagcagaagaggttctcctcgaaaagaaaggttgcaccggggtgataacattaaatcggcctaagtttctcaatgctctgacactcaatatgatcaggcagatttatccccagcttaaaaagtgggaacaggatcctgagactttcctgattatcattaagggagctggtggcaaagcattctgtgctggcggtgacattcgggtcataagtgaggctgagaaagctaaacaaaagattgctccggtcttctttcgtgaagagtatatgctcaataatgctgtcggcagctgccagaagccttatgtcgccttaatccacggtatcaccatggggggaggggtgggcctcagcgtccacggccagttccgggtagcaaccgagaagtgcttattcgcaatgccagagaccgccatcggacttttccccgacgtgggcggcggatactttctgccgcgtctccagggcaaactgggctactttctggcactaactggtttccggctgaagggtagggatgtctacagggccgggattgccacacacttcgttgacagcgagaagttagcaatgcttgaggaggacctcttagctctcaaatcccctagcaaagagaatatcgcttccgtcctggagaattatcatacagaaagtaagatcgaccgggacaaatcattcattttggaggagcacatggacaaaataaattcctgtttttccgctaacactgttgaggaaataattgaaaacttgcagcaggacggctcgagtttcgccctggaacagctcaaggtgatcaataagatgagtcctaccagcttgaagatcactttgcgacaactgatggaggggtcatctaaaacactgcaggaggtcctcaccatggaataccgactctcgcaggcgtgcatgttttag

SEQ ID NO: 106505 - DNA, 117 bp, synthetic construct
  misc_feature 1..117: note = Description of Artificial Sequence: Synthetic coding sequence
  source 1..117: mol_type = other DNA
tagctgattgacaaggatcaatcccctaagtggaaacccgctgacctgaaggaagtgactgaagaggacttaaataaccactttaaaagcctcggctccagcgatcttaagttttag

SEQ ID NO: 106506 - DNA, 903 bp, synthetic construct
  misc_feature 1..903: note = Description of Artificial Sequence: Synthetic coding sequence
  source 1..903: mol_type = other DNA
atgggtaccttgccaaaacgcgtaaagatagttgaggtgggcccccgagatggtctccagaatgagaaaaacatcgtgtctaccccagtaaagataaaacttatagacatgctgagcgaggccggtctgagcgttattgaaacaacctcattcgtgtctcctaagtgggttccacagatgggggaccataccgaggtgctcaagggtattcaaaagttccccggaatcaactacccagtactgacgcctaatctgaaagggtttgaagccgccgtcgctgccggggcaaaggaagtcgttatattcggggccgccagcgagctgttcactaaaaaaaatattaactgctccatagaggagagctttcaaagatttgacgcgatcctgaaagccgctcagtccgccaacataagcgtcagagggtatgtaagctgtgctctcggttgcccctatgagggaaaaatatccccagccaaggttgccgaagtcactaaaaaattctactcgatgggctgttacgagattagcttgggggacaccatcggcgttgggacgcccggcatcatgaaagacatgctgagcgcagttatgcaggaggtgccgctcgccgctctggcggtccactgtcatgacacatacggtcaggctctggccaataccttgatggccctccagatgggggtcagcgttgtggacagttccgtagctggtctgggagggtgcccctacgctcagggcgccagtggcaacctagcgactgaggaccttgtttacatgttggaaggactcggcatccacacaggcgtgaatctccagaagctgctggaagcaggaaatttcatctgtcaagcactgaaccgcaaaacttcctccaaagtggcacaggccacctgcaagctgtag

SEQ ID NO: 106507 - DNA, 978 bp, synthetic construct
  misc_feature 1..978: note = Description of Artificial Sequence: Synthetic coding sequence
  source 1..978: mol_type = other DNA
atggcggccatgaggaaagccctgccccgtagacttgtgggcctggcttcactccgggccgtcagcacctcatctatggggactctcccaaagagggtgaagatagtcgaagtcggcccccgcgatgggctccagaacgaaaagaacatcgtgtctacaccagttaaaatcaagctaattgatatgctgtctgaggcaggactctcagtgattgagaccacatctttcgtaagccctaagtgggtgccccagatgggggaccatactgaggtactaaagggaattcagaagttcccggggatcaactatcccgttctcacccccaatctcaaagggttcgaggccgctgttgctgctggggctaaagaagttgtgatatttggagctgcctctgaactcttcaccaaaaaaaacattaattgctcaatcgaggagtcatttcaaaggttcgatgccatcctgaaggcagctcaatctgccaacattagtgtaagaggttatgtgtcttgtgcccttgggtgtccatatgagggaaaaatctctccagccaaagtcgccgaggtgactaagaagttttactccatgggttgttacgaaatttccctgggggatacgatcggggtcgggacccccgggattatgaaagacatgctgagcgcggtgatgcaggaagtgcccttggcagcccttgctgttcattgtcacgacacctacggccaagccttagccaacactctgatggctctgcaaatgggagtgagtgttgtggattcatccgttgctggcctggggggctgcccttatgcccagggtgcctctggcaacttagcgacagaggacctggtgtatatgctcgaaggcctgggcatacataccggcgtcaatctccagaaactcctggaggccgggaactttatctgtcaggcgctgaatcggaaaacatcctcgaaggtcgcacaggcaacctgcaagctctag

SEQ ID NO: 106508 - DNA, 765 bp, synthetic construct
  misc_feature 1..765: note = Description of Artificial Sequence: Synthetic coding sequence
  source 1..765: mol_type = other DNA
atggcggccatgcgaaaagccctgcctcgcagacttgtggggttggcctcattgagggccgtgtccacaagctccatgggaacgctccccaagagagtcaaaatagtggaggtgggacccagagatggcctgcagaacgaaaaaaacattgtgtctacaccagtgaagatcaagctgatcgacatgctgagcgaagctggcttatcagttatcgagaccacatcctttgtctcacccaagtgggtacctcaaatgggggaccacacggaagtgctaaaaggaattcaaaagtttcctggtattaattatccggtgctgactcccaatctcaaaggctttgaagcagcggtcaccaagaagttttacagcatgggttgctatgagatctctttgggggatacaatcggcgttgggacgcccgggatcatgaaagatatgttaagcgccgtgatgcaggaagtccctctggccgcgctggccgtgcattgccacgacacttatgggcaagcccttgcaaacaccctcatggcgctgcagatgggcgtatcggttgtggacagctccgtggccggactaggcggctgcccttatgctcagggagcaagtggtaatctcgcaaccgaggacctggtttatatgctagaggggcttggaatccacaccggcgtgaatctgcagaaacttctggaagcagggaatttcatctgtcaggctctgaatcggaaaacctcctcgaaagtggcccaggcaacttgcaagctgtag

SEQ ID NO: 106509 - DNA, 501 bp, synthetic construct
  misc_feature 1..501: note = Description of Artificial Sequence: Synthetic coding sequence
  source 1..501: mol_type = other DNA
atgggaaccctgcccaagcgtgtgaagattgttgaggtgggacccagagacggcctgcagaatgagaagaatatcgtgtccacccccgtgaagattaagctaattgatatgttgtccgaggcaggcctgtctgtcatcgaaaccacctctttcgtttcccccaaatgggtgcctcagatgggcgatcataccgaagtgctcaaggggattcagaagtttcctgggatcaactatcctgtgctgactcccaaccttaaaggcttcgaggccgccatgggcgttagtgtggtggactccagtgtggcagggttggggggctgcccttatgcccaaggggctagtggcaaccttgccaccgaagacctcgtgtacatgctggaaggtctgggaatccatacaggggtgaacttgcaaaagctcttagaggccggtaatttcatttgccaagctctcaaccgtaagacatcctccaaggtagcccaggctacatgtaagctgtag

SEQ ID NO: 106510 - DNA, 1563 bp, synthetic construct
  misc_feature 1..1563: note = Description of Artificial Sequence: Synthetic coding sequence
  source 1..1563: mol_type = other DNA
atggcagctctgaagctgctttcctccggcctgaggctgtgcgccagcgcacgcgggtctggcgccacatggtataaaggatgtgtgtgtagctttagtacatctgcacatcgtcacacaaagttttacaccgatccagtagaagctgtcaaagacattccagacggtgctactgtcctggtgggaggattcggactgtgtggaatccctgagaacctgattgacgcactgctgaagactggagtgaaagggcttacagcagtgtctaataacgcaggagttgacaattttgggttagggctgctgcttcgaagcaagcagattaaacggatggtttccagttacgtgggagagaatgctgagtttgaaaggcagtatctctccggtgaactggaggtggagctcacacctcaggggacccttgcggagagaatcagggctggaggagcaggggttccggctttttatacaccaaccggatacggaactctagtacaggaaggcggcagccccatcaaatacaataaagatgggtcagtggcaattgccagcaagcctagagaagtgagggagtttaatgggcagcactttatactggaagaggcaataactggcgacttcgctctcgttaaagcgtggaaggccgacagggctggcaacgtgatttttcgcaagagcgctagaaactttaatcttccgatgtgtaaggccgcagaaaccaccgtggtcgaagtggaggagattgtggacatcggtgcattcgcccccgaagacatacacatcccccagatctacgtgcacaggctgatcaagggggagaagtatgaaaagcgtattgagcgccttagcattcgcaaagaaggggacggagaggctaagagcgctaaacctggagacgacgttagagagaggatcattaagagggccgctctggaatttgaggatggtatgtatgcaaatcttgggattgggataccgctgctcgcctccaactttatttcacctaacatcactgtccacctgcagagcgaaaacggcgtgctgggcttgggcccttaccccagacagcatgaggccgatgccgatctgatcaatgccggcaaggaaaccgtaacaattctgcccggggccagcttcttctcctctgatgaaagtttcgccatgattcgcggtgggcacgtggacctcacgatgctaggcgccatgcaggtctcaaaatacggggaccttgcgaactggatgatcccggggaaaatggtcaagggcatggggggcgcaatggacctggtatcatcagctaaaaccaaagtcgtcgtgacaatggaacattccgccaaaggaaatgctcataagattatggaaaagtgcaccctaccacttacaggtaaacaatgtgttaacagaattatcacagaaaaggccgtctttgatgtggataaaaaaaaggggctgaccctgatcgaactttgggagggactgacagtggacgacgtgcaaaaatccacaggatgcgactttgccgtctctcccaaacttatgccgatgcagcaaattgcaaattag

SEQ ID NO: 106511 - DNA, 1005 bp, synthetic construct
  misc_feature 1..1005: note = Description of Artificial Sequence: Synthetic coding sequence
  source 1..1005: mol_type = other DNA
atgatggtcagagagttcaatggacaacacttcattcttgaggaggcaatcacaggcgattttgccctcgtgaaggcgtggaaggccgatcgggccgggaatgttatattccgcaagtccgctcgcaacttcaatctgcccatgtgtaaagccgctgaaacaactgttgtggaggtagaggagatagtggatattggcgcctttgctcctgaagatatccacataccacagatttatgtacaccgcctcattaaaggcgaaaaatacgaaaagagaatagagcgtttgtccatcaggaaagagggcgacggcgaagctaagtccgccaagcccggggacgacgttcgagaacgcatcattaagcgtgctgctctggagtttgaagatgggatgtacgcaaacttgggtatcggaattccgttgcttgcctccaactttatctctcccaacattactgtacacctgcagtccgaaaacggcgtccttggacttggcccatatcctcggcaacatgaggcagacgccgatttaatcaatgcgggaaaggaaacagttacgatccttccaggcgcttctttcttcagcagcgacgagagtttcgctatgattaggggtggtcacgttgacctgaccatgctcggggccatgcaggtgagtaagtatggtgatcttgcaaattggatgatccccggaaaaatggtgaaaggtatgggaggcgctatggacctcgtgtcctctgcaaagaccaaggtcgtggttactatggagcattccgctaagggcaatgctcacaaaattatggagaagtgtacattgcctctgactggtaaacagtgcgttaatcgaattattaccgagaaagcagtgttcgatgttgataagaaaaaaggacttacgttaattgaactttgggagggcctgactgtggacgacgtgcagaagtctaccgggtgcgattttgctgtatccccaaaacttatgccaatgcagcagatcgccaattag

SEQ ID NO: 106512 - DNA, 372 bp, synthetic construct
  misc_feature 1..372: note = Description of Artificial Sequence: Synthetic coding sequence
  source 1..372: mol_type = other DNA
atgctgggtgcgatgcaggtctccaaatacggcgatcttgctaattggatgatcccaggtaaaatggtgaaggggatgggaggcgcaatggatctcgtcagtagcgctaaaaccaaggtagttgtgactatggagcattccgctaaaggcaacgctcacaaaattatggagaaatgtacacttccactgacaggtaagcagtgtgtcaaccgcattattactgagaaggcagtattcgacgtggacaagaagaagggcctgacccttatcgaactgtgggagggtctcacagtagacgacgtacagaaaagtactggatgcgatttcgcggtttccccgaagctgatgccaatgcagcagatagccaattag

SEQ ID NO: 106513 - DNA, 372 bp, synthetic construct
  misc_feature 1..372: note = Description of Artificial Sequence: Synthetic coding sequence
  source 1..372: mol_type = other DNA
atgctcggtgctatgcaggtgtccaagtacggggatttggcgaactggatgatcccgggcaaaatggtaaaggggatgggtggcgcaatggatctggtgagttctgcaaagacaaaggtggtggtcaccatggagcacagtgccaagggaaatgcccacaaaattatggagaagtgcacactccctttaacaggcaagcagtgcgtaaatcggatcatcactgaaaaggcggtgtttgacgtagataaaaagaagggtttaacgctcatcgaactgtgggagggcctgacagtcgacgatgtgcagaaaagcactggatgcgatttcgcggtgtcacccaagttgatgccaatgcagcagatagcgaattag

SEQ ID NO: 106514 - DNA, 453 bp, synthetic construct
  misc_feature 1..453: note = Description of Artificial Sequence: Synthetic coding sequence
  source 1..453: mol_type = other DNA
tccaacgcttataaagtcgataactttgggctcggattattgctacgctcaaagcagatcaagcgtatggtgagcagctatgtgggagagaacgctgagttcgaacgccagtacctgtcaggtgaattagaggtggaacttacacctcaggggacattggccgaacgtatccgcgctggcggagccggagtgccggcgttttatactcctaccggctacgggaccttggtgcaggagggaggttcgccgataaaatacaataaggatgggagcgttgctattgcttcaaagccacgggaagtgcgcgaattcaacggccaacacttcattctggaggaagccatcactggagacttcgccctagttaaggcctggaaggccgacagggcaggcaatgtcatcttccggaaaagcgctcggaacttcaatcttccaatgtgcaaggctgcatag

SEQ ID NO: 106515 - DNA, 1131 bp, synthetic construct
  misc_feature 1..1131: note = Description of Artificial Sequence: Synthetic coding sequence
  source 1..1131: mol_type = other DNA
atgtcgaactgtctgcagaattttctgaaaattacaagcaccagactcctatgttcaaggctttgccagcagctcaggtcgaaacgaaagttcttcggtaccgtgcccatttcaaggctgcatcgccgcgtggtgatcacaggcattggcttggtaacaccgcttggcgtcgggacccacctggtgtgggatcgcctgattgggggagaatccggaattgtgtcccttgtcggggaggagtacaaaagcatcccttgctcagtggcagcatacgtcccgcgcggaagcgacgaggggcagtttaacgagcaaaattttgtttcaaagagcgacatcaagagcatgagctcaccgacaataatggccattggagccgcggagttggccatgaaggactctggctggcatcctcagagtgaagcagatcaggttgccacaggagtcgcaattggcatggggatgattcctttagaagtggtcagtgagactgctctgaattttcaaaccaaaggctataataaggtcagtccattctttgtgcccaagatcctggtgaacatggctgctggccaggtgtcgattcgctacaagctgaaaggccccaaccacgcagtttcaactgcttgcaccactggagcccatgccgtaggtgattccttccgattcatcgcccacggcgacgctggacatataaccgcgcccgaccccgagggagaaggtgccctgcgctgcatggcagctgcactgaaggatgcaggagtgcagcccgaagagatttcttacataaacgcccacgccacaagcacaccattgggcgatgccgcagaaaataaggctattaaacacctgttcaaggaccacgcttatgccctggctgtatcgtcaacaaagggtgcaactgggcatctgttgggcgcagctggcgcggtggaagcggcgttcacgacactggcgtgttattaccagaaactgcctcccacccttaacctcgactgctcagagcctgaatttgatctgaattatgtgcccctaaaggcccaggaatggaaaaccgagaagcgcttcatcggtttgaccaatagttttgggttcggggggacaaatgcgacactctgcattgcagggctgtag

SEQ ID NO: 106516 - DNA, 1380 bp, synthetic construct
  misc_feature 1..1380: note = Description of Artificial Sequence: Synthetic coding sequence
  source 1..1380: mol_type = other DNA
atgtctaactgtctgcaaaactttctcaagatcactagcacccggttactatgttccagattatgtcagcaactgaggtctaaacgtaaattttttggaacagtacccatctcccgtttacatagacgcgtggtaattactggcatcggtctcgtcacaccactcggcgtggggacacacctggtgtgggaccgcttgatcggcggggagagcgggattgtatcgctggtgggcgaagagtacaagtctatcccgtgcagtgtagccgcctacgttcctcgcggatccgacgaggggcagtttaatgaacagaattttgtctccaagagcgatattaagtcaatgagcagtcctacaatcatggctataggtgccgctgagctggccatgaaggactctggctggcacccccaatcggaggctgaccaggttgcgacgggggtagcaatcggaatgggtatgatccccctggaagtagtgagcgagacagctctcaacttccaaaccaagggatacaataaagtgtcacccttttttgtgccaaagatactcgttaatatggccgccggccaggtgagtatcaggtacaaactgaaggggcccaatcatgctgtgtccactgcctgtaccacgggggcccacgcggtgggagactcgttccggtttattgctcacggagacgccgacgtaatggtggcggggggaaccgactcttgtataagccccctctccctagccgggttttcaagggcgcgcgccctctccacgaactctgacccaaaactggcttgcagaccttttcacccaaaaagagacggcttcgtgatgggcgagggagccgctgtgctggtgctcgaagagtatgaacatgccgtgcagaggcgcgccaggatttatgccgaggtgcttggttacgggctgtctggtgatgccgggcacatcaccgcccctgaccctgaaggggagggcgcgctaaggtgtatggcagctgcccttaaggacgccggggtgcagcctgaagagatctcatatattaatgcccatgccacatccactcccctgggagacgctgctgagaacaaagccatcaagcacctgttcaaagaccatgcatatgccctggctgtctcctcaacaaaaggggccaccggtcatttgcttggagccgccggggccgttgaggccgcctttacaactctggcctgttattaccagaaactgccgccaactctgaatctagattgttccgagcccgagtttgatctcaactatgtaccactaaaagcacaggagtggaagacggaaaaacgattcataggcttgaccaatagtttcggcttcggaggtaccaacgccacactctgtattgctggactgtag

SEQ ID NO: 106517 - DNA, 696 bp, synthetic construct
  misc_feature 1..696: note = Description of Artificial Sequence: Synthetic coding sequence
  source 1..696: mol_type = other DNA
atgtctaactgcctgcagaacttcctcaaaatcacctctactcggctcctctgctctaggctttgtcagcagttgcgtagcaagcggaagtttttcggcaccgtgccaatttccaggcttcataggagagtggtgatcaccgggattggcctagttaccccccttggagtggggacgcacctggtgtgggatcgtctgattggcggggaatcgggtattgtctctctggtaggggaggaatacaagtccataccctgctcggtagctgcatatgtccctcgcggcagtgatgagggacagtttaatgagcaaaacttcgtgtctaaatccgacatcaagtccatgagcagtcccactataatggccatcggcgcagccgaattggctatgaaggattcagggtggcacccacagagtgaagctgatcaggtggcgaccggcgtggccatcggcatgggaatgattccactggaggtagtgagtgagactgctttgaacttccagacaaagggttacaacaaggtgtccccgttctttgttcccaagatcctggtaaacatggccgccgggcaggtttcgatccgctacaagttgaagggccctaatcacgcagtttccacggcctgcactacgggcgctcacgctgtcggagattccttccggtttatcgcacatggcgacgcagacgtgatgtag

SEQ ID NO: 106518 - DNA, 663 bp, synthetic construct
  misc_feature 1..663: note = Description of Artificial Sequence: Synthetic coding sequence
  source 1..663: mol_type = other DNA
atgagtaattgcttacagaattttctcaagattacctctacacgtctgttatgctcaagactgtgtcagcagttacgtagcaagcgaaagttcttcggcactgttcccatttcccggttgcatcgcagagttgtcattaccggaatcgggctggtcacacctctgggggtaggcacccacctggtctgggacagactaattggtggtgagagcggcatagtatctttagtaggcgaggaatacaaatccattccatgttcggtcgctgcctacgtgccccgaggcagcgatgaggggcaattcaatgagcaaaattttgtgtctaagagtgatatcaagtctatgagctcccccacgattatggccatcggagctgccgagctggcaatgaaagacagcggctggcatcctcaatccgaggccgatcaagtagccaccggtgtggccatcggcatgggaatgatccccctggaagtcgtttcagaaacggctcttaacttccaaacaaagggatacaataaggttagccccttcttcgtccccaagattctggtcaacatggctgccggtcaggtcagcatccgctacaaattaaaagggcccaaccatgccgttagtaccgcttgcacaacaggagcacacgccgtaggagattctttttag

SEQ ID NO: 106519 - DNA, 1875 bp, synthetic construct
  misc_feature 1..1875: note = Description of Artificial Sequence: Synthetic coding sequence
  source 1..1875: mol_type = other DNA
atggaaattcccggctctctctgcaagaaagtgaaactcagcaacaacgctcagaattggggaatgcaacgtgcaacaaacgttacgtaccaggctcatcacgtctctcggaataaacgagggcaggtggtagggaccagaggcggttttcgcggctgtaccgtgtggctgactggtttatctggtgcagggaaaacgactgtgtccatggcattagaggaatatctggtgtgccacggaatcccatgctatactctggatggtgacaacataagacagggccttaacaagaaccttggctttagccctgaggaccgcgaggaaaatgtgcggagaattgctgaggtggctaagttgttcgccgatgccggcctggtgtgcataacgagctttatttctccatacacccaagatcgcaacaatgctcgtcaaatccatgaaggcgcctctttgcccttttttgaagtgttcgtagacgcgccactccatgtgtgcgagcagcgcgacgtgaagggcctgtacaagaaggcccgcgcaggcgagataaagggctttaccgggatcgacagtgaatacgagaagccagaggcccccgaactggttctgaagaccgactcttgtgatgtcaacgattgcgtgcagcaagtggtagagcttctccaagagcgagacatcgtgccagttgacgcgtcttacgaggtgaaggagctgtatgtccccgagaataaactccatctcgccaaaaccgacgcagagaccctccccgccctgaaaatcaataaggtagacatgcagtgggttcaagtactcgccgagggctgggcaacaccgctgaatggctttatgcgggaacgagagtacctgcagtgtctgcactttgactgtctgctggacggtggcgtgatcaacctgagcgtgccgatcgtgcttacagctacacacgaggacaaagaacgattagacggttgtacagcctttgccttaatgtatgagggacgacgcgtcgcaattctgcggaaccctgagttcttcgaacaccggaaggaggaacggtgcgcacggcagtggggaacgacatgcaaaaatcatccttacatcaagatggtcatggagcagggagactggctgataggaggcgacttgcaggtcttggatcgggtgtactggaatgacggattagaccagtatcgtctaacccccactgaattaaagcagaagtttaaggacatgaacgcagatgccgttttcgccttccagctcaggaatcccgtccacaacggacatgccctccttatgcaagacacacacaagcaactcctagagcgcgggtacagacggcccgtcctcttgctccaccctctgggcggttggacgaaggatgacgacgtcccattgatgtggaggatgaagcagcacgctgccgttctggaggagggggtgctgaaccctgagaccacagtcgtagccatcttcccctcaccaatgatgtacgcaggcccgaccgaggtgcagtggcactgccgagcacgaatggtcgccggagcgaatttttatatcgtgggcagggaccccgcaggtatgccacatcccgagacaggcaaggacctttatgagcctagccatggggctaaggtgcttacaatggcccctggcttgattactctggaaatcgtcccttttagggtagcagcctacaataagaagaagaaacgtatggattactatgacagtgagcatcacgaagactttgagttcatctctggcaccagaatgaggaagcttgctagggaaggccagaagccccccgagggttttatggctcccaaggcctggaccgtcctgactgagtactacaaaagcctggaaaaagcctag

SEQ ID NO: 106520 - DNA, 1845 bp, synthetic construct
  misc_feature 1..1845: note = Description of Artificial Sequence: Synthetic coding sequence
  source 1..1845: mol_type = other DNA
atgtccggcataaagaagcagaagacagaaaatcagcagaagagtaccaacgtggtgtaccaggcacaccacgtatcacgtaataaacgcgggcaggttgtcggaactagagggggctttcgaggatgcactgtgtggttaaccggtctctccggagcaggtaagaccactatctcctttgctctggaagagtatcttgtgagtcatgcaatcccctgttacagcctagatggagataatgtgagacatgggttgaatagaaatctgggattctctcctggggaccgagaggagaacatcaggaggatcgcagaggtggcgaagttgtttgccgatgcaggcctggtgtgcatcaccagcttcataagtccatttgccaaagatcgggaaaacgcccggaaaattcacgaatctgcgggtctgccttttttcgagatcttcgtcgacgcaccgttaaacatttgcgaatcgagagacgtaaaaggactctataagagagcaagggccggagagattaagggtttcaccggcatcgactctgattatgagaaacctgagacaccagaacgggtgctaaagaccaacctcagtacagtctctgactgcgtccatcaggtggttgaactactgcaagagcagaatatcgtgccttacaccattattaaagacattcacgaactgtttgtgcctgagaacaaactagaccacgtgagagcggaagctgagacgttaccatcgttgtccatcaccaagctggatttgcagtgggtgcaggtgctgtcggaaggctgggcaacaccgctgaaaggtttcatgcgggagaaggagtatctgcaggtgatgcacttcgacaccctgctggacgacggtgttatcaatatgtccatcccaatcgtgcttcctgtttctgcggaggataagaccagactggaagggtgcagtaagttcgttctcgcccatggagggaggagagtggccattttgcgggatgccgagttttacgaacaccgaaaagaagagcgctgctctcgggtctggggaactacatgtaccaagcatccccatatcaaaatggtcatggaatccggagactggttagtaggtggtgatctgcaagtcctggaaaagatcagatggaatgatggtctggatcagtatcgcctcactccgcttgaactgaagcagaaatgtaaggaaatgaatgctgatgccgtgttcgcattccagctgagaaatcccgtgcataacggccacgcactcctgatgcaggataccagacgtcgtttattagagcgggggtataagcatcctgttctgctgctgcaccccctgggaggctggacaaaagacgacgacgtgccactggactggaggatgaagcagcatgccgctgtgttagaggagggagtgctggaccctaagtctaccatcgtggcaatttttccctcaccgatgctgtatgccggacctaccgaggtacaatggcactgcaggagtcgaatgatcgcgggggcaaatttctatattgttggcagagatcctgcagggatgccgcaccctgagaccaagaaagacctttacgagcccacacacggtgggaaggtcctgtctatggctcccgggttaaccagtgtcgagatcattccattccgggtcgccgcctataataaagccaagaaagccatggatttttacgatccagcccggcataatgaattcgacttcatctcgggaacccgaatgaggaagcttgcgcgtgaaggtgaaaaccctcctgatggcttcatggcgccaaaagcctggaaggttctcaccgattactatagaagcctggaaaagaattag

SEQ ID NO: 106521 - DNA, 1857 bp, synthetic construct
  misc_feature 1..1857: note = Description of Artificial Sequence: Synthetic coding sequence
  source 1..1857: mol_type = other DNA
agcgggaaaaagcaggagaaagaggaaaatcagcaaaagagcacaaatgtcgtataccaggcccaccacgtcagtagaaataagcggggccaggtcgttggtaccaggggtggcttcaggggctgcacagtgtggctgactggtctgtctggagcaggtaagacaaccatctcctttgctctggaagaatacctagtctcacacgcaatcccttgttatagcttggatggggataatgtgcgacacgggctcaataggaaccttggtttctctcctggtgacagggaagaaaacatacgccgcatcgctgaagtggccaaactgtttgcagacgctggccttgtatgcataacaagctttatcagtccattcgcaaaagaccgagaaaacgcgaggaaaattcacgaatctgccggcttacccttttttgagatctttgtagacgcccccctaaatatttgcgagtcccgcgacgtcaagggactctacaagcgagcaagagctggagaaataaaaggctttacagggattgacagtgattacgagaaacccgaaactccagaacgtgttctaaagacgaacctttctacagtgtctgattgtgtgcaccaggtggtggagctgctccaggagcagaacattgtgccatacacaataattaaagacatccacgagctgttcgtccctgaaaacaaattggaccacgtgcgggctgaggctgaaacccttccgagcttaagtatcactaagctggatttacaatgggtgcaagtcctcagtgagggttgggctacgcctttaaagggctttatgcgagagaaagagtacttgcaggtgatgcacttcgacactctgttagacgggatgttcctgctggacggagtgattaatatgagtatcccaatcgttctccccgtctctgccgaggataagacacggctggaaggctgctcgaagttcgttctggcacacggaggccgccgggtggcgatcctcagagatgcggagttttacgaacataggaaagaagagcgttgcagccgggtctggggcacaacttgtacaaaacaccctcatataaagatggttatggaaagcggcgattggctagtggggggcgatctgcaggtactcgagaagatccgctggaacgacggtctggatcaatacaggctcacacccttggaactgaaacagaagtgcaaggagatgaacgccgacgccgtttttgcatttcagctcagaaatccagtgcacaacgggcacgccctgctgatgcaggatacacgacggcgtttgctcgagagaggctataagcaccccgtgcttctgcttcatcctctggggggctggacaaaggatgatgacgtccctctggattggaggatgaagcaacacgcagcagtgctggaagagggcgtgcttgatcctaagagcaccatcgtggccatcttcccatctcccatgctgtacgccggacctactgaggtgcagtggcattgccgatcccgcatgattgctggagccaacttctacatagttggaagggatcccgccggaatgccccacccagaaacaaagaaggatctctatgaaccaacacatggaggtaaagttttgtccatggctccaggactcaccagtgtggaaattatccccttccgggtggctgcttataataaggcaaagaaggctatggatttttacgacccggcacggcacaacgagttcgacttcatcagtgggacgcgaatgagaaaactcgcaagggagggagaaaatccccccgacggatttatggcccccaaggcgtggaaggtgctgactgactactataggtccctggaaaaaaattag

SEQ ID NO: 106522 - DNA, 1857 bp, synthetic construct
  misc_feature 1..1857: note = Description of Artificial Sequence: Synthetic coding sequence
  source 1..1857: mol_type = other DNA
atgattgtcttggtcaccgaatgggtcgacctgagcctggagaatcagcaaaagtcaacaaacgttgtctaccaggcacaccatgtcagccggaacaaaagagggcaggtcgttggtactaggggtgggtttcgcgggtgcactgtctggctgaccggcctgagcggcgctggcaagacaacaatctccttcgctctcgaagagtatctcgtatctcacgccataccctgctactctctcgatggggataatgtgaggcacggattgaatcgcaacctcggcttcagtccgggagatcgcgaagagaacatcaggcgtatcgcagaggtagctaagcttttcgctgatgccggactggtctgtatcacgtcttttatcagcccatttgctaaagatcgtgagaacgcccgaaaaatccatgaaagcgccggcctacccttttttgaaatcttcgtggatgccccactcaatatctgtgagagcagggacgttaagggactgtataagagggctcgggccggggaaatcaaaggcttcacaggcatcgattccgattatgagaagcccgaaaccccggaacgggtgctgaaaacaaatctgagcactgtgtctgattgtgtgcaccaggttgtggagctgctgcaagagcaaaacattgtgccctacaccatcattaaagacatccacgagttgtttgtccctgagaataaactggatcacgtgcgagccgaggccgaaactcttccctcccttagtatcacaaaactcgacctgcaatgggttcaagtgttaagcgagggatgggctacccctttgaaaggatttatgagggagaaggagtaccttcaagtcatgcactttgacactcttttagatgacggggtgattaacatgtcaataccgattgtgctgccggtatcagcagaggacaaaacccgattagagggctgcagcaaattcgtcctggcccatggcgggaggcgagtcgccatcctcagggacgcagaattttacgagcatagaaaggaggaaaggtgtagtcgcgtctggggcacgacatgtacgaagcaccctcatatcaaaatggtcatggaatcgggggattggcttgttggtggtgatctccaggtgcttgagaaaattaggtggaacgacggccttgatcagtacagacttacccccctcgaactgaagcagaagtgtaaggaaatgaacgccgacgctgttttcgcctttcagctgcgcaatccagtgcacaacgggcacgcccttttgatgcaggacaccaggcggaggttgttagaaaggggttataagcaccccgtgctactccttcaccccttgggaggctggaccaaggacgacgacgttccactggactggagaatgaagcagcatgctgctgttctggaggagggagttcttgatcccaagagcaccatcgttgcgattttcccttctccgatgctatacgccggtccgacagaagttcagtggcactgtcgaagccgcatgattgctggagcgaatttttatatcgtggggcgggatccggcaggaatgcctcacccagaaactaagaaggacttatatgagcctactcacggagggaaggtcctttccatggcacccggactgacctccgttgagataatcccctttcgagtggctgcttataataaggcaaagaaagccatggatttttacgaccctgctcgacacaacgagttcgacttcatcagcgggactagaatgcgcaaactcgccagagagggtgagaatccacccgacggattcatggcgccaaaagcctggaaggtccttaccgactattaccgttccctggaaaaaaactag

SEQ ID NO: 106523 - DNA, 1860 bp, synthetic construct
  misc_feature 1..1860: note = Description of Artificial Sequence: Synthetic coding sequence
  source 1..1860: mol_type = other DNA
atgtcaggcatcaaaaaacaaaagactgagaatcagcagaagtccacgaacgtggtgtatcaggcccaccacgtttctaggaacaaacgcggccaggtggtgggaactagaggcgggttcaggggatgcactgtgtggctaactgggctgagcggcgccggcaaaaccacaataagtttcgcacttgaggaatacttggtttcccatgccattccttgttattctctggatggcgacaacgtccgacatggactgaacaggaatttgggtttttcccctggtgacagagaggagaatattcgtcgcatcgcagaagttgcaaagctcttcgcagatgcaggtcttgtgtgtatcacaagcttcatctccccattcgcaaaggatagagagaatgctagaaagattcatgagtctgctggcctgccttttttcgagatatttgtggacgccccgctgaatatctgcgaaagtagagatgtgaaaggcctgtacaagagggcaagagcgggggaaattaagggcttcacgggtatcgattcagactacgagaagcctgaaacacccgaaagagtcctgaaaaccaatctttctaccgtgagtgattgcgtgcaccaggtcgtagaattacttcaggaacagaatattgtgccctacaccattatcaaggacatccacgagctgtttgttcctgagaacaaactagaccatgtacgggcagaggccgagacattaccgagcctgtctatcacaaaactggatttacagtgggttcaagttctgtcagagggctgggctacacctctgaaagggtttatgcgcgagaaagaatatctccaggtgatgcacttcgacaccctgcttgacggtatggctcttccagacggggtgatcaatatgagcatccccatcgttctgcctgtgtccgccgaagacaagacacgcctcgagggatgcagtaaattcgtactcgctcacggaggtcggagagtggccattctgagagatgccgaattctacgagcatcgtaaggaagaacggtgttcccgggtttggggaacaacatgtactaagcacccccacatcaaaatggtgatggaaagtggagactggctagttgggggtgatctgcaggtgctcgagaagattcgctggaacgatggacttgaccaatatagactgacacccctcgagctgaagcagaagtgcaaagaaatgaacgccgacgccgtgtttgccttccaactgcgtaatccagtccacaacgggcacgcactgctgatgcaggatacacggcgacggctacttgaacgtgggtacaagcatccagttctgctcttgcaccctttaggaggctggacgaaggacgacgacgtgcctctggactggcggatgaagcagcatgccgctgttctggaagaaggggtgcttgaccccaaaagtaccattgtagccatcttcccatcgccaatgctgtacgctgggcctactgaagtccaatggcattgtcgctcgagaatgattgccggggcaaatttttatattgttgggagggacccagcaggcatgcctcaccccgagaccaaaaaagatctgtatgagccaacccacggcgggaaggttctttctatggcaccaggattgacatctgtggaaatcatcccattcagagtagcagcgtacaacaaggctaagaaggcaatggacttctacgatcccgcccggcacaacgagtttgactttattagcgggaccagaatgcgaaagctagcccgagaaggggagaatcctcccgacgggttcatggcccccaaggcatggaaggtactgaccgactattatcgctctctagagaaaaactag

SEQ ID NO: 106524 - DNA, 1503 bp, synthetic construct
  misc_feature 1..1503: note = Description of Artificial Sequence: Synthetic coding sequence
  source 1..1503: mol_type = other DNA
atggcaagcatgctgctggctcagagactggcctgttctttccagcatagctatcgcctgctggtgccagggagtcgccacatctcacaggccgccgcaaaagtggacgttgaatttgattacgacggccccctaatgaaaaccgaggtgccaggtcctaggtctcaggagttgatgaaacagctgaatattatccaaaatgccgaagccgtacacttcttttgcaactacgaggagtctaggggaaactatttggttgacgttgatgggaacaggatgcttgacctttacagccagatttcttcggtgccaatcggctattcacaccccgccctgttgaagctcatacagcagccccagaatgcctctatgtttgtcaacaggccggcactagggattctcccccccgagaattttgttgaaaaattgcgccaatccctgctgtcagtggcaccgaagggaatgtcccagctcataacaatggcttgcggttcttgcagtaacgaaaatgccctgaagactatcttcatgtggtaccgatccaaggaaaggggccagcgggggttttctcaggaggaactggagacatgtatgattaaccaggccccgggatgtccagattattctatcttgagctttatgggcgcctttcatggcaggacaatgggatgcctagcaactacccactccaaagcaatccataagatcgatattccatccttcgattggcccattgcaccatttcctcggctgaaataccctctggaggaattcgtaaaggaaaaccaacaggaggaagcaagatgtcttgaggaggttgaggacctgatagtgaagtatcgcaagaagaagaagaccgttgcaggaattattgtcgagcccatacagagtgaagggggagacaaccacgccagtgatgatttcttccggaagttgcgagacatcgcacggaagcatggttgtgccttcctggttgatgaagtgcagactgggggcggatgtactggcaaattttgggctcatgagcactggggcttagatgatcctgctgatgtgatgacgttttcaaagaagatgatgactggtggcttcttccacaaggaggaatttcgccccaatgccccttacagaatcttcaatacctggctgggtgatccctctaaaaacctgctacttgcagaggtgattaatatcattaaacgcgaagatctcttgaacaatgcagcccacgccggcaaggccctactcaccggcttactggacctgcaggcgcggtatcctcaatttatcagccgcgtgaggggcagaggcacattctgttcctttgacacccctgacgactctattcgcaacaaactgattctcatcgccagaaataaaggcgtggttcttggagggtgtggggataaaagtatcagatttagacctactctggtgttccgcgaccaccacgcccacttgtttctgaacatcttctctgatatccttgcggatttcaagtag

SEQ ID NO: 106525 - DNA, 1503 bp, synthetic construct
  misc_feature 1..1503: note = Description of Artificial Sequence: Synthetic coding sequence
  source 1..1503: mol_type = other DNA
atggccagcatgctgcttgcccagcgtcttgcctgctccttccagcactcttaccggttgctcgtgcctgggtctaggcacatctcacaagctgccgctaaagtggacgtggaatttgattacgatgggccgctgatgaagaccgaggtgcctgggccacggtcgcaggaactcatgaaacagctcaatatcatccagaatgccgaagcagtgcacttcttttgcaattacgaggagagtcgaggaaactacctggtggatgtggatggcaatcggatgctggatctctattcccagattagctccgtccccattggatattctcaccccgctcttctgaaactgatccagcagccgcagaatgcaagcatgttcgtaaaccgccccgctctcgggattctgccacctgaaaattttgtcgaaaagctgcgtcagtcattattgagcgtggctcctaagggtatgtcccagctgataacaatggcatgcgggtcatgcagcaacgaaaatgcgcttaagactattttcatgtggtatcgaagtaaggagcgcggacaaagagggttctctcaagaagagctggagacttgtatgatcaaccaagctccaggttgtcccgattacagcatcttgtccttcatgggtgctttccacgggcgtacaatgggttgtctggcaacaactcactccaaggcaatccataaaatcgatattcctagttttgattggcccatagctccattccctaggcttaagtatcctctggaggaattcgtgaaagagaatcagcaagaagaagctcgctgtctggaggaagtagaagacctgatcgtgaagtataggaaaaagaaaaaaacggtcgcgggaataatcgtcgagcccattcaaagcgaaggaggagataaccacgcatcagatgacttcttccggaagttgcgcgatatcgctagaaaacacggatgtgccttcctggttgatgaagtgcaaacaggtggcgggtgcacgggaaagttctgggcacatgaacactgggggttggatgatccagcagacgtgatgacattcagcaagaagatgatgacgggtgggtttttccataaagaggagtttaggcccaacgctccctaccgaatctttaatacctggttgggcgatcccagcaagaatctgttgttggctgaagtgatcaatattataaaacgagaggacctcttgaacaatgcagctcacgctgggaaggctctgttaacagggttgctcgacctgcaagcccgatacccccagtttattagtagagtgcgcgggcgaggcacattctgcagctttgatacacccgatgatagtatcaggaacaagctaattctcatagcccgcaataagggcgtggtgcttgggggatgcggggataagtctattaggttccggcccaccctggtgttccgtgatcatcacgctcacctgttccttaacatcttttccgatattttagcagacttcaaatag

SEQ ID NO: 106526 - DNA, 1503 bp, synthetic construct
  misc_feature 1..1503: note = Description of Artificial Sequence: Synthetic coding sequence
  source 1..1503: mol_type = other DNA
atggcttcaatgctgttggctcagcgcctggcctgctcattccagcactcttatagattactcgtccccggatccagacacatctcccaagccgccgccaaagtggatgtcgagtttgattatgacggccccctcatgaagactgaagtgcccgggccccgcagccaggaactgatgaagcagttgaatatcatacagaatgccgaggctgttcactttttctgcaattacgaagagtccagaggcaattatctcgttgatgtggatggcaaccggatgctggacctgtacagccagatctcctcagttcctattggctatagtcacccagctctgcttaagcttattcaacagccccagaacgcctccatgtttgttaatagacccgcgctgggcattttgcctcctgaaaacttcgttgaaaaacttcggcaaagcctactgtccgttgccccgaagggaatgagccagctcataacgatggcctgcgggagctgctccaatgaaaacgctctaaagactatattcatgtggtacagatcaaaggagagaggacagcgtggctttagtcaggaggagctggaaacttgcatgatcaatcaggccccgggctgccccgattactcaatcttatcctttatgggggcattccatggaaggacaatggggtgcctggccacaacacactccaaagcaattcacaagatcgatattccctcctttgactggccaattgctcccttcccgcgcctgaaatatcccctagaagagttcgtcaaagagaaccagcaggaagaggccagatgcttggaggaggtcgaggatttaatcgtgaagtatcgcaagaagaaaaaaactgtcgcagggatcatagtcgaacccatccagagtgagggaggcgacaaccacgcgtccgacgacttctttcgtaaactgagagatattgcacgcaagcatgggtgcgcatttctggttgatgaggttcagaccggcggagggtgcactggtaagttctgggcacacgaacattgggggcttgatgaccctgccgacgttatgacctttagcaagaaaatgatgaccggaggctttttccacaaagaggagttccggcccaatgcaccatacagaatttttaatacctggcttggagatccaagcaaaaacctgctgctggccgaagttatcaacattatcaaacgggaagacttacttaacaatgctgcccacgctggaaaggcgcttctcacaggattactcgacctccaggcccggtatccacagttcatctccagggtccgcggcagaggcaccttttgttcttttgacacccctgatgactccataagaaacaagctcattctcattgccagaaacaaaggcgtggtgctgggtgggtgcggagacaaaagcattcgtttcaggcctactctggtgtttagagatcaccacgcccacctgttcctaaatatcttctcggacatcctcgccgacttcaaatag

SEQ ID NO: 106527 - DNA, 462 bp, synthetic construct
  misc_feature 1..462: note = Description of Artificial Sequence: Synthetic coding sequence
  source 1..462: mol_type = other DNA
gtggatatggatggggtgctagccgacttcgaagctggcctgctgagaggttttcggcgccgtttcccagaggagccacatgtgcccttagagcaacgacgaggtttcttggccagggaacaatatagagctcttaggcccgatctggcggataaggtcgcttccgtgtatgaggctccaggcttcttcctggatctggagcctatccctggggcactcgatgcggtgcgggaaatgaatgacctacccgatacccaagtctttatttgcacttcgccactgctaaaataccaccattgcgtgggggaaaaggaggaaacgccctcctgggagcatatcctgttcacctgctgccataatcggcacctggtgttgcctccgaccaggaggagattgctgtcttggtctgataactggcgggagattctagactcaaagcggggcgccgctcagagagaatag

SEQ ID NO: 106528 - DNA, 606 bp, synthetic construct
  misc_feature 1..606: note = Description of Artificial Sequence: Synthetic coding sequence
  source 1..606: mol_type = other DNA
atggcacgatccgtgcgagtcctcgtggacatggacggtgttctcgccgacttcgaggcgggcctgctgcgtggtttccggcggcgctttcccgaggagccccatgtgcccctggagcagagaaggggattcctggcacgcgagcagtaccgcgccttgagaccggatttagctgacaaggtggcgtccgtatatgaggcacccgggtttttcctcgacctcgaacctattcctggtgcgttagatgccgtgcgcgagatgaatgacctccccgacactcaagtctttatatgcactagccctctgttgaaataccaccactgtgtgggagaaaagtatagatgggtggaacagcacttaggcccgcaatttgtggagcgcattatcttgacacgggataagacagtggtgttaggggatctcctaattgatgacaaggatactgtgcggggacaggaggaaactcctagctgggaacacattctatttacctgctgccataataggcatctcgtgctaccgcccacacgccggcggttactctcgtggagcgacaattggcgcgaaattctcgattcaaagagaggcgccgctcagcgggaatag

SEQ ID NO: 106529 - DNA, 687 bp, synthetic construct
  misc_feature 1..687: note = Description of Artificial Sequence: Synthetic coding sequence
  source 1..687: mol_type = other DNA
atgattcggttgggcggatggtgtgctaggcggctgtgtagcgccgctgttcccgccggacgtaggggtgcagcgggaggactgggtctcgccgggggccgagccctgagggtactcgtggacatggacggtgtgctagctgactttgaaggtggctttctcagaaagttccgggctagattcccagaccagccattcatcgcgctggaggatcgacggggcttttgggtgagcgagcagtatgggcgcttgagacccggacttagcgagaaggcaatttctatctgggaatcaaagaatttcttctttgagctggagcctctgcctggtgcagttgaggcagtgaaggagatggcttctttacagaataccgacgtgttcatatgtacatctccaattaagatgttcaagtactgtccgtacgaaaaatacgcttgggtcgagaaatatttcggaccggattttctcgaacagattgttttaacacgggacaagacagttgtgagtgcagacttactgattgatgatagacctgacataactggagccgaacccacccctagttgggagcatgtgctgttcactgcctgccataaccagcatctgcagctgcagcccccaagaagaagactgcatagctgggcggacgactggaaagctatcctggactctaaacgcccctgctag

SEQ ID NO: 106530 - DNA, 720 bp, synthetic construct
  misc_feature 1..720: note = Description of Artificial Sequence: Synthetic coding sequence
  source 1..720: mol_type = other DNA
atgataagactcggcggatggtgtgcaagacggctgtgctctgcggcagttcccgccgggcgtaggggcgcagctggcggcctcgggttagccggcggtagagcccttagggtgttggtagatatggatggagtgctggccgacttcgagggcggttttctgcgtaagttcagggcccgatttcctgatcaaccatttattgccctcgaggataggcggggcttctgggtaagcgaacaatacgggaggctaaggccagggctgtcagagaaagcaattagtatttgggaatccaaaaatttttttttcgagctcgaaccccttcctggagccgtggaagcagtgaaggaaatggcctccctgcagaatactgatgtttttatctgcacctccccgattaaaatgttcaagtactgcccttacgagaagtacgcctgggttgagaagtactttgggccagatttccttgagcagattgtgttgacacgtgacaaaaccgtggtaagcgctgacctcctgattgatgaccgacctgatatcacgggcaaccagcccccggccggtagcatgtcgagttctccccctgctactacctccacatgtagctgttcacctcctgccgcagggtgtaccagagggaggaccacgggaaggcctttctggaccgcaagcggacccgcagagctggattgtgcctctgggagttccgtgggcttgtag

SEQ ID NO: 106531 - DNA, 2853 bp, synthetic construct
  misc_feature 1..2853: note = Description of Artificial Sequence: Synthetic coding sequence
  source 1..2853: mol_type = other DNA
atgggcgtgcccgctttcttccgatggctctcccgcaaatacccatccattatcgtaaattgtgtggaggagaagccaaaggagtgcaatggcgtaaagattcccgtggacgccagtaagccaaatccaaatgacgtggagttcgataatttatatctggacatgaatggtattatccacccctgtacccaccctgaagacaaaccagcacctaaaaatgaagacgagatgatggtcgccatattcgagtacattgatcggttgttttccatcgtccgcccacgccgactcctttatatggcaatcgatggggttgcccctagggcaaaaatgaaccagcaaaggtccaggagattccgggcatctaaggaaggcatggaggccgccgtggagaaacagcgtgtgcgcgaagagatactcgcaaagggcgggttcctcccgcctgaggagattaaagaaagatttgattccaattgtattacccccggcaccgaatttatggataatctggccaagtgccttcggtactatattgccgacagattaaataacgacccggggtggaaaaacttaactgttattctctcagacgcctccgccccaggcgagggcgaacataagattatggactatatacggcgtcagcgggcccagccgaaccatgatcctaacactcatcattgcctgtgcggtgcggacgccgatctgataatgttgggactggctactcatgaacccaattttaccataatccgggaggagttcaaacctaacaagcccaagccttgcggactctgcaatcagttcggccacgaggttaaagattgcgaagggctaccacgggaaaagaaaggaaagcacgatgaactggcagatagtttgccctgcgcggagggcgagtttattttcctacgcttgaacgtcctgagagagtatcttgagcgtgagctgacaatggccagcctcccattcactttcgacgttgaaaggagcatagatgactgggtctttatgtgctttttcgtgggaaacgatttcctcccgcacctcccttcgttggaaattcgagaaaacgcgatagacaggttggtcaacatatacaagaacgttgttcacaaaaccggaggatacttgaccgagtccggatacgtgaatctgcagcgcgtgcagatgattatgcttgcagttggggaagtggaggattccatcttcaaaaagcgaaaagacgacgaggactcttttcggaggaggcagaaagaaaaaagaaaacgcatgaaacgcgaccagcccgcgttcactccaagcggcatcctcacaccacacgcccttggcagccggaacagccccggaagtcaggtggcatccaatccacgacaggctgcctacgaaatgaggatgcagaacaattctagtccttccatcagcccaaatacatcatttacctctgacggctcacccagccctttgggggggattaaacggaaagccgaggatagtgacagcgagcccgaacccgaggacaatgtgaggctatgggaggccggctggaaacagagatactataaaaataaattcgacgtggacgccgccgacgagaagtttcgacgcaaggttgttcagtcttacgttgaagggctgtgttgggtattgcgatattattatcagggctgtgcatcctggaaatggtactaccctttccactatgcaccattcgccagcgactttgagggaatcgccgatatgccctctgattttgaaaagggcacaaaacctttcaagcccctggaacagttgatgggagtttttcccgccgcctctggaaacttcctccccccttcctggagaaagttgatgtccgatccagattcttcaatcattgacttttacccagaggacttcgctatagacttgaatggcaagaagtacgcctggcagggtgtcgcgctcctgccatttgttgacgagaggcggttgcgagcagccctggaagaggtgtacccagatttgactcctgaggaaactcgacggaactcccttgggggggacgttctgttcgtggggaaacaccatccactacacgacttcattctcgaactttaccagacaggcagtactgagcccgtggaagtacctccggagctatgccacggcatccaaggtaaattttcccttgatgaagaagccatcttaccagaccaaatcgtgtgttcccctgttcccatgctgcgggacctcacccagaacactgtcgtgagcattaacttcaaggacccacagttcgcagaagattatatctttaaagcagtgatgctccccggcgctcgcaagcctgcagccgtccttaagccctccgattgggaaaaatctagcaatggccgccagtggaagcctcagcttggctttaatagggaccggagaccagttcacctcgatcaggccgccttcaggacgcttggacacgttatgccgaggggaagcggaactggtatttactcgaacgctgcacctcccccagtgacctaccagggcaacctttacaggccgctgctgagaggccaggcgcagatcccgaagttgatgtccaacatgaggcctcaggacagctggaggggcccacctcccctgtttcagcagcagcgttttgatagaggggtcggagctgagcctctgcttccttggaaccgcatgctccaaacgcaaaatgccgcctttcagccgaatcaatatcaaatgctggccggacctgggggttaccctccccgccgagatgacaggggtgggagacaaggctacccacgggaaggaagaaaatatcccctaccacctcctagcggacggtataattggaattag

SEQ ID NO: 106532 - DNA, 2625 bp, synthetic construct
  misc_feature 1..2625: note = Description of Artificial Sequence: Synthetic coding sequence
  source 1..2625: mol_type = other DNA
atgatggtggcaatcttcgagtacattgaccgtctgttcagcattgtgcggccgagaagactattgtatatggctatcgatggcgttgcaccaagggccaagatgaaccagcagaggagccggcgattccgtgcctcaaaggaggggatggaagccgctgtagagaagcagagggtgagggaagagatcctggctaagggggggttccttccacctgaggaaattaaagaacgcttcgattccaactgtattacaccgggaaccgaattcatggacaacctggctaagtgcctccgctactacatcgcagatagactgaacaacgacccgggttggaaaaatctgactgtgatactgtctgacgcatctgctcctggcgaaggagaacacaagattatggattatatacgtcgccagagggcgcagcctaatcatgacccgaacacccatcactgcctatgtggcgcggatgcagacctgataatgttagggctagccacccatgagccaaacttcacaattatccgcgaggaatttaaaccaaacaagcccaaaccatgcggcctctgcaaccagttcggtcacgaggtgaaggattgcgagggcctcccaagggagaagaagggtaagcatgatgagttggctgattccctcccttgtgccgaaggggagttcatcttcctgcgcctgaatgtgctgcgtgaatacctagagcgtgaactgaccatggctagcttgccctttacttttgatgtggaacgctctatcgatgattgggtcttcatgtgcttcttcgtgggtaatgactttttgcctcacctgcccagtttggagatcagagagaacgccatcgacaggctggtcaatatctacaagaacgtcgtacacaagactggcggatatctcacggagtctggctatgtgaatctgcaacgcgtccaaatgattatgcttgctgttggggaggtcgaggatagtatattcaaaaaaaggaaggacgacgaagactccttcaggagacgacagaaggaaaaacgcaaacgaatgaagcgtgatcaacccgcatttacccctagcggcatcttgacgccccatgcactaggaagccgtaattcccctggttcacaggtcgcctccaaccccaggcaggcagcttacgagatgagaatgcaaaataattcatcacccagtatctcacctaacacatcatttacaagtgacgggtctccttcgcctctgggggggatcaagagaaaggcggaggattcggactccgagccagagcctgaggacaatgtccgtctgtgggaggcgggctggaagcagcggtactacaagaataagttcgacgttgatgcggctgacgaaaaattcaggagaaaggtcgttcaatcttatgtggaaggcctatgttgggttctgcgatactactaccagggctgcgcatcttggaagtggtattatccttttcattacgctcccttcgccagcgatttcgagggcatcgcagatatgcccagcgattttgagaagggcactaagccgttcaaaccactggagcaactcatgggggttttcccagccgcatctggaaacttccttcctccctcttggagaaagttaatgtctgaccccgattcttccattatcgatttctatcctgaagattttgcgatcgatctgaatggtaagaaatacgcttggcaaggcgtggcgttgctgccttttgttgatgagcgtcgtctgagagccgcccttgaagaagtgtatccagacttgacccctgaggaaacccggagaaattccctgggcggcgacgtcctgttcgtgggcaagcaccatcctctgcacgactttatcctggagctctaccagactggcagcactgagccagtcgaagtacctcccgagttgtgccacggaattcagggcaagttctcactcgatgaagaagctatcctccccgaccagatcgtttgcagccccgtgccaatgttacgcgaccttacccaaaacacagtggtgtccattaatttcaaggacccgcaattcgctgaggactatatctttaaggccgtcatgctgccaggcgctcgcaagcctgcagctgtgctgaagccgagtgactgggagaaatcttctaatggccggcagtggaagccccagctgggcttcaatagagataggagacccgtgcacctcgaccaagctgccttcaggacgctggggcatgttatgccgcgcggcagtgggacgggtatatacagcaatgccgcacccccacctgtcacgtatcagggcaacctctacagaccactgctccgcggtcaggcacagatccccaagcttatgtcgaacatgcggccacaggactcctggagaggtcccccacctctcttccagcagcagcgcttcgatcggggggtgggcgccgaaccactgttgccgtggaataggatgcttcaaactcagaacgcagcattccagccaaatcagtaccaaatgttagcggggccaggtggatacccaccgcgtagagatgacaggggtggccgccagggatatcctagagagggccggaaataccccctgccacctccttcaggccgctacaactggaactag

SEQ ID NO: 106533 - DNA, 2691 bp, synthetic construct
  misc_feature 1..2691: note = Description of Artificial Sequence: Synthetic coding sequence
  source 1..2691: mol_type = other DNA
atgaatggaatcattcatccctgcactcatccggaggacaagccagctcccaaaaatgaagatgagatgatggtggcaatcttcgaatatatcgatagacttttctccattgtccgcccacgtcgcctgctttatatggccatcgacggcgtggccccccgcgccaaaatgaaccagcaacggtcaagacgctttcgcgcctcgaaggagggcatggaagcagctgtggaaaaacagcgtgttcgggaagagatcttggctaagggtgggttcctgccccccgaagaaattaaggaacgcttcgattctaactgtataacgcccggtaccgaattcatggataacctggccaaatgccttcgttattacatcgcggaccgccttaacaacgaccccggatggaagaacctcaccgttattctgtctgatgcctctgccccaggtgaaggggaacataagatcatggactacattcggagacaacgtgcacagcctaaccacgaccctaatacccaccactgcctctgtggtgctgatgccgatctgatcatgctgggtctggccacccacgagccaaattttacaataattcgtgaggaattcaaacccaataaaccgaaaccatgtggactgtgcaaccaatttggccatgaggtaaaggactgcgagggcctcccaagggagaagaagggaaaacacgacgagctagccgacagtctgccctgcgcagagggagagttcatttttctgagactgaacgtgttacgcgaatacctggagagggaattaacaatggcctcactcccatttactttcgatgtagagcgatctattgatgattgggtctttatgtgcttttttgtgggtaacgactttctcccccaccttccaagtttggagatcagagaaaatgctattgacagactggttaatatttacaaaaatgtcgtgcacaagaccgggggataccttactgagtccggttatgttaatcttcaacgggtgcaaatgatcatgcttgccgtgggtgaggtggaggactccatttttaaaaagaggaaggatgacgaagatagcttccgccgaagacagaaggaaaagaggaagaggatgaagcgtgatcagcctgccttcaccccaagtgggattcttacaccacatgcgttggggtcacggaatagtcccggaagccaggtagcctccaaccctcgtcaggcagcatatgaaatgcgcatgcaaaacaactcgtctccatccatttctccaaataccagtttcacctccgacggctcaccttccccgctgggcggaattaagagaaaggcagaagactcagactccgagccagaaccggaagacaacgtccgtctctgggaagcgggctggaagcagaggtactacaaaaataagttcgacgtggatgctgctgatgaaaagtttcggcgcaaggtggtgcaaagctacgttgaaggactgtgttgggtcctcaggtattattatcaggggtgtgcaagctggaaatggtactaccctttccattacgctccgttcgccagcgacttcgaaggaatagccgatatgccttccgatttcgagaaggggaccaaacccttcaagcccctcgagcagctcatgggtgtcttccccgctgcctctggaaatttcctgcctccaagctggcgcaagttgatgagcgacccggattcttccatcatagatttctatcccgaggatttcgctatagatctgaatggcaaaaaatacgcttggcagggggtggccctgctgccttttgttgacgagcggcgcctccgcgctgctctagaggaagtgtatcctgacttgaccccggaagaaacccggaggaacagcctcggcggagacgttctttttgtgggtaagcaccacccactgcatgacttcatcttagaactctatcagaccggtagtactgaacctgtcgaggtccccccagagctgtgccacgggatccagggcaagttctctcttgatgaagaggcgattctgccggaccagatagtctgttcccccgttcctatgcttcgcgacctcacccagaacactgtcgtcagtatcaactttaaagacccccagtttgctgaggattatatctttaaagctgtgatgctgccaggtgccagaaagcccgcagccgtgctcaagccaagcgattgggaaaaatcatccaatgggcggcagtggaagccgcagcttggcttcaatagagacaggaggcctgtgcacctggaccaggctgcatttcgaacactggggcacgttatgccgagggggtccgggactggcatatacagtaacgccgccccacctcccgtcacttatcaaggaaacctctatcgacctctcctgagaggacaggctcagatccccaagttaatgtcaaacatgaggccacaggatagctggcggggcccacctccacttttccagcagcagcgcttcgaccgcggggtgggagccgagcctctattaccctggaatcgtatgctccagacccaaaacgctgcattccaacccaatcagtaccagatgctcgcaggaccgggaggttacccaccacgacgcgatgaccgcggtggtcggcaaggttatccacgggagggacggaagtaccctcttcccccaccatccggccgttacaattggaactag

SEQ ID NO: 106534 - DNA, 1779 bp, synthetic construct
  misc_feature 1..1779: note = Description of Artificial Sequence: Synthetic coding sequence
  source 1..1779: mol_type = other DNA
atggctccaggccagctcgccctgttctccgtgtcagacaagaccggtctggtggaattcgcccggaacttaaccgccctgggcctgaaccttgtggcttctgggggaacagcgaaggctctccgtgatgccgggctggctgtgagggatgtctctgaactgactggattcccagaaatgctaggcgggagagtgaaaactctccaccccgcggtgcacgcgggcatcttggcacggaatatcccagaggacaacgcagatatggccaggctagactttaacttaattcgggtggtcgcctgtaatctttatccattcgtcaaaacagtcgcaagccctggtgtgactgtggaggaggctgttgaacagattgatatcggtggagtgaccctgttgagggctgccgcgaaaaatcacgccagggtcactgtcgtgtgcgagccagaggactatgtcgtggtttcaactgagatgcaaagtagcgagagcaaggacacatcccttgaaacccgacggcagttggccctgaaggccttcacacatacagcccaatacgatgaggcaatcagtgactacttccgtaagcagtattccaagggagtaagtcaaatgccactgagatacggcatgaaccctcaccagacgcctgcccaactttacacactgcagccaaaactaccgatcaccgttctgaatggtgctccgggctttattaacctctgtgacgctctgaatgcctggcagttggttaaggagctaaaggaggcactgggaatcccggccgccgcctcttttaaacacgtgagtcctgccggcgccgccgtcggtattcctctgagcgaggatgaggcgaaggtctgtatggtgtacgacctgtacaagaccctcacccccatcagtgcggcctatgctagagccagaggtgccgaccgaatgtcctctttcggggactttgtcgcgctctccgatgtatgcgacgtgccgacggctaagattatatcgcgcgaggttagcgatggcatcattgctccaggatacgaagaagaagcactgaccatattgtcaaagaagaagaatggcaactactgcgtcctgcaaatggatcagtcctataagccagatgagaacgaggtgagaacactctttgggctacacctgagtcagaagagaaataacggtgtggttgacaaaagcctttttagcaacgtcgtcaccaaaaacaaggatcttccagagagcgctctgagggatctcatagtggcgacgatcgcagtgaagtacacccagtcaaattccgtctgttacgctaagaatgggcaagttataggaattggggccgggcaacagtcacggatccattgcacacggcttgcaggtgacaaagcaaactattggtggctgcggcaccatccccaggtcctctccatgaagtttaagactggggtgaagcgcgccgagataagcaacgccatcgatcaatacgttaccggcaccattggagaagatgaggatctgatcaagtggaaagcccttttcgaggaggtgcccgagctcctaactgaggcagagaaaaaggaatgggtggaaaagcttaccgaagtgtccatttccagcgacgccttcttcccatttcgggataatgtcgatagagcaaagcggtcaggagttgcttatatcgcagcaccctctggctctgccgccgacaaggtggtcatcgaggcctgcgacgagctagggattattctcgcccacaccaaccttcgtcttttccatcactag

SEQ ID NO: 106535 - DNA, 1602 bp, synthetic construct
  misc_feature 1..1602: note = Description of Artificial Sequence: Synthetic coding sequence
  source 1..1602: mol_type = other DNA
atgctgggaggacgggtcaagactttgcaccctgccgtgcacgctgggatcctggccaggaacattcctgaagacaacgccgatatggcgaggctggattttaacctgatacgcgtcgtggcttgcaatctgtacccgttcgtcaagaccgtggcgagtccaggtgtaaccgtcgaggaggccgtagaacagatcgacatcggcggtgtcacccttcttagggcagccgccaaaaatcatgccagagttacagtggtttgcgagcccgaggattatgttgtcgtttcgacggaaatgcagtcctccgaaagcaaagatacatccctggagacccgacggcagcttgccctcaaagcatttacacacacagcacaatatgacgaggcgattagcgactactttagaaaacagtactctaaaggcgtcagtcagatgccccttcgctatggcatgaatccacaccagactccagcccagctgtataccctccaaccaaaactccctatcaccgtgctgaatggcgctccaggcttcatcaatctgtgtgacgctctgaacgcatggcagttggtaaaggagcttaaggaggcactggggatcccagccgccgcctcctttaagcacgtttctcccgccggagccgctgttggcattcctctcagtgaagacgaagctaaagtctgcatggtttacgacctgtacaagaccctcacacctatcagtgctgcctatgcaagggccaggggtgccgacaggatgtcatccttcggagacttcgtggccttatcggatgtgtgtgatgtgccaactgcgaaaattatatctagagaggtgtctgacgggatcattgcacccgggtacgaggaagaggctttaaccatactgtcaaagaagaagaacgggaattattgcgttctgcaaatggatcagagttacaagcccgatgagaatgaggtgcggaccctgtttggtttgcatctgtcccagaagagaaacaacggtgtggtagataagagtctgtttagtaatgtagtcactaagaataaagatctcccagagtctgcccttagagatctgatcgtggcaactattgccgtgaaatacactcagtccaatagcgtgtgttatgcgaaaaatggccaggtcataggtataggagctggccagcagagccgtatccactgtactaggctggccggtgacaaggcaaactactggtggctcaggcaccaccctcaggttctcagcatgaagttcaaaacaggggtgaaacgcgctgaaatatccaacgcaatcgaccagtacgttaccggaacaattggcgaggacgaggaccttatcaagtggaaagctttgtttgaggaggttcctgaacttttgactgaggccgaaaagaaggaatgggtcgagaaactcacagaggttagcatcagctccgatgctttttttccttttcgcgataacgtcgatcgggccaaacggagcggggtggcctatatcgccgcccctagtggcagtgctgcggacaaggtcgtcatcgaggcttgcgacgagctgggaattattctggcccatacgaatctgcgattatttcaccactag

SEQ ID NO: 106536 - DNA, 3252 bp, synthetic construct
  misc_feature 1..3252: note = Description of Artificial Sequence: Synthetic coding sequence
  source 1..3252: mol_type = other DNA
atgaaaggaacgagggccattgggtctgtgccagagcggagccccgctggtgtcgatctctcattgaccggcttaccccctccagtctcacgccggccggggtccgctgccaccaccaaacccatagtccgatccgtctcagtcgttaccggttccgagcagaagaggaaggtgctggaagcaaccgggcctggtggatcacaggcaatcaataacctcaggaggtcaaactcaacaacccaggtgagtcagcctcggagcggaagtccccgacccaccgagccaacagattttttgatgctcttcgagggttctccatcaggcaaaaaacgaccggcctccctgtctacagcccccagcgaaaagggagccacctggaacgtgctggacgatcagccccggggatttactctcccatcaaacgcgcggtcctcatctgccctggatagccctgcaggtcccagaagaaaggagtgcactgtggccctcgcacccaattttaccgcaaacaaccgcagtaataagggggctgtcggaaactgcgtgactactatggtgcacaatcggtataccccttccgaaagagcacctccccttaaatcttccaatcagaccgctccatctctcaataacattatcaaggccgcaacctgtgagggcagtgagtctagcggttttggcaagcttcctaaaaacgtgagctccgctacccattccgcaagaaacaacactggcgggagcacaggactgccccggaggaaagaagtaaccgaagaagaggcagaaagattcatacaccaggtgaatcaagctacagtcaccatccaacgctggtatcggcaccaggttcagcgaagaggggcgggcgccgcgcgcctggaacaccttctgcaggccaaacgtgaagaacagcgccagaggagcggcgaaggaacactgctggacctgcaccagcaaaaggaggcggccagacgcaaggctcgggaggaaaaggccagacaagcccgaagggcagctatccaggagttgcaacagaaacgcgcactgagagctcagaaggcttctaccgccgagcggggtcctccagagaatcctagagaaacccgcgttcctggcatgagacagccggcacaagaactgagccccacacccggagggacagcgcaccaggccctgaaagctaataataccggcgggggactgcctgccgcaggtccaggagacaggtgcttacctacatctgattcatcaccagaaccccaacagcctccagaggataggacccaggatgtccttgctcaggacgctgccggagacaacttagagatgatggccccctcacggggcagcgcgaagagccgggggcccttggaggagctgctccacactttacagttgctcgaaaaagaacccgatgttctgccccgcccccgcactcaccaccgaggcagatacgcatgggccagtgaggttactaccgaggacgacgctagttcgctcactgcagacaacctcgaaaagtttggcaaattgagtgcattcccagagcctcccgaagacgggacactactttccgaagctaagctgcagagcataatgtccttcttagatgagatggagaagtcgggccaggatcagttggattctcagcaagagggctgggtacccgaggcggggcccgggcctctggagctcggctcagaggtttctacaagtgtgatgaggcttaagttggaagtcgaagagaaaaaacaggccatgctgctcttgcagagagctttggcgcagcagagggacctcaccgccagacgcgttaaggagaccgaaaaggccttgtcgcggcagctccagaggcagcgagaacactacgaggcgactattcagagacatctggcctttattgatcaactaatagaagacaagaaggtcttaagtgaaaaatgtgaggcggtggtggctgagctgaagcaggaagaccagaggtgtactgaaagagtggcccaagcacaggcacagcacgaattagagattaagaagcttaaggaactgatgtccgccaccgaaaaggcccggagagagaagtggatcagtgaaaagactaagaagatcaaggaggttaccgtaagaggacttgagcctgagatccagaaactgatagctcgccataagcaggaggtaagaaggctgaagtcacttcacgaagctgagctgttgcagtccgacgagagggcaagtcagcggtgccttagacaggccgaggagctgcgcgagcagctggaaagagaaaaggaagcgcttggccagcaggagcgagagcgcgcgcgccaacgttttcagcagcaccttgaacaggagcaatgggccctgcagcagcaaaggcagagactgtacagtgaggtggctgaagaacgggagcgactaggtcagcaggcggcccggcagcgggccgagctggaagagctgagacagcaactagaggagagtagcagtgccctgacccgcgctctgagggctgaattcgaaaaaggacgcgaggagcaagaaaggaggcaccagatggagttgaacactcttaagcaacagctcgagctggagagacaggcatgggaagctggtaggacccggaaggaagaagcatggctgctgaaccgggagcaagagctgcgtgaggaaattagaaaggggcgtgacaaggaaatcgagcttgtgatccaccgactggaagccgatatggcacttgctaaagaagagagcgaaaaggccgcagagtctaggatcaaaagactgagggacaagtacgaagcagagctatccgagttggaacagtctgagaggaagttgcaggagaggtgtagcgaactgaaaggacaacttggggaagcagaaggggaaaacctgaggcttcaaggactcgtcaggcaaaaggaaagagcacttgaggacgcccaggcagttaacgagcaactgagcagcgagcgtagcaatttagctcaagtgatccgacaggaatttgaggatcgactcgcggcctcagaggaagagactcgacaggctaaggccgaactggccaccctgcaggcccgtcagcagctggaattggaagaggtgcatcgccgcgtgaaaaccgccttggcccgaaaggaggaagccgtgtctagcttacggacccagcatgaagcggccgtcaagcgtgccgaccatctagaggaactgctggagcagcatcggcgcccgacccccagcactaaatag

SEQ ID NO: 106537 - DNA, 3135 bp, synthetic construct
  misc_feature 1..3135: note = Description of Artificial Sequence: Synthetic coding sequence
  source 1..3135: mol_type = other DNA
atgaaaggaacacgagctatagggagtgtacccgaaagaagtccagccggagtggacctgagcctgaccgggctgccccctccggtgagccgccgccctgggagtgcagctacaactaagcccattgtcagatcagtgagcgtagtgaccggatccgagcaaaagcgtaaagtgctggaagctaccggccccggagggtcccaagccatcaacaatttaaggcgatccaactccaccactcaggtctctcagccacggtctggctcgcctcggcccactgagccaaccgatttcctcatgcttttcgaaggatccccttctgggaagaagagaccagccagtttaagcacagcccccagcgagaagggtgcaacttggaacgtgctggatgaccaacctcggggattcactttacccagcaatgctagaagctcatctgccctggactcccccgccggaccgcgtagaaaggagtgcacggtggctctagcacccaacttcaccgccaataacagatctaataaaggggccgtcgggaattgcgtcacgactatggttcataaccggtatactccctctgagagggctcccccactgaagtcgtcgaatcagacagcacccagtttaaataacataattaaggctgccacctgtgagggatctgaatcttccggttttggaaagctgccaaaaaacgtgtcaagtgccacgcatagcgcacgaaacaacaccggcggtagcacaggactacctagacggaaagaggtgaccgaagaggaagccgaacgattcatccatcaagtgaatcaagccaccgtgactattcaaagatggtataggcaccaggtccaacggcgaggcgccggggcagcccggctcgagcacctgctgcaagctaaacgagaagaacagaggcagcgctccggggagggtacgcttctggatctgcaccagcaaaaggaggccgctagacggaaagctcgcgaggaaaaggctcggcaagcgcgccgtgcagcaatccaggaactccagcagaagagagccctgcgggcgcagaaagcttcaacagcagaaagggggcccccagagaatcctagagagacaagggtacccggaatgcgacaacctgctcaggagctttccccgacgcccggaggcacagcccatcaagctctgaaggccaacaatactggcgggggcctaccagccgccggccctggagaccggtgcctccccacctcggacagctcacctgaaccccagcagccccccgaggacagaacccaagatgtcctcgcccaggacgccgcgggtgacaatttggagatgatggctcccagccgagggtcagcgaaaagccgcggacctctggaggagctactccacaccctgcagttgctggagaaggagccagatgtgttgccgcgtcctaggactcaccacaggggacggtacgcctgggctagtgaggaggatgacgcttctagcctcacggctgataacctagagaagtttgggaagttgtctgcattccctgaaccacctgaggatgggactttgctgtcagaagccaagctccagtctatcatgtcctttctagatgagatggagaagtcgggccaggaccagctcgactcacaacaggagggatgggtgccagaggcaggcccagggccgctggagttaggctcagaagtcagcaccagtgtgatgcggctgaaactggaggtggaggagaaaaaacaggcgatgctcttactgcagagagctctagcgcaacagagagacctgactgcaaggcgggtaaaggagaccgagaaagctctgagccgacagctccagaggcagagggagcactatgaggccactattcagcgacatttggcattcatcgaccagctgatcgaagacaaaaaagttctcagcgaaaagtgcgaagcggtggtggccgagttgaaacaggaagatcagaggtgcaccgaacgggtggcccaggctcaggctcagcacgagctggagattaaaaagctcaaggagctgatgagtgcgacagaaaaggcacggcgcgaaaagtggatttccgaaaaaaccaaaaagataaaggaggtcaccgtccgcggactggagccggagatccagaagctgatcgctagacacaagcaagaggtgagaaggctaaaatcattacacgaggcggagctgctccaatccgatgaacgggcgtctcagcggtgccttagacaagccgaagagctcagggagcaactcgaacgggagaaagaagctctgggacagcaggaaagagaacgcgcccggcagcgacaacgagccgaactcgaagagctgcgccagcagcttgaggaaagcagcagtgctctgacacgagccctgcgggccgagttcgagaagggccgcgaggagcaggaaagacgtcaccaaatggagcttaatacacttaagcagcagcttgagttagagagacaagcatgggaggccgggcggaccagaaaggaagaggcctggcttctgaaccgggaacaggaactgagggaagagatacgcaaaggcagagataaggaaatcgaactggttatccatcggctcgaagccgacatggcacttgcaaaggaagagtcagaaaaagcagccgagagcagaattaaaagactgagagataagtatgaggccgaactctcagagctcgaacaatcagagcggaaactccaggaaaggtgctcggagctcaagggacagctgggtgaagcagagggagagaacttgcgtctgcagggtctcgtgcgccagaaggagagagccctggaagacgcccaggctgtgaatgagcaactcagctccgagagaagcaatctggcccaggtgataaggcaggagttcgaagaccggctcgcagcaagtgaagaggagacgcggcaggcgaaagccgaactagccacactgcaagcacggcagcagttggaactcgaggaggttcaccggagagtaaagacagccttggctcgaaaagaagaggccgttagcagcttgaggacacagcatgaagccgcggtgaagagagcagaccatctggaagagctcctggaacaacaccggcgtcctacacctagtacaaagtag

SEQ ID NO: 106538 - DNA, 3243 bp, synthetic construct
  misc_feature 1..3243: note = Description of Artificial Sequence: Synthetic coding sequence
  source 1..3243: mol_type = other DNA
atgaaggggacacgagccatcggaagcgtgcccgagaggagcccagcaggggtagatctgagcctcacaggcctgcccccccccgtctccagacgccccgggtccgcagcgaccaccaagcccattgtgcgctctgtctcggtggtcactggttccgaacaaaaaaggaaggtgctcgaagctaccggcccaggtgggagccaggctattaacaacctgcgaaggtccaactccaccacacaggtaagccaaccaaggtcaggctctccacgccctactgagccaacagactttctgatgctctttgagggctccccttccggcaagaaaaggcctgcgtctcttagtacagccccaagcgaaaagggggcaacctggaacgtgcttgacgatcagcccagggggttcacgttgccctcaaacgctcggagttcctcagcgttagactcacctgctggaccccgaaggaaagagtgcacggtcgcactcgctccaaactttacagctaataataggagtaacaagggcgcggtgggcaactgtgttacaactatggtgcacaaccgctatacgccttccgaacgtgctcccccattgaagagtagcaaccagacggcaccttcccttaacaatataataaaagccgcaacatgcgaggggtccgagagctcgggctttggtaagctaccaaagaacgtgtcttcagccacccacagcgctagaaacaacacaggtggaagtaccggcctgcctcggagaaaggaagttactgaagaggaagctgaaagatttatccaccaggtcaatcaggccactgtgacaatccagcgatggtataggcatcaagttcaaaggaggggcgccggcgccgcaaggctggagcacctactgcaagcaaaacgagaggagcagcgccagaggagtggcgaaggcacccttctggacttacaccagcagaaagaggcggctcgccgtaaggcacgcgaggagaaagcaagacaggcgcggagagcggcaattcaggaattgcaacaaaagagggccctccgggcccaaaaggcttccaccgctgagagagggccccccgaaaatccgagagagacacgcgtgcctggtatgcgtcagccagcccaggagctatccccgacacctggcggaaccgcccaccaggcactgaaagctaacaacaccggcggggggcttcccgccgccgggcctggggatcgctgtctgcctaccagtgatagctcacccgaaccacaacagccacccgaagatagaacccaggacgtgctggcacaggacgccgccggcgataatttggagatgatggccccctcccggggctccgcaaagtccaggggcccacttgaggagctacttcacacgctgcagctcctggaaaaagagcctgatgtgctgcctagacctcgcacacaccaccggggtcgatatgcctgggcaagcgaggaggatgacgcatccagcctcactgccgataatcttgagaaattcggaaaactcagtgcattcccagagccccccgaggatggtaccttgctatccgaggcaaaactgcagagcataatgagcttcttagacgaaatggagaagtctggtcaggatcagctcgactcacagcaggaaggttgggttcccgaggccggaccaggcccgcttgagctgggatctgaggtgtccactagtgtcatgaggttaaagctggaagtcgaggagaaaaagcaggccatgctgcttctgcagcgtgccctggctcagcagagggacctcacggcccgcagggtgaaagagacagagaaggcacttagtcgtcaattacagcggcagcgggaacactatgaggctactatccagcgtcacttggcattcattgaccagttgattgaggacaaaaaagtgctgtccgagaaatgcgaagccgttgtcgccgagctgaaacaagaagatcaacgctgcactgagcgcgtagctcaagctcaggctcagcacgaactggagattaaaaagctgaaagagcttatgtccgcgaccgaaaaagcccgccgtgaaaaatggatctccgagaaaacgaagaagatcaaagaagttaccgttcgggggttggagcccgagatacaaaagctgatcgcaaggcacaaacaggaggtcaggcgccttaaaagtctgcacgaggcagaactgcttcaaagtgatgaaagggcttctcagcggtgtctgaggcaggctgaagaattgagggaacagctagaacgggaaaaagaggctttgggacagcaggagcgagagcgcgcccggcaacgcttccaacagcatcttgagcaagaacagtgggcgttgcagcagcaaagacagcgcctatatagcgaggtggccgaagagagggaacgcctgggacagcaggccgcacgccagagagcggagttggaagagctcagacagcaactggaggagtctagctccgccttgacaagagccctgcgggccgagttcgagaagggtcgtgaagaacaggagcgccgtcatcaaatggaacttaacacactgaaacagcagcttgaactggaaaggcaagcgtgggaggccggtaggacccgaaaagaagaagcctggctgctcaatagggaacaggagctgagggaggagattagaaaaggcagagacaaggagatcgaacttgttattcatagactggaagctgatatggcccttgctaaagaggagtctgagaaggcggccgagtctcgcatcaaacgtctcagggataagtatgaggcggaactctctgaactggagcagtcagagcggaaactccaggaaaggtgctccgagctcaaggggcaactgggagaggcggaaggcgagaacctgaggcttcaaggactggtccggcagaaagagcgggcgctggaggacgctcaggctgtgaatgagcaactctcatctgagcggtcaaacctggcccaggtaatcaggcaggaattcgaagacagactggcagcatctgaggaggagacaaggcaggcaaaagccgagctagcaaccctgcaagctcgtcaacagctagaattggaggaggtgcacagacgagtgaaaactgctctggctcgcaaggaagaagcagtcagctctttgcgcactcagcatgaggccgccgtgaagcgggcagaccatttggaggaactactggaacagcaccgtcggcccactccaagtactaagtag

SEQ ID NO: 106539 - DNA, 699 bp, synthetic construct
  misc_feature 1..699: note = Description of Artificial Sequence: Synthetic coding sequence
  source 1..699: mol_type = other DNA
atggacgcattggttgaagacgacatttgcatactaaatcatgaaaaggcccacaagcgcgatacggtgaccccagtatcaatatacagcggtgacgagtccgtcgcctcacactttgctctcgtcacagcctacgaggatatcaagaaacgcctgaaggattcagaaaaggagaactctctcctcaaaaagagaatcaggtttctggaggagaagctcattgcccggttcgaagaagaaaccagttcagttggaagggagcaggttaataaggcatatcacgcgtacagagaagtatgtatcgatagagacaacttaaagtccaagctcgacaagatgaacaaggataattcagaaagtctgaaggtgctgaacgagcagctacagagcaaggaggtggaactcctccagttgcgtacggaggtcgaaacccagcaggttatgcgcaaccttaatcccccttctagtaactgggaggttgaaaagctctcttgtgatttgaagatacatggcctggagcaggaactggagctgatgcgaaaagagtgttcagatttgaaaattgagctgcagaaagctaagcaaactgacccctaccaagaagataaccttaagagcagagatctccaaaagcttagtatctcgagggtgagtgtggcccagcctggcgtgcagtggcgcaatcatggaatcgcttag

SEQ ID NO: 106540 - DNA, 648 bp, synthetic construct
  misc_feature 1..648: note = Description of Artificial Sequence: Synthetic coding sequence
  source 1..648: mol_type = other DNA
atggatgctttagttgaggacgacatttgcatcttaaatcacgaaaaggcgcacaaaagagatactgtgacccccgtctcgatctactcaggagacgagtccgtggctagccacttcgccctcgtcaccgcttatgaggatatcaagaagagactaaaggactccgaaaaggagaactctctcctgaaaaagcgcatccgcttcctggaagagaaactgatcgccagatttgaggaggaaacctctagtgtggggcgcgagcaggtgaacaaagcctaccatgcatacagagaagtttgcattgatcgtgacaatcttaagtctaaactggacaagatgaacaaagacaacagtgagtcactgaaggtgcttaacgagcaactccagtcgaaagaggtcgagttgttgcagctgagaaccgaagttgaaacacagcaggtcatgagaaaccttaatcccccatccagcaactgggaggtggaaaagttgagctgcgacctgaaaatccacggcctggaacaggagctagagctgatgaggaaggaatgctccgacttgaagattgagctgcaaaaggccaagcagaccgacccataccaagaggacaacctcaaatcccgtgatctgcagaagttgagcatatcctag

SEQ ID NO: 106541 - DNA, 288 bp, synthetic construct
  misc_feature 1..288: note = Description of Artificial Sequence: Synthetic coding sequence
  source 1..288: mol_type = other DNA
atggacgcattggtggaagacgacatctgtatcctgaaccatgagaaggctcacaagagagataccgttactcccgtctcaatatatagtggcgacgagtctgtggcaagccattttgccctggttacagcctacgaagatatcaagaaacggttaaaggattctgagaaggagaacagcctactgaagaagaggatccgttttctggaggaaaagcttatcgcccggttcgaggaagagacttcctctgtcggtcgggaacaagtgaacaaagcctaccatgcctag

SEQ ID NO: 106542 - DNA, 732 bp, synthetic construct
  misc_feature 1..732: note = Description of Artificial Sequence: Synthetic coding sequence
  source 1..732: mol_type = other DNA
atggacgccctcgttgaagatgacatctgcattctgaatcatgagaaagctcacaaacgtgacacagttactcccgtctcgatctactcaggcgatgagagcgtcgcatcccacttcgcgctggttaccgcatatgaggacataaagaagcgactgaaggacagtgagaaagagaatagtttgcttaagaagagaatccgattcttagaggaaaagctcatcgcaagatttgaggaagagacctcgtccgtcgggcgcgaacaagtgaataaggcttaccacgcctatagagaagtgtgcatcgaccgggataacctcaaatctaagctggataaaatgaataaggataatagcgagtcgttaaaagtacttaacgaacaactacaaagcaaagaggtggagcttcttcagctgcgcactgaagtcgagacccaacaggtcatgcggaatctgaacccaccttcatctaattgggaggttgaaaagctgtcatgtgatctgaagatccatgggttagagcaggaactagagctcatgcgaaaagagtgttccgatttgaagattgagctacagaaagcgaagcagaccgatccttaccaggaagataacctgaagtctcgtgacctgcagaagctctctatttcgcggcagtccatctgtagcacagcatggagcgctgtcgcacagagttgggacagcatgaacttcgaggactgctcactgtttgcatag

SEQ ID NO: 106543 - DNA, 732 bp, synthetic construct
  misc_feature 1..732: note = Description of Artificial Sequence: Synthetic coding sequence
  source 1..732: mol_type = other DNA
atggacgccttagtggaggatgatatctgcattctcaatcacgaaaaggcccataagcgagatacggtgacaccggtgagcatttactccggggacgaaagcgtcgcatcacattttgcccttgtcactgcctatgaagacatcaaaaagagactcaaagactcagagaaggaaaactccctgctgaagaaaaggatccgcttcctggaggagaaactaatcgcacgcttcgaagaggagacctcctccgtgggccgagaacaggtgaacaaagcctatcatgcatatcgggaggtttgtatcgaccgggataatctgaagtccaaattggataaaatgaataaggataatagcgagtcccttaaagtcttaaacgagcagctccagtccaaggaggtcgagcttttacaactgaggacagaagtcgagacacagcaggtaatgcggaatctgaatcccccctcgagtaactgggaggtcgaaaagctatcctgcgatcttaagattcacggactggagcaggagcttgaacttatgaggaaagagtgtagcgatctcaaaattgagttgcagaaagcaaaacaaactgatccgtatcaggaagataatctgaagagtcgcgatctccagaaactgtctatcagtcgacagtctatctgtagtaccgcatggagcgctgtggctcagtcatgggacagcatgaactttgaagattgcagcctgttcgcttag

SEQ ID NO: 106544 - DNA, 1179 bp, synthetic construct
  misc_feature 1..1179: note = Description of Artificial Sequence: Synthetic coding sequence
  source 1..1179: mol_type = other DNA
atggatgcactggtggaggatgatatctgtatcctgaatcacgagaaagcacacaagagggatactgtgacaccggtatcaatctatagtggagacgagagtgtcgcctcccattttgctcttgtcaccgcttatgaggacatcaagaaaaggctgaaagatagcgagaaggagaactcactgctcaagaagcgtataaggtttcttgaggaaaaattaattgcacggtttgaggaagagacctctagcgttggccgcgaacaggtgaacaaagcctatcacgcctatagggaagtgtgcatcgaccgcgacaacctgaaatcaaagctagataagatgaataaagataactcagaatcactgaaggtcctgaatgaacagctgcagagtaaggaggtggagttactacagctgaggactgaagttgagacacagcaggtgatgcggaatcttaatcccccatctagcaactgggaagtggagaaactgtcttgcgacctcaaaatccatggccttgaacaagaactggagctcatgcgaaaagagtgctctgacctaaaaatcgagctgcagaaggccaagcagacagacccctaccaggaggacaacctgaaaagcagagatctccagaagctgagcatatcttccgataatatgcagcacgcatactgggagctcaagcgggaaatgagcaacttacacttggtgacccaggtgcaggccgaactgctaagaaaactcaaaacctcaactgccattaagaaagcgtgtgcacccgtcggctgtagcgaagacttggggagggatagcacaaaactacatctgatgaattttacagccacctatacgcgccatccaccgctgctccctaatggaaaggccttgtgccacacaaccagttccccgttgcctggggatgtgaaagtgctgtcagagaaagcaatcctgcagagttggaccgacaacgaacgtagcatccctaatgatgggacctgcttccaggagcacagttcgtacgggaggaatagcctcgaagacaactcctgggtgtttcccagcccacctaaaagcagcgagacagccttcggtgaaacgaaaaccaagactttgccattgcccaatctcccacctcttcattatttagatcagcacaatcaaaactgtctctacaaaaactag

SEQ ID NO: 106545 - DNA, 1269 bp, synthetic construct
  misc_feature 1..1269: note = Description of Artificial Sequence: Synthetic coding sequence
  source 1..1269: mol_type = other DNA
atggatgttctctctcccggccagggaaacaacacgacttctccacccgcgccctttgaaacaggcgggaacacaacgggcatttccgatgtgacagttagttatcaggtcattacaagccttttgctcggaacattaattttctgtgcagtgttagggaatgcgtgtgtggtcgccgctattgccctggaaaggagtcttcagaatgtggcaaattacctgatcggctctctcgctgtgaccgacctcatggtctccgtgttggtgctcccaatggccgctctgtaccaagtgctgaacaagtggacattgggacaggtgacatgtgacttgtttatcgctctcgatgtgctgtgctgtacatcctccatattacatctatgtgccattgctctcgaccgatactgggcaatcacggatcccatagactacgttaacaagcggacccctaggcgcgctgcagccctgataagtctgacctggctgattggctttctcatttcaatcccacctatgctggggtggcgcacccccgaggacagatctgatccggatgcttgtactattagtaaggaccatggctacactatctattctacattcggtgccttctatattccactgctgctgatgctagttttatatggaaggatttttagggcagctcgctttcgaattcgcaagactgttaaaaaggtagaaaagacaggagcagataccaggcacggagcttctcccgccccgcagccaaaaaagtctgtcaacggagagagcgggtcccggaattggcgtctgggagtagaaagtaaggccggcggggccttgtgtgctaacggagcagtgcggcaaggcgacgacggggcagccctggaagtgattgaagttcatcgtgtggggaactctaaggaacacttacccctgcccagtgaagccggaccaacaccctgcgcgcccgcatcattcgagagaaagaatgagaggaacgctgaagccaagcggaagatggcgctcgctcgtgagcgtaaaaccgttaaaactctggggattattatgggaacttttattctgtgctggctgcctttctttatcgtcgctttggtgctgcctttctgtgaaagttcgtgccacatgccaacgctgttgggtgccatcatcaattggctgggatactcaaacagtcttcttaacccagttatatacgcttacttcaataaggactttcagaatgcctttaagaagataattaagtgtaagttttgtcggcagtag

SEQ ID NO: 106546 - DNA, 129 bp, synthetic construct
  misc_feature 1..129: note = Description of Artificial Sequence: Synthetic coding sequence
  source 1..129: mol_type = other DNA
atggacgttctgtcccccggacaggggaacaacacaaccagcccccctgctccttttgaaaccggggggaatacaacaggcatttctgacgtcaccgttagctatcaggttatcacttcactattgtag

SEQ ID NO: 106547 - DNA, 1173 bp, synthetic construct
  misc_feature 1..1173: note = Description of Artificial Sequence: Synthetic coding sequence
  source 1..1173: mol_type = other DNA
atggaggagcccggggcacagtgtgcaccccccccccccgcggggagcgagacctgggtaccacaggccaaccttagtagcgccccatcacagaattgctcagcgaaagattacatctaccaagactccatcagcctcccatggaaagtgctactggtaatgctattagccctgatcacgctggcaactacgctgtcaaatgcatttgtgattgccacagtgtatcgcacccgtaaactccacaccccagcaaattatctcatcgcctcccttgccgtcactgacctcctggtctcgatcctagttatgccaataagcaccatgtatacagtgacaggcaggtggacactgggacaggtggtgtgtgacttctggttgagcagcgacatcacatgctgcacggccagcatacttcacctctgtgtaatcgctctggaccggtattgggctataacagacgccgtggaatatagtgccaagagaacccctaagagagctgcagtgatgatcgctctggtttgggtattctccatttccatttctctgcctccatttttctggcgccaggctaaagcggaggaggaagtgagcgagtgtgtggtgaataccgaccatatactctacaccgtgtattctaccgttggagcattttattttcctactctactccttatcgcactctatggccgaatatatgtggaggccaggagcaggatacttaaacagacgcccaataggacaggtaagcgcctgacccgggcccagcttatcaccgactcgcctggatccacaagctcagtgacttcaattaactctagggtgcctgatgtgcccagcgagtccgggtcacccgtgtatgtcaatcaggtgaaggtccgggtctccgacgccctcctggaaaaaaaaaaactgatggctgctagagaaagaaaagctactaagactctgggaatcattctgggtgcttttattgtgtgttggctgccttttttcatcatcagtttggtgatgccaatctgcaaggatgcctgctggtttcaccttgctatcttcgatttctttacatggctcgggtacctcaactctctgattaaccctatcatctacacgatgtccaacgaagatttcaaacaagccttccacaaattgatccgtttcaaatgcaccagttag

SEQ ID NO: 106548 - DNA, 1134 bp, synthetic construct
  misc_feature 1..1134: note = Description of Artificial Sequence: Synthetic coding sequence
  source 1..1134: mol_type = other DNA
atgtcacctctgaaccaatccgctgaaggtttgcctcaggaagcctcaaatagatcattgaacgccacggagacatctgaggcttgggacccgcgcacactgcaggcactcaagatcagcttggcggtggtgctgtctgtgattaccttggccaccgtcttatccaacgcatttgttctgacgacaattctgctcactcgcaagctgcacacacccgcgaattatctgatcggctctctagccaccactgacctgctcgtgtcaattcttgtgatgcctatctccattgcatatacaatcacgcatacttggaactttggacagattctctgtgatatctggcttagttcagatatcacatgttgcaccgcctctattttgcatctgtgcgtgatcgccttagataggtactgggccataaccgacgctctggagtacagtaaacggcgtactgccgggcacgccgccaccatgatcgccatagtatgggctatctctatctgcattagcattcctcctcttttctggagacaggccaaagcgcaagaagaaatgtcagactgcctcgtgaacacctcgcagatttcctacacgatttatagcacttgcggcgcgttttacattccgtcggtgcttttgatcatcctttacggtcgcatttacagagccgcaagaaatcgaatcctgaacccgccgtccctgtacggtaaacgtttcacgacagcccacctaatcactggaagcgccggaagcagcttgtgttcacttaacagcagcctccatgagggacacagtcacagcgcaggatctccactgttttttaaccatgtgaaaattaagctggccgacagtgctctagagaggaagaggatatcagctgccagagaacggaaggccaccaaaatcctcggcattatcctgggtgcttttataatctgttggctaccattctttgtggtgagcttggtcctgcctatatgtagggatagttgctggatccatccagctttgtttgacttcttcacttggttgggctatttaaacagtctgattaatcctattatttataccgtttttaatgaagaatttaggcaagctttccaaaaaattgtgcccttccgaaaggccagttag

SEQ ID NO: 106549 - DNA, 1134 bp, synthetic construct
  misc_feature 1..1134: note = Description of Artificial Sequence: Synthetic coding sequence
  source 1..1134: mol_type = other DNA
atgtcgcctctgaatcaaagtgcggagggcctcccgcaagaggctagtaaccggagcctgaacgccacggagacatcggaagcctgggatccccggacactgcaagcactcaagatttcacttgctgtcgtgctatccgtgattacgctagcaactgtactctcaaatgccttcgttctgactaccatcttgttgacccgaaagctgcatacacccgcaaattatctaatcggttccctggccactaccgacttgctcgtgtccattctggtgatgcccattagcattgcctacaccattacacacacatggaactttgggcagatactttgcgacatctggctgagctctgacataacatgctgtaccgcttccattctacacctctgtgtaattgccctggaccggtattgggcaatcaccgatgcccttgagtattccaagcgacgaaccgccgggcatgcagcaaccatgattgctatcgtttgggccatctccatttgcatctccatcccacccctgttctggaggcaggctaaagctcaggaagaaatgagcgattgtctggtgaacacatcgcaaattagttacacaatctactcgacgtgtggggcattctatatcccatcagtgctcctcattattttatatggcaggatctatcgcgcagcccgtaatcgcatcctgaacccaccaagtctgtatggtaaacgtttcaccaccgcacatttaattaccggttccgccggtagctctctttgctccctgaactccagcttacatgaggggcactcccatagcgccggcagccccctcttttttaatcacgtcaagattaaattagccgacagcgctctggaacgtaaacgcataagtgcagctagggaaagaaaggctacaaagattttagggattattctaggagcctttatcatctgctggctgcctttcttcgttgtgagtctggtccttccaatatgtagggattcgtgctggattcacccggccctctttgatttcttcacctggttgggttatttgaatagccttattaaccctattatctacacggtgttcaacgaggaatttagacaagcctttcagaagatcgtcccgtttcggaaggcaagctag

SEQ ID NO: 106550 - DNA, 1098 bp, synthetic construct
  misc_feature 1..1098: note = Description of Artificial Sequence: Synthetic coding sequence
  source 1..1098: mol_type = other DNA
atgaacatcacaaactgtacaaccgaggcgtctatggcaatacgccctaagacaattacggaaaaaatgctgatatgtatgacactcgttgtcataacaactcttacgaccctgctaaatctcgccgtgattatggcaattggaactactaagaaactgcaccagcccgcaaattacctgatttgttctcttgcggtcaccgacttgctggttgctgttttagtcatgccgctgagcatcatctacattgttatggatcggtggaaactggggtacttcttatgcgaagtttggctgagcgtggacatgacctgttgtacctgttcgattctccatctttgtgtgatagccctggacagatactgggctattaccaacgccattgagtacgctcgcaagaggaccgctaaacgggccgccctcatgatcctgacagtttggaccattagcattttcatcagcatgccacccctgttttggaggagtcacagacggctgtcaccacctccttcacagtgcactatccagcatgaccacgtcatctatacaatttattctaccctcggagctttctacattccccttactcttatcctgatcctctactaccggatttaccatgcggccaagtcactgtaccagaagcgcgggtcctctcgtcatctgtccaacaggtccacagactcgcaaaatagcttcgcatcttgcaaacttactcagacattttgcgtcagcgatttctctacaagcgaccctaccaccgagtttgaaaagttccatgcgagcatccggatccccccttttgataatgacctcgaccaccctggcgagaggcagcagatatcgtcaactagggaacgtaaggctgctcgcattctcggtctaatcctaggtgcattcattttgtcctggctccctttttttatcaaagaactaattgtcggactttcaatctacaccgttagcagcgaggttgcagatttcctgacatggttgggatatgtcaacagcctcataaatcccttactatatactagcttcaacgaagatttcaagctcgccttcaagaagctcattaggtgtagagaacatacatag

SEQ ID NO: 106551 - DNA, 1098 bp, synthetic construct
  misc_feature 1..1098: note = Description of Artificial Sequence: Synthetic coding sequence
  source 1..1098: mol_type = other DNA
atgaacattacgaattgtacaactgaagcctctatggctattagacccaaaacgatcactgaaaagatgctaatttgcatgactcttgtcgtgatcaccacattgacaacattgctgaatctggcagtaataatggccattgggactactaaaaaactgcaccagccggctaactatctgatatgcagcctcgctgtcaccgatttgcttgtcgctgtcctggtgatgccattgagcattatctatatagtaatggacagatggaaactcggctattttctgtgcgaggtgtggttatctgtggacatgacttgctgtacttgttccatcttacacctctgcgttatcgcgctcgaccgctactgggctatcacaaatgccattgagtacgctagaaagcgcactgccaagagggctgcacttatgatcttgacagtgtggacaatctcgatcttcattagcatgcctccactcttctggcggtcacataggcgactgtcaccccctccatcccaatgcaccattcagcatgatcacgtgatctacaccatttacagtacccttggcgcattttacataccactcacgttgatacttattctttattaccgtatctatcatgctgccaagagcctgtaccagaaacgcggaagcagtcggcacctgagcaaccggagcaccgactctcagaacagcttcgccagttgtaagctgactcagacgttctgtgtgtccgactttagcacatctgatcctaccaccgagtttgagaagtttcacgccagtatccgtattcctccttttgataatgatctcgatcacccaggagaacgacaacagatcagttcaactcgggagcggaaggccgcgcgaatcctcgggttgatacttggggcattcatcctctcatggctgccattttttattaaagaactcatcgtcgggctgtcaatttacaccgtgagctccgaagtagctgactttcttacctggctgggctacgtgaacagcctgatcaatcccttgctgtacacttcctttaacgaggacttcaaactggctttcaagaagctgataaggtgccgcgagcatacctag

SEQ ID NO: 106552 - DNA, 1101 bp, synthetic construct
  misc_feature 1..1101: note = Description of Artificial Sequence: Synthetic coding sequence
  source 1..1101: mol_type = other DNA
atggatttccttaacagcagtgatcagaacctgactagcgaggagttactgaataggatgccctctaaaattcttgtctccctaacactgtctgggctggccctgatgacaaccacaatcaacagtctggtcattgcggccattatcgtgaccagaaagttgcaccacccggccaactacctaatctgctctctggcggtgaccgactttctagtcgctgtgcttgtgatgccgttcagcatagtgtatatcgtacgcgaatcctggatcatggggcaggtagtttgcgacatttggctcagcgtcgacatcacatgctgcacttgcagcattctgcatctatccgccattgccttagacagataccgcgctatcacggatgccgtggagtatgcacggaaaagaacccccaaacatgccggtatcatgatcactattgtttggatcatctccgtgtttatatctatgcctccgctgttttggcggcatcagggaactagcagggacgatgaatgcattattaagcacgaccatatcgtatctaccatatactctacttttggagccttctatatccccctggccttgattctcattctgtactataagatctatagggcagcgaagactctgtatcataagcggcaggcatctcgaattgccaaggaggaagtcaatgggcaggtgctgctcgagtccggcgaaaaatccacaaagtctgtctccacttcttacgttctggagaagagcctgtctgatccctccactgatttcgacaaaatccacagcacagttcgatcactgaggtcggagtttaaacatgagaagagctggagaaggcagaaaatctcgggcactagggaacgaaaagcagcaaccacccttggcctcatcctgggagcctttgtgatttgctggcttccatttttcgtaaaggagctcgtagtcaacgtttgtgacaagtgcaagatcagcgaagaaatgagtaacttcctggcttggttggggtacttgaactcactgatcaatccactgatttacactattttcaacgaggatttcaagaaggcatttcagaaattagtgcggtgtcgctgctag

SEQ ID NO: 106553 - DNA, 1416 bp, synthetic construct
  misc_feature 1..1416: note = Description of Artificial Sequence: Synthetic coding sequence
  source 1..1416: mol_type = other DNA
atggacatcctctgtgaggagaacacaagtttatcctctacaaccaactcactaatgcaattgaatgatgacacaagactgtactctaacgacttcaatagcggggaggctaatacatccgatgcctttaattggacagttgattccgaaaataggactaacctctcctgtgagggctgtctgtccccaagctgccttagcctcctgcacctgcaagagaaaaattggtctgcactgttgaccgctgtggtaatcattcttacaatagccggtaacatcttagtcataatggccgtctcattggagaagaagctccaaaatgctacaaattactttctgatgtccctggctatcgccgacatgttgctgggtttcctagtcatgccagtgtcaatgctcaccatactatacgggtatcggtggccccttccctccaagctgtgcgcagtctggatctatcttgatgtgctctttagtaccgcatcaatcatgcatttgtgtgctatctcactggatagatatgttgctattcagaacccaatccaccatagccggtttaattcacgaacaaaggctttcctgaagattattgctgtctggactatctcagtaggtatcagtatgccgattcccgttttcgggctacaggacgacagcaaggtgttcaaggaaggtagttgcctcctggcagatgataatttcgtactgatcggatcattcgtatcattcttcatccccctaaccataatggtaatcacctactttttaactatcaagagtctccagaaggaggctaccctgtgcgttagcgatttgggcacccgtgccaagctcgcttctttctcatttctgcctcagagttccctgtcatccgaaaaactctttcagaggagcatacatcgggagccaggtagctacacgggaagaagaacaatgcagtctattagcaacgaacaaaaggcttgcaaggtgttaggtatcgtgttcttcctgttcgttgtcatgtggtgtcctttcttcattacaaatatcatggcagtgatttgtaaagagagctgcaacgaggacgtcattggtgccttgcttaacgtgttcgtttggatcggttatctgagctcagccgtgaaccccctcgtgtacaccctcttcaacaagacgtatcggagtgcgttctctaggtatatacagtgccagtataaggagaacaaaaagcccctgcagttgatcttggtgaacactatcccggccctggcgtacaagagcagtcagctgcagatgggccagaaaaagaactctaagcaggacgcaaaaacgacagataacgattgttcaatggttgcactcggaaaacagcatagcgaagaggcctccaaggacaacagcgacggagtgaacgagaaggtgtcatgcgtgtag

SEQ ID NO: 106554 - DNA, 1416 bp, synthetic construct
  misc_feature 1..1416: note = Description of Artificial Sequence: Synthetic coding sequence
  source 1..1416: mol_type = other DNA
atggacatcctgtgtgaagagaacacttctctcagctcaacaactaatagtctgatgcaacttaatgatgataccaggctgtacagtaacgatttcaactctggtgaggcgaatacctcagatgcgtttaattggactgttgattccgagaaccggacgaatctgtcttgcgagggttgcctgtcacccagctgtctctctctgctgcatctgcaggaaaagaactggtccgccctcttaaccgccgtggtcataattctgaccattgccggtaacatactggtgatcatggccgtcagtctagagaagaagttgcagaatgctacaaattattttttaatgagcctcgccatcgccgacatgttactcgggttcctggtcatgccagtgagcatgttaactatactctatggatataggtggcccctgccctccaagctgtgtgctgtctggatctatcttgatgttctcttctccactgcaagcatcatgcatctctgcgctatatccctggacagatacgtggcgatacagaatcccatacatcacagccgttttaactccagaaccaaggcatttctcaaaatcatcgccgtctggactatctcagttgggataagcatgcccataccagtgttcggtctgcaggatgacagtaaggtgtttaaggaggggtcatgtctgctggccgatgacaattttgtgcttattggctcctttgttagttttttcattcccctgacaattatggtgatcacatacttcctgacaataaaaagcctgcaaaaggaagccaccctgtgcgtgagtgacctggggacccgcgctaagctcgcttctttttctttcctgcctcaaagctccctttccagtgaaaagttattccagagatccatccacagagaacctggctcctacaccggaagacgaaccatgcaaagcatcagcaacgagcagaaagcctgcaaagtgctaggcatcgtatttttcctcttcgtggtaatgtggtgtcccttttttatcacgaatattatggccgtcatctgtaaggagagttgtaacgaagatgttattggggctctccttaacgttttcgtctggattggatacctctcatctgcagtgaatccactcgtgtacacattattcaataagacatacaggagcgcgttcagtcggtatatccagtgccagtacaaagaaaacaaaaaacccttgcagcttatattagtgaatacaatcccagcgctggcctacaagtccagccagctgcaaatggggcaaaagaagaacagcaagcaggatgcaaagacgaccgacaatgactgctcaatggtggccctcggtaaacagcacagcgaggaagcttccaaagacaacagcgacggcgtgaacgagaaggtgtcgtgcgtctag

SEQ ID NO: 106555 - DNA, 1164 bp, synthetic construct
  misc_feature 1..1164: note = Description of Artificial Sequence: Synthetic coding sequence
  source 1..1164: mol_type = other DNA
atgcaattcctgaaaagtgccaaacagaaacctaactactaccatatcatgttagtggaagatcaagaggaggggaccttgcaccagtttaattattgcgaacgttgctcagagtcacaaaataacaagtgcatctcttgcgtcgatcctgaagacaagtggtatcgatggcctctaccatccaaactctgtgcagtttggatatacctggacgtgcttttctctacggcatcaattatgcatctctgcgcaatcagtttagacaggtacgtagccattcagaaccctattcatcattctagatttaatagtaggacgaaggccttcctgaagattatcgcggtgtggacaatctctgtggggatttcaatgcctataccagtcttcggattacaggacgattcaaaagtgtttaaggagggaagctgcctcctcgcggacgacaattttgttcttatcggctcttttgtatcattcttcatcccattgaccatcatggtgatcacatatttcttaacaattaagtctttgcagaaagaggctacactctgtgtctccgacctggggactcgcgctaagctagcgtcattcagtttcctgccacaaagtagcctctcttctgagaagctgtttcagcgctcaatccaccgcgagcctggctcctacacaggaaggcggacaatgcagagtataagcaacgagcagaaagcgtgcaaggttttggggatcgtgttttttctgttcgttgttatgtggtgccctttcttcatcacgaatatcatggctgtgatctgcaaagaaagctgtaacgaggacgtgattggcgcgttgttaaacgtctttgtctggattggatatctttcctcagcagtgaacccgctggtttataccctgttcaacaagacctatagatccgccttttcgcggtacatccagtgccagtacaaggaaaacaaaaagccattacagttaatcctcgtgaacacgatccctgcactggcatataagtcaagtcagctgcaaatgggccagaagaaaaactccaagcaggacgctaaaaccaccgataatgattgtagcatggtggcccttggcaagcagcactctgaagaagccagcaaggataattcagatggcgtcaacgaaaaagtgtcatgtgtgtag

SEQ ID NO: 106556 - DNA, 1446 bp, synthetic construct
  misc_feature 1..1446: note = Description of Artificial Sequence: Synthetic coding sequence
  source 1..1446: mol_type = other DNA
atggccctgagctaccgcgtttccgagctgcagagtacgattcctgagcatattctacagtctacctttgtgcatgtaattagtagtaactggtctgggctgcagacggagagcatccccgaggaaatgaagcaaatcgtggaggaacagggcaataaactgcattgggcagcacttctgattttgatggttatcatccctaccatcggcgggaacaccctggtgatactggcagtatctctcgaaaaaaagctgcagtatgctacgaattacttccttatgtcgctcgccgttgctgacctccttgttggactgttcgttatgcccattgcattattgaccattatgtttgaagccatgtggcccctgccactggtattgtgccctgcatggctgttcctcgatgtgctgttttctactgcctctattatgcatctctgcgcaatttcagtggatagatacattgcaatcaaaaagcctattcaggcgaaccagtacaattcccgcgccacagcatttatcaaaataactgtcgtatggttaatcagcatcgggatcgcaatccctgtgcctatcaaaggcatcgaaacagatgttgataatcctaataacatcacctgtgttcttaccaaggaacgattcggggacttcatgctgttcgggagtctggctgccttttttacaccactagccataatgatagtgacctatttcctgaccattcacgcgctgcagaaaaaggcctacctggtgaagaataaaccgccacagcggctcacgtggctgaccgtgtctacagtttttcagagggacgaaactccctgtagctcccctgaaaaagtggcgatgttggacggcagcagaaaggacaaggctctgcccaacagcggcgacgaaaccctcatgcggaggacaagcacgattgggaagaaatctgtgcaaaccattagcaatgagcaaagagcgtcaaaagtcttaggcatagtcttctttctgtttttgctgatgtggtgcccgtttttcatcactaacattactctcgtcctgtgcgatagttgcaaccagacgacgctgcagatgctcttggaaatttttgtgtggataggctatgtttcatcaggagtgaatccactcgtgtatacactgtttaacaagaccttccgcgacgcttttgggcgctacattacctgcaattaccgcgcaaccaaaagcgtgaagaccttgcgcaaaaggtcctctaaaatctacttccggaaccccatggcggagaactccaaattttttaagaagcacggcatccggaatggcataaatcccgcaatgtaccagtcacctatgagactccggtctagcacaattcagtcctcctcaatcattttactagacacccttttgctgaccgagaatgagggtgataaaacagaggagcaggtgtcctatgtgtag

SEQ ID NO: 106557 - DNA, 195 bp, synthetic construct
  misc_feature 1..195: note = Description of Artificial Sequence: Synthetic coding sequence
  source 1..195: mol_type = other DNA
atggtgatcatccccacaatcggaggaaacacgctcgttatcttagccgtcagcttggagaagaagctccagtatgccaccaattacttcttgatgtctctggccgtggctgaccttctggtgggcctattcgtgatgcccattgctctgctcacaatcatgttcggcattgcaatcccagtgcccatcaagtag

SEQ ID NO: 106558 - DNA, 1377 bp, synthetic construct
  misc_feature 1..1377: note = Description of Artificial Sequence: Synthetic coding sequence
  source 1..1377: mol_type = other DNA
atggtgaacctgaggaacgcggttcattctttcctggtacacctaatcggcctcctggtctggcagtgtgatatatccgtcagtccagtcgccgctatcgtcactgacatttttaataccagtgacgggggccgattcaagtttccagatggtgtgcagaattggccagcgctctctattgtcattatcatcatcatgacaatcggcggtaacatccttgtcataatggccgtgtccatggagaaaaagctgcataatgccactaattactttctaatgtctctggccatcgccgacatgctggtggggttactcgtaatgccactctcactgctggccatcttgtatgattacgtgtggcctctgccccggtatctctgtcccgtgtggatcagcctggatgtgctgtttagtacagcctctatcatgcatctttgtgccatttctttagaccgctacgtcgccatcagaaaccctatcgagcactcgaggtttaactctaggacgaaagccataatgaaaatagctatagtatgggctataagcatcggggtttccgttcccatacctgttatcggcctacgggacgaggaaaaagtgttcgtcaacaatacgacatgtgtcctcaatgatcccaactttgttctgatcggctccttcgtcgccttcttcatcccccttactattatggtgattacgtattgcctgacaatctacgtgcttcgccgacaggccctgatgctgttgcatggccatacagaggaacctccgggtctctccctggattttttgaagtgctgtaagagaaacaccgctgaagaggaaaattccgccaatccgaaccaggatcagaatgcaagaaggcgcaaaaaaaaggagaggcgaccacgaggcaccatgcaggccattaacaacgagagaaaagccagcaaagttttgggcattgtgtttttcgtgttcctgatcatgtggtgtcctttctttattacaaatatcctgtccgtcttgtgcgagaaaagctgcaatcagaaactcatggagaaattgctcaacgtgttcgtctggatcggctacgtgtgttctggcatcaatcctctggtgtatactctatttaacaagatttaccgccgtgccttctctaactacctgcggtgcaactataaggtggaaaagaaacctccagtgcgtcagatcccccgcgtggctgccactgccctgagcggccgggaattgaatgtgaacatttaccggcacactaatgaaccagtaatcgaaaaggcttccgataacgagcccgggatcgaaatgcaggtggaaaacctcgagctcccggttaatcctagcagcgtcgtgagtgagaggatatcttccgtatag

SEQ ID NO: 106559 - DNA, 747 bp, synthetic construct
  misc_feature 1..747: note = Description of Artificial Sequence: Synthetic coding sequence
  source 1..747: mol_type = other DNA
atggtgaaccttaggaacgccgtgcattcattcctggtccaccttattggtctgctggtttggcagtgcgacatatcagtttcgccagtggccgccatcgttacagacattttcaacacatctgacgggggaaggtttaaattcccggatggcgtgcaaaactggccagctctttctatagtgattatcatcattatgactatcggcgggaatatactggttatcatggcagtcagcatggagaaaaaactccataatgccactaactactttttaatgtcccttgccatcgcagacatgctggtggggctcctggtgatgcccctaagcctactggcgatcctctacgactatgtgtggccactgccgagatatctgtgtcccgtatggatctcactggacgtgttgttctctaccgcgagcattatgcacctatgcgccatcagtttggataggtgtatctcctcatacccgtgtgattggacagaaggcaggcgtaagggcgttcgggagcagcacgacgtccgagcccaacgtcccaagttccggtcctattgggtgctgcgctccttcctacacaccgcagatgactacggagactatgtgctcccggatcacctgcggagtgctccaacgtctttcgacgtcacagcgcggccacacaggggaactgcgtggaccaagagtggattccctgaggttctgcaggaagaatacgggcgaggcagggaattatgtaagccctag

SEQ ID NO: 106560 - DNA, 1377 bp, synthetic construct
  misc_feature 1..1377: note = Description of Artificial Sequence: Synthetic coding sequence
  source 1..1377: mol_type = other DNA
atggtcaacctgcggaatgcagttcacagcttcctagtgcacctcattggactgttagtgtggcaatgtgacatttccgtaagccctgtggctgcaatcgtaacggacatctttaatacatcagacggaggacggttcaagtttccggacggcgtccagaactggcctgcgctatccatcgtgattatcataatcatgactataggtggaaacatcctagtcatcatggcggtatcaatggaaaaaaaactgcataacgccaccaactattttttaatgtcactggccatcgcagatatgctggttggcctcctggtgatgcccctgagcttgttagcgatcctgtatgactacgtgtggcctctcccacggtatttgtgtcctgtctggataagcctcgatgtgctctttagtaccgccagtataatgcatctgtgcgccatatcactggatcgctatgtggccattcgaaaccccattgagcatagccgcttcaattccaggactaaggcaattatgaagatcgccatcgtgtgggccattagcatcggagtgtctgttccaattcctgtcataggcttgagggacgaggaaaaggtgtttgtgaataatacaacgtgcgtcctgaacgatcctaacttcgtactgatcggctctttcgtcgcattcttcatccccttaactataatggttatcacctattgcctcacaatctacgtgctgagacggcaggcactgatgctgttgcatggccacactgaggaacctccaggactctccctggattttctcaagtgctgcaagagaaataccgccgaggaagaaaattctgcgaatccgaatcaggaccaaaacgcccgcaggcggaagaagaaggaaaggcggccacgtggcacaatgcaggcaattaataatgagagaaaggcctctaaagtacttggcatcgtcttctttgtctttcttatcatgtggtgcccattttttatcacgaatatcctctccgtgctctgtgagaaaagctgcaatcagaagttgatggagaagctactgaatgtgtttgtgtggatcggatacgtctgcagcggcatcaaccccctggtttacactctcttcaataagatttacagacgggctttcagtaattacctccgctgcaactataaggttgaaaaaaaaccccctgtgcgccagattcccagagtagcagctactgcactttccggtcgcgagttaaacgtgaacatctacagacacacaaacgaaccagtgatcgaaaaagcaagtgacaacgaacccggcatcgaaatgcaggtggagaatctcgagctacccgtcaaccctagttcagtggtctccgagcggataagcagcgtgtag

SEQ ID NO: 106561 - DNA, 840 bp, synthetic construct
  misc_feature 1..840: note = Description of Artificial Sequence: Synthetic coding sequence
  source 1..840: mol_type = other DNA
atggcatcgatgagcatcgtaaaggccacatccaataccatcagtcagtgcggctggtccgcatcagcaaactggacgccctccatctcaccgagtatggaccgaggagagcgtagtccaagcgccttgtcaccaacccaggtggcaattcgtcgacgatgccgcccctccccctacgtggtgaacttcctggtcccctccggtatcctcattgccattgacgccctcagtttttatctccccctggagtcaggcaattgtgctccatttaaaatgactgtcctactaggatattccgtcttcctgctgatgatgaatgatttgctgcccgccaccagtacttcctctcacgcctcactcgttaggccacatccaagccgtgaccaaaagagaggagtgtacttcgcactctgcctgtcactaatggtggggagcctcctcgaaacgatcttcattacacacctgctgcatgtggccactacccagcctctgcccctgcctcggtggctgcacagcctcttgctccattgtacaggccagggcaggtgctgtcctactgcgcctcagaagggaaacaagggtccgggactcacccctacccacctgcccggagtcaaggagccagaggtctccgccggacagatgcctggccccggtgaggccgagctgaccggaggctctgagtggactcgagctcagcgcgagcatgaagcccaaaaacaacattctgtcgaactctgggtgcagtttagtcacgcaatggacgcccttctcttccgcctctatttgctgtttatggcttcttctataatcacggtaatctgcctgtggaacacgtag

SEQ ID NO: 106562 - DNA, 1365 bp, synthetic construct
  misc_feature 1..1365: note = Description of Artificial Sequence: Synthetic coding sequence
  source 1..1365: mol_type = other DNA
atgcaaaagcattcccctggcccacctgcactcgctctgctcagccagtctctgttgactactgggaacggggatactctgattatcaactgtcccggctttggtcagcacagagtcgacccggcagccttccaggcggtattcgatcgaaaagcgatcggccctgtcactaactattctgtggccactcatgtgaatatctcattcacactgtctgccatctggaattgctattcacgaatccataccttcaactgtcaccatgcacgtccatggcacaatcaatttgttcagtggaaccctgatgagtgcggcggcattaaaaagagcggaatggccaccgagaacctgtggctgagcgatgtcttcatcgaagagtctgtggatcagacgcctgcaggactgatggcctccatgtctatcgttaaggcaacaagtaacacgatcagtcagtgtggctggagcgcatctgcaaactggacgccctctattagccccagcatggatagggcaagagcttggcggcggatgtccaggtcgttccagatacaccatagaacatcctttaggacgaggagggagtgggtgctcctaggcatacagaagcgcaccattaaggtgacagtcgccacaaatcagtatgaacaggccatttttcacgtggctattcggcgccgctgtagaccatcaccctacgttgtcaattttctcgtgcctagcgggatccttatcgctatcgacgcactgtctttctatctccccctagagtcagggaattgcgctcctttcaaaatgaccgtgttactcggctatagcgtgttcttgctcatgatgaatgatcttctcccagctactagcaccagctctcatgcaagtcttgtcgcccccctcgccctaatgcagacacccttacccgctggagtatattttgcattgtgtctgagcctcatggtcgggagtctgctggaaacaatcttcataacccaccttctgcacgtggccacaacccagcctctccccctccctagatggctgcattctctgctgctgcactgcactgggcagggccggtgctgtcctacagctccacagaagggtaacaagggcccaggcttgactccaacccatttgccaggggtaaaagaacccgaggtctctgcaggccagatgcctggcccgggcgaggccgaactcaccgggggctccgaatggacccgggcccagcgagagcacgaggcccagaagcagcattccgtagagctgtgggtgcagtttagtcatgccatggacgcgcttttattcagactctatcttctgttcatggcctcctccattattacagtcatatgcttatggaatacatag

SEQ ID NO: 106563 - DNA, 1215 bp, synthetic construct
  misc_feature 1..1215: note = Description of Artificial Sequence: Synthetic coding sequence
  source 1..1215: mol_type = other DNA
atggaacgagggtggttccacggaaaggggttcctgcttggcttcatcttgcatcttctattacaagacagccacctgcagctagtgaccagcttcctgtggcttaatatgtggaacccggacgagtgcgggggtataaagaagagcggcatggcgaccgaaaatctgtggctgtctgacgtctttattgaggaatcagttgatcagacacccgccggattgatggcctccatgtctatcgttaaagccacctctaatacgatttcccaatgtgggtggtcagcctcagccaattggacgccttcgattagtccgtctatggataggggagaacgctccccctcggccctctcacctacacaggtcactcgtgcctggaggcggatgagccgaagctttcagatccatcaccgcacaagttttcgcacccggagggaatgggtcctgttgggcatccagaagaggaccatcaaggtcaccgtcgccaccaatcaatacgaacaggccatcttccacgttgcaatcagaagacgttgcaggcctagcccctatgtcgtgaacttcttagtgcctagtgggattctaatcgctattgacgctctgtccttttacctgcctctggaatcaggtaattgtgctcccttcaagatgaccgtcctcttgggatactccgtttttctccttatgatgaatgacctcttaccagctacttctactagtagtcatgcctctcttgtgcgcccacaccccagtcgtgaccaaaaaagaggagtatatttcgccttgtgtctcagtctaatggttggctccctgcttgaaaccatcttcatcacgcatctgctacacgtcgcaactacgcagccactccctcttccacgctggctgcactcattactacttcactgtactgggcaggggcgatgttgtccgaccgctccccagaaagggaataagggcccaggactgactccaacccatcttcctggtgtcaaggagccggaggtgagtgccggtcagatgcccggtccgggcgaagcagagctgaccggagggagcgaatggactagagcacagcgcgaacacgaagcacaaaaacagcactctgtggaactctgggtccagtttagccatgctatggacgcactgctgtttagactgtacctgctgtttatggccagcagcatcatcactgttatttgtctgtggaatacatag

SEQ ID NO: 106564 - DNA, 702 bp, synthetic construct
  misc_feature 1..702: note = Description of Artificial Sequence: Synthetic coding sequence
  source 1..702: mol_type = other DNA
atggtcgccatccgacgaaggtgccgaccaagcccatacgtggtgaatttcctggttccttccgggatactgattgcaatagacgccctgtctttctaccttcccctggaaagcgggaattgcgccccttttaagatgaccgtgttactggggtattctgtgtttctcctgatgatgaatgatctgctgccagcaaccagcaccagttcccacgcatctttggtccggccccacccttccagggatcaaaagagaggtgtttattttgctctgtgtctcagcttaatggtgggatctttgctggagactatattcattactcaccttttgcacgtagcaactacccaacctttgccgctaccccgatggctgcattcgcttttgctgcactgcacagggcaggggcgctgttgtcctacagccccacagaaaggtaataagggacccggcttgactccaacacaccttcccggggttaaagagcccgaggtgtctgccgggcagatgcccggtcctggcgaagccgagttgacaggtggttcagaatggactagagctcagagagaacacgaggcccagaagcagcattcagtggagctgtgggttcaattctctcacgcaatggatgctctactgtttcggctctatctgctgttcatggcttcttcaattatcacagtaatctgtctgtggaacacctag

SEQ ID NO: 106565 - DNA, 1344 bp, synthetic construct
  misc_feature 1..1344: note = Description of Artificial Sequence: Synthetic coding sequence
  source 1..1344: mol_type = other DNA
atggaaggtggatggccggccaggcaaagtgctcttctgtgcctgaccgtgtcgctactattgcagggacgcggcgacgcttttactatcaactgttctggatttgatcagcacggcgtcgatcccgcagtctttcaagcagtattcgaccgtaaagcattcaggcccttcacgaattactctattcctacccgtgttaatatcagcttcaccttgtccgctattctgggcgtggacgctcagctccagctcctcacatccttcctctggatggatctggtgtgggataatccctttattaactggaatcctaaagagtgtgtcggcattaacaagctgacggtgcttgcagagaacctgtggctccctgacatcttcatcgtggagtccatggacgttgatcaaactcccagcgggcttactgcgtacatctccagtgagggcaggatcaagtacgataaacctatgcgtgtgacctcaatttgtaatttagacatattctacttcccctttgaccaacagaattgcacatttactttttcctcatttctgtacaccgttgattcaatgcttctaggaatggacaaggaggtctgggaaatcactgacacctcccgtaaggttatccaaacacagggtgaatgggagctgcttgggattaataaggccacacccaaaatgtccatggggaacaatttatacgatcagatcatgttttatgtcgccattaggcgacgtccatccctgtacattatcaatctgctcgtcccttcttcatttctagtggccatagatgccctgagcttctatttgcctgctgagtctgaaaatagagccccctttaaaatcactctccttctcggctacaatgtttttctcctcatgatgaacgatctcttgcctgcctccgggactcccctcatctcagtgtacttcgctttatgcctgagtttaatggttgtgagcctgctggagactgtcttcatcacctacctcctgcatgtggccacaacacagccgccgcccatgcctcgttggctgcacagtctgctgctccactgcacttcgcctggccgctgttgtccaacagcgcctcaaaaaggtaacaagggactcgggctgaccctgacccacttacctggtcctaaggagcctggtgaactcgctggcaagaagctgggcccacgcgagaccgaacctgacggtggcagcggatggacaaagactcagctgatggagctgtgggtacagttctcccatgccatggacacactattatttcggctttatctactctttatggcctcatccatccttacggtgatcgtactctggaatacgtag

SEQ ID NO: 106566 - DNA, 1416 bp, synthetic construct
  misc_feature 1..1416: note = Description of Artificial Sequence: Synthetic coding sequence
  source 1..1416: mol_type = other DNA
atgcttgcctttatcctcagccgcgcaaccccacggccagcgttgggcccactgtcctacagagagcatcgagtggctctacttcatctaacacacagcatgtctactacgggccgcggcgtgacattcaccattaattgctccgggtttggacagcatggggcagaccccaccgccctgaacagcgtgttcaacagaaaaccctttagaccagtcacgaatatctctgtgcccacgcaggtgaacatttcatttgccatgtccgccattttagatgtgaacgagcaactgcacctgttgtcttcctttctatggcttgagatggtctgggataacccctttatcagctggaacccggaggagtgtgaaggcatcacaaaaatgagcatggcagctaagaacctctggttgccagatatattcattatcgagctgatggatgttgacaagacgccaaaggggttgaccgcctacgtctccaacgagggacgaatacgctacaagaaacctatgaaggtcgattcaatctgtaaccttgacattttttactttccctttgatcagcagaattgtaccctgaccttcagttccttcctttatacggtagactccatgctgcttgatatggaaaaagaggtatgggagatcactgatgccagtagaaatatcctacagacccacggcgaatgggaactcctgggcctgtccaaggccaccgcaaagttgagcagaggagggaacctctatgaccagattgtgttctacgtcgccatacgccgcagaccttcactgtacgtgatcaacttactcgtgcccagtggctttctggtagcaatcgatgccctgagcttctatctcccagtcaagagtggcaatcgcgtaccattcaagatcactctgctactcgggtacaatgtgtttctgctaatgatgtcagatcttttgccaacatccggtaccccactgatcggcgtgtactttgccctgtgcttgtccctgatggtgggaagcctgctggagactatctttatcacacaccttctgcatgtggcaactacccagcccccaccgctgccgcggtggctccattctttgctgcttcattgcaactccccaggccggtgttgccctacggccccccagaaggaaaataagggtcccggactgactcccacccatctgcctggggtgaaagagccagaggtgagcgcaggtcaaatgccagggccagccgaagctgaactaaccgggggtagtgagtggacacgcgcacagcgcgagcatgaagctcagaagcagcactctgtggaactgtggctgcaattctcccatgctatggacgccatgcttttccggctttacctgctgtttatggcctcctcaatcatcactgtgatctgcttatggaatacttag

SEQ ID NO: 106567 - DNA, 1371 bp, synthetic construct
  misc_feature 1..1371: note = Description of Artificial Sequence: Synthetic coding sequence
  source 1..1371: mol_type = other DNA
atggagggaagttggtttcaccgcaaacgtttttccttctatctcctcctgggctttctgctgcagggacgaggagtgacattcacaattaactgcagtggcttcgggcagcatggtgccgacccaaccgcccttaacagcgttttcaataggaagccatttcgtccggttacaaatatatcagttccaacgcaagtcaatatcagtttcgctatgagcgccattttagatgttaatgagcagctgcatctgctgtcgagctttttgtggctcgagatggtatgggataaccctttcatttcgtggaacccggaggagtgcgagggtattacaaagatgagcatggctgccaaaaacttatggctgcctgacatcttcatcattgagttgatggatgtcgataagacaccaaaaggcctcaccgcgtatgtttctaacgaagggcggatccgatataaaaagcccatgaaggtcgactccatctgcaatctggatatcttttacttccccttcgatcagcagaattgtacattgacctttagcagctttttgtacacagtagactccatgctgctggatatggaaaaggaagtttgggagataacggacgcaagtaggaacatccttcagacccacggcgagtgggagttgctgggattaagcaaagctacagcaaagctctcaaggggagggaatctgtatgaccagattgtgttctatgttgctattagaagacggcctagcctctacgtgattaatctgctggtgccctccggtttcctggtcgcaatcgatgccctgtcgttctacttgcctgtgaaaagtggaaaccgcgtgcctttcaagatcacattactgctggggtataacgtgttcctactgatgatgtctgatctgctgccgacgagcggaacacccctcattggagtgtacttcgcactgtgtctctctctcatggtaggctctctgctcgagactatcttcatcacccacctcttgcatgtggcaacgacccaacccccaccccttccacgatggctccattctttactgttgcattgcaactctcccggtcgctgctgccccaccgcaccacagaaggaaaacaaaggtccagggcttacacctacccacctgccaggcgtgaaggaacccgaagtcagcgccggccagatgcccggaccggctgaggcagaactcaccggggggagtgaatggacccgcgcccagagagagcacgaggcgcagaaacaacattcagttgaactctggttgcagttctcacatgctatggacgcaatgctcttccgcctgtacttgctgtttatggcttcttctattatcactgtgatatgcctgtggaatacctag

SEQ ID NO: 106568 - DNA, 1326 bp, synthetic construct
  misc_feature 1..1326: note = Description of Artificial Sequence: Synthetic coding sequence
  source 1..1326: mol_type = other DNA
atggagggatcttggttccatagaaaacgattctcattttatttgctgttgggcttcctcctgcagggaagaggcgtgacttttaccattaactgtagcggcttcggccagcacggagcagaccccacagccctgaactcggttttcaatagaaagccgtttcgccccgtgaccaacattagcgtgcccacacaggtgaatatctcctttgctatgagtgctattctggatgtggtgtgggataaccccttcatttcatggaatccagaggagtgcgagggaatcacaaaaatgtcaatggcggctaagaacctctggctgccggacatatttattatcgaactgatggatgtcgataagacaccgaaaggcctgaccgcatatgtctcaaatgagggtcggattagatataaaaaacctatgaaggtggactctatatgcaatctagatatattttattttcccttcgaccagcagaattgcacgctcacgttctccagctttttatacacggtcgacagtatgctcctggacatggagaaggaagtctgggagatcactgacgcgtctcggaatatcttgcagactcatggagaatgggagctgctcggtctgtccaaggccacagcgaagctgtcaagaggaggtaacttgtatgaccagattgtcttttatgtcgccatacgtcgccggccttccctgtatgtgatcaacctgcttgtgccaagtggattcctggttgctatcgacgctctgtctttctatttgccggtaaaaagcgggaacagagtgccctttaagatcactctcctgcttggttacaatgttttccttttaatgatgagcgatcttctgcccacctccggcacacctctgataggcgtatactttgctctgtgtctctccctgatggtgggtagtctcttggagaccatcttcattacccatctccttcacgtagcgaccactcagccaccaccattgccgagatggctgcattccttgcttctgcactgtaattcccccgggaggtgttgtcctaccgcccctcagaaagaaaacaagggtcccggacttaccccaactcacttgccaggggtgaaggagcctgaagtgagtgcaggtcagatgcccggacccgccgaggccgaactcactggtggctccgagtggacacgggcccaaagagaacacgaggcccaaaaacagcacagcgtggaactgtggcttcagttttctcacgcgatggacgccatgctgtttagactgtatctcctgtttatggcctcaagtatcattaccgtgatttgcctgtggaatacatag

SEQ ID NO: 106569 - DNA, 1371 bp, synthetic construct
  misc_feature 1..1371: note = Description of Artificial Sequence: Synthetic coding sequence
  source 1..1371: mol_type = other DNA
atgctggcgtttattctgagcagggccacaccaaggcccgcacttggacctctgagctatcgagaacacagggtcgcactgttgcacttgacccactccatgtctaccaccggtaggggggtcacatttacgattaactgcagcggattcggccagcacggggctgaccccacggccttaaacagcgtgtttaaccgcaagcctttcaggccagtcactaacatcagcgtgccgacacaggtcaacatctcatttgcgatgagcgccatattagatgtggtttgggacaacccctttatcagctggaatcctgaagagtgcgaagggatcacgaaaatgtctatggctgcgaaaaatctttggctgcctgacatcttcattatcgagttgatggacgtcgataaaactcctaagggcctaacggcttatgtgtcgaacgaaggaagaattaggtataagaagccaatgaaagtggatagtatctgtaacttggatattttctatttcccattcgaccagcagaattgtacccttaccttttcatcattcctgtatactgttgattcgatgttactcgacatggagaaagaggtctgggaaatcacagacgcatctagaaatatccttcaaacccatggagagtgggaactcttgggtttgtctaaagccaccgctaaactgtcacggggagggaacttgtacgaccaaatcgtgttttatgtggccattaggcggaggccttccctgtatgttattaacctgcttgtaccctctgggtttctcgtggccattgacgccctgagcttttatcttccagtgaaaagtggcaaccgtgtgccctttaagattactttgctattgggttacaacgtgttcctcctgatgatgtctgatctgcttccaactagcggaacaccactcattggagtctatttcgctctctgtctgtcactcatggtgggatcattgctcgagaccattttcattacacacctcctgcatgtagcgacaacccagcctcctcctctgccgcggtggttgcattctcttctccttcactgtaacagccctggccgctgttgtcccactgctccacagaaagagaataaggggcctggccttaccccaacccatttgccaggtgttaaggaacccgaggtgagcgccggtcagatgcctggtcctgcagaggctgaactcaccggaggctccgagtggacaagagcccagagagaacacgaggctcagaaacagcacagcgttgagctgtggctgcagttttctcacgccatggatgcgatgctgttcaggttatatctcctttttatggcctcctctataatcaccgtcatatgcctgtggaacacatag

SEQ ID NO: 106570 - DNA, 1326 bp, synthetic construct
  misc_feature 1..1326: note = Description of Artificial Sequence: Synthetic coding sequence
  source 1..1326: mol_type = other DNA
atgctttcctcagtgatggcccctctgtgggcctgtatcctggtggccgcaggtatccttgctaccgacacccaccacccgcaggacagcgcattgtaccacctgagcaaacagttactgcaaaagtatcataaagaggtacgtcctgtttataattggaccaaagccacaactgtatatctggacctgttcgtgcatgccatattagacgttgatgcagagaaccagatcctaaagacgtccgtctggtaccaggaggtgtggaacgatgaatttctcagttggaattcgagcatgttcgacgaaatcagggaaattagtctcccactcagcgccatctgggcaccagacattattattaacgagtttgtcgatatcgagcggtatcccgacctgccttacgtttacgtgaactcaagcgggaccattgagaactataagcccattcaagtagtgtcagcttgtagcctcgaaacgtatgctttcccattcgacgtccagaactgttcgttgactttcaagagcatcctgcacacagttgaagacgtggatttagcttttcttcgaagcccagaagatatccagcacgataaaaaagcttttcttaacgatagcgagtgggaattgctgagcgtgagtagtacatactctatactccaatccagcgccggcgggttcgcacagatacaatttaatgtggtgatgcgccgtcacccgctggtctacgtggtgagcctcctgatcccatccatttttctcatgctcgtggatctggggtcgttttaccttcctcctaattgcagagccaggattgtcttcaaaactagtgtgctggtcggatacactgtctttcgggttaacatgtccaatcaagtgcccagatctgtaggctccaccccgcttatagggcactttttcactatttgtatggccttcctggtgctgtccctcgctaagtctattgtgttagtcaaatttctccacgacgaacagagggggggccaggagcagccgttcctctgtttgcgaggcgatacagatgccgaccggcccagggtggaaccccgggcacagcgcgctgtagtgaccgagagtagcttatatggtgagcacctagcacagcctgggacactcaaggaagtctggtcgcagctgcaatcaatttccaactacctgcagacacaagatcaaaccgatcagcaggaagctgaatggctggttttgctgagcaggtttgaccggctgctctttcagtcgtatttgtttatgctagggatctacacaatcactctgtgcagcctgtgggccttatggggcggcgtgtag

SEQ ID NO: 106571 - DNA, 1293 bp, synthetic construct
  misc_feature 1..1293: note = Description of Artificial Sequence: Synthetic coding sequence
  source 1..1293: mol_type = other DNA
atgatcgtatacttccccgggattctcgcaacagatactcatcacccccaagatagtgccctgtatcatcttagtaagcagttgctgcagaaatatcacaaagaagtgaggcctgtatacaattggactaaagccactactgtgtatctggaccttttcgttcacgcaatactggacgtagacgccgagaaccagatcttaaaaacttccgtttggtatcaggaggtatggaacgacgagtttctgtcctggaatagttccatgtttgacgagatcagagaaatatctctgccgctgtcagctatatgggcacctgacatcattatcaatgagtttgttgacatagaaagatacccagatctgccctacgtatacgtaaatagctctgggaccattgagaactacaagcctatccaggtggtctccgcttgctccctggagacttacgccttcccctttgatgtgcagaactgctccctgacattcaagtctattttacacacggtcgaagacgttgatttggcatttcttcggagtcccgaggatattcagcacgacaaaaaggctttcctgaatgactcagagtgggaactgctatctgtatcatccacatactcaatcctgcaatcatctgctggaggattcgcccagatccaatttaacgtggtaatgcgaaggcatcccctggtgtacgtcgtttctctgttgatcccaagcatctttcttatgctggttgaccttggcagcttttatcttcctcctaattgccgggccagaattgtgttcaagacgtccgtcctggtcggctacacagtttttcgcgtaaacatgtcaaaccaggtcccacggtctgttgggtctacccctctcattggacatttcttcacaatctgcatggccttcctggttttgtcacttgcaaagagcatcgttttagttaaattcctgcacgacgaacagagggggggccaggaacaacccttcctatgccttcggggcgataccgacgctgaccggccgagagttgaaccaagggcccagcgggccgtcgtgaccgagagcagtctctatggggaacacctggcccagcccggaaccctgaaggaggtctggagccagctgcagtccattagtaattatctgcaaacccaggatcagacggaccaacaggaggccgagtggctggtacttctgtcccggttcgaccggctcctgtttcagtcatacctgttcatgctcggcatttacaccattacactctgttctttgtgggccttatggggcggcgtatag

SEQ ID NO: 106572 - DNA, 528 bp, synthetic construct
  misc_feature 1..528: note = Description of Artificial Sequence: Synthetic coding sequence
  source 1..528: mol_type = other DNA
tgagctgagaatcagattctgaagacttcagtctggtaccaggaagtctggaatgacgagttcctgtcttggaattcctccatgttcgacgaaatccgggagatctccctgccactgtcagcgatctgggcccccgacatcataatcaacgaattcgtggacatcgaacggtaccccgatctgccttatgtctacgtgaacagtagcggtaccatagagaattacaaaccaatccaggtggtgtcagcatgttcgctagagacgtacgcgtttccatttgatgtgcagaattgttccctcacctttaaatctatcctccataccgtggaagacgtcgacctggcattcctgcgttcaccggaagatatccagcatgacaagaaagccttcctgaatgactcagaatgggagcttctgagcgtgtcgtcgacctatagcatccttcagtctagtgcgggagggtttgcacagattcagttcaatggaacaagtagcccatctgcttggccctcttggtttagcgcatag

SEQ ID NO: 106573 - DNA, 1449 bp, synthetic construct
  misc_feature 1..1449: note = Description of Artificial Sequence: Synthetic coding sequence
  source 1..1449: mol_type = other DNA
atgctggcctttatactcagtagagccacacctcggcccgcactcgggccattgtcctatagggaacaccgggtggccctgttgcaccttacccactcaatgagtacaaccggcaggggcgtgacatttaccattaactgctcaggatttggccagcatggggccgatcctacagccctgaattccgtattcaatcgaaagcctttcagacccgttacaaacataagcgtcccaacccaggtcaacatctcttttgctatgtctgccatactcgacgtcgtatgggataacccttttatcagctggaatcccgaggagtgcgaaggcataaccaaaatgagcatggctgcaaagaacctgtggttgcctgatattttcattattgaactgtgtgtctccagagctgggcaacgagaagtgccatccccaggcagtcaccgggaccacagcctccctctcgggcctttgatggacgtggacaagactcctaaggggctgacggcttacgtgtccaacgagggcaggattagatacaagaaaccgatgaaagttgactcaatctgcaatctcgatatcttttatttcccctttgatcagcagaactgtacccttacattttcttcctttctctacactgttgactctatgctgcttgacatggagaaagaagtttgggaaatcacagacgccagccgcaatatcttgcaaacccacggcgagtgggagctgctgggcctaagcaaagcaacagcaaaattgagcaggggtgggaacctgtacgatcagatcgtcttttatgtggctatccgccggaggccttccctgtacgtgatcaatttgttggtaccctctggctttctcgtggctatcgatgcattgtcattctaccttcccgttaaaagtggcaatcgggttccttttaagataactctcctgctggggtataacgtgttcctgctgatgatgtcagatcttttaccgacgagcggcaccccactgatcggggtgtactttgctttgtgtctctctttaatggttggcagtcttcttgaaaccatctttatcacacatctgctccatgttgcaacgactcaaccacctcccctgcctcgctggctccactccttactgcttcactgtaactcaccgggacggtgctgccccacagctccacagaaggaaaataagggcccaggactgaccccaacgcacctgccgggagtaaaggaacctgaagtctctgccggacagatgccgggcccagctgaggcggaacttacaggaggctccgaatggacccgggcacagcgcgaacacgaggctcagaaacagcactcagtcgagttgtggttgcaattcagtcacgctatggacgctatgttgtttaggctttatctcctcttcatggcgtcctctattatcacagttatctgcttgtggaacacatag

SEQ ID NO: 106574 - DNA, 1137 bp, synthetic construct
  misc_feature 1..1137: note = Description of Artificial Sequence: Synthetic coding sequence
  source 1..1137: mol_type = other DNA
atggacaagttggacgccaacgtaagtagcgaggaagggttcggctccgttgaaaaagtcgttttgctgacgtttctttctacagtgattctcatggccattctaggaaacctccttgtgatggtggctgtgtgttgggaccggcaactccgaaaaatcaagaccaactattttattgtgagcctggccttcgccgatctgcttgtctccgtgctggtaatgccattcggcgccatagaactggtacaggatatttggatctacggagaggtgttttgtcttgtgaggactagtctggacgttcttctgactaccgcgagtatttttcatttgtgttgtataagccttgaccggtattacgccatctgctgccagcctttagtttatagaaacaaaatgacccccttgaggatcgctttaatgttgggcgggtgctgggtaattcctacctttattagcttcctacctatcatgcagggatggaacaacatcggcatcatagacctaatcgaaaagcgcaaatttaaccagaactcaaatagcacctactgtgtgtttatggtcaataagccctacgccatcacatgttcagtagtggctttctacattcctttcctgctcatggtcctggcctattaccgcatttacgtcacagctaaggaacacgctcatcaaatccagatgctgcaaagggcgggtgccagctctgaatccaggccccagtcagctgatcaacactccacacaccggatgaggaccgagaccaaggctgcaaagaccttgtgcattattatggggtgtttctgcctatgttgggcccccttttttgtgaccaatatcgtggacccatttatagactatactgttcctggccaggtctggactgcctttctctggttgggctacattaactcaggtctgaatccctttctgtatgcgtttctgaataagtccttccggagagccttcctgatcatcctctgttgcgacgatgaacgataccggcgcccgtccatactgggccagactgtgccatgcagtacaactaccataaatggctccacccatgtgctgagcgggtgtagccctgtcagcagttttttactcttgttctgtaatcggccagtgcccgtctag

SEQ ID NO: 106575 - DNA, 1164 bp, synthetic construct
  misc_feature 1..1164: note = Description of Artificial Sequence: Synthetic coding sequence
  source 1..1164: mol_type = other DNA
atggataagttagacgccaatgtgtccagcgaagagggatttggctctgttgagaaagttgttctgctgaccttcctctcaaccgttattctgatggctattctaggaaacctgcttgttatggtggcagtctgctgggaccgccaactgagaaaaataaagaccaattatttcatcgtgtcgcttgcgttcgctgatctgctagtctccgtcctggtgatgcccttcggagctatagagctggtacaggacatatggatttacggggaagtcttctgccttgtgcgcacatccctggatgtgctgttgactaccgcatcaatttttcacttatgttgtatcagtctggaccgttactacgcaatttgttgtcaacctctggtctaccgcaacaaaatgacccctcttcgcattgcactgatgctaggcgggtgttgggttattcctacattcatttccttcctgccaataatgcagggatggaacaatattggcattatcgatctgatcgagaagaggaagttcaatcagaacagtaactcaacttactgtgtgttcatggtgaacaaaccttatgctattacatgctccgtggtggctttctacattccctttctcttgatggtgctcgcatactatcggatctacgtgacggctaaagagcacgcccatcagatccaaatgcttcagcgagccggagcatccagcgagtcaagacctcagagtgccgaccaacacagtacgcaccgaatgcgcacagagacaaaggccgccaagaccctctgcattatcatgggttgtttctgcctgtgttgggccccattctttgtgacaaacatcgtggatcccttcatcgactatacggtgcccggccaggtttggacagcgtttctgtggctagggtatatcaatagcggtctcaacccttttctgtacgctttccttaataagagtttcaggagagcgtttctcatcatcctgtgctgcgacgatgagagatataggcgtccatcaatactgggtcagactgtgccgtgcagtacaacaaccattaatgggtcaacccacgtgctgcggtacacggttttacaccgcggccatcaccaggaactggagaaactgccaatacacaacgaccccgagagccttgagagctgtttttag

SEQ ID NO: 106576 - DNA, 1287 bp, synthetic construct
  misc_feature 1..1287: note = Description of Artificial Sequence: Synthetic coding sequence
  source 1..1287: mol_type = other DNA
atggacaagctcgatgcgaacgtgagctcagaagagggatttggaagcgtggagaaggtggtcctgttgacattcctctcaacagtgatactgatggctatcctcggcaacttactggtcatggtggctgtttgttgggatcgacagctgcgcaagatcaagaccaactatttcatagtctccttggcatttgccgatctgctggtctctgtcttagtgatgcctttcggtgccatcgagttagtccaagacatttggatctacggggaggtgttctgcctggtccgtaccagcctcgacgttctactaactactgccagtatatttcacctgtgttgtattagcctggatcgatactatgctatttgttgtcagcctctggtctatcgcaataagatgacccccctgaggatagctctcatgctgggtggttgctgggtgatcccaacctttatcagctttctacctataatgcaggggtggaataacatcggaattattgatctaatagagaaaaggaaattcaaccaaaattccaattccacctactgcgtattcatggttaacaagccgtacgcgatcacatgtagcgtggtggcattctacattccattcttgctcatggtactagcttactatcggatctacgtgactgccaaggagcacgcccaccaaattcagatgttacagagagcaggggcctcttccgaaagcagaccacagagcgctgatcagcattccacccaccgcatgaggactgaaaccaaagccgcaaaaactctgtgtattatcatgggctgtttctgcttatgctgggcaccttttttcgttaccaatatcgtggatcccttcattgactacacggtccctggccaagtgtggacggccttcttatggttgggatatatcaacagcggtctcaacccttttctgtacgcttttctcaataaaagctttcgccgcgcctttctgatcatactgtgttgcgatgatgagagataccggaggccaagcatcctgggccagacagtgccttgttcgacaactactattaacggatcgactcatgtgttgaggactgactttcttttcgatcgagacatcctggcccgatattggacaaagcccgctagagccggcccgttttccggaacactgagtataaggtgccttaccgcaaggaaacctgtactaggggacgccgtagagtgcggaggccagtgggagagccaatgccatcccccagccacttcccccctcgtggccgctcaaccctcagacacatag

SEQ ID NO: 106577 - DNA, 1209 bp, synthetic construct
  misc_feature 1..1209: note = Description of Artificial Sequence: Synthetic coding sequence
  source 1..1209: mol_type = other DNA
atggataaactcgacgccaacgtcagctccgaagaggggttcggttccgtggagaaggtcgtgctgctgacattcctctcaaccgtcatcctgatggctatcctgggtaatctcctcgtgatggtggccgtgtgttgggaccgccaattaagaaaaatcaaaaccaactattttatagtttccctcgcctttgcggatctgctagtttcagttctagtgatgccatttggcgctatcgagctcgtgcaggacatctggatctatggtgaggtgttttgtcttgtgcgaaccagtctagacgttctcttgacgacagcaagcatctttcacctctgctgtatatccctggatcgatactacgcaatctgctgccaaccactggtctaccgaaataagatgactcccctgcggatcgcccttatgctgggggggtgctgggtgattcctacattcatcagcttcttgccaatcatgcagggatggaataatataggtataatcgacctcgagaggagcttgaatcaaggactaggacaggacttccatgcaattgagaagagaaagtttaatcaaaacagcaattctacttactgtgtttttatggtcaacaaaccatatgctatcacatgctccgtagtggccttctatatccctttcctcctgatggttttggcatactaccgcatctacgtaactgcaaaggaacacgctcatcagattcagatgctgcaaagggcaggagcgtccagcgagagtcgaccgcagtcagctgaccagcatagtacccatcgtatgcggacagagactaaggccgccaagaccttgtgcattattatgggatgtttttgtttgtgctgggccccattttttgttaccaacatcgttgatccattcatcgactacaccgtacctggccaggtttggaccgcttttctgtggctggggtacatcaactcgggactgaacccattcctgtatgccttcctcaacaaatccttcaggcgggctttcctcatcatcctgtgctgtgatgacgaacggtataggaggcccagcatactcggtcagacagtcccttgttctacgactacaattaacggatctacccacgtcttgcgggatgcagtagagtgcggcgggcaatgggagtctcagtgtcacccgcctgccacatctcctctcgttgctgctcagccaagcgacacctag

SEQ ID NO: 106578 - DNA, 1167 bp, synthetic construct
  misc_feature 1..1167: note = Description of Artificial Sequence: Synthetic coding sequence
  source 1..1167: mol_type = other DNA
atggacaaacttgacgctaacgtgtccagcgaagagggcttcgggtcagtggagaaagtggtattgctgacttttcttagtacagtgatcctcatggcgatcctgggcaatctcttggttatggtagctgtgtgttgggaccggcagctgaggaagatcaagacgaactactttatagtgagcttagctttcgcagatctgctcgtgtctgtgctggtaatgccctttggagccattgagctcgtgcaggacatctggatatacggcgaggtattctgcttagtacgcacgtctcttgacgtgctgcttacgaccgcatccatcttccacttgtgttgcatctcactggatcggtactacgccatctgttgtcagccactggtttataggaataagatgacccctctaagaattgctctgatgttgggaggatgctgggtgatccccaccttcatctcctttctaccaataatgcaaggctggaacaatatcgggataatcgacctgatcgaaaagagaaagtttaaccagaactcaaactctacgtactgtgtgttcatggttaataagccatatgccatcacgtgctctgtagtggccttctacatacctttcttattgatggtgttggcctattatcgtatttacgtcactgcaaaggaacatgctcaccagattcagatgttgcaacgagccggtgctagcagcgaatcaaggccccaatccgccgatcagcattcgacacacagaatgcggactgagacaaaagcagccaagacgctctgcatcatcatggggtgcttctgtctttgttgggccccgtttttcgtgacgaatattgttgaccccttcattgactataccgtcccaggtcaggtatggactgcctttttatggctgggatacatcaactctggtcttaacccgttcttatacgcctttctcaataaatcattcagaagagcctttctgatcatcctatgctgcgacgacgagaggtatcgccgcccttccatcttgggacagaccgttccctgttcaaccaccacaatcaatggctctacacacgtgctgcgggacgcggtggagtgcggtgggcaatgggagtcgcagtgtcaccctcccgccacatctcctctcgtggctgcacaaccttcggatacatag

SEQ ID NO: 106579 - DNA, 1083 bp, synthetic construct
  misc_feature 1..1083: note = Description of Artificial Sequence: Synthetic coding sequence
  source 1..1083: mol_type = other DNA
atggacaagttggatgccaatgtgagcagcgaagaagggtttggcagcgtagaaaaggtcgtgctcctcactttcttaagcacagtgattctaatggctattttggggaacctcttagtcatggtggccgtgtgctgggaccggcagctgagaaaaataaaaactaactacttcatcgtttccctcgcttttgccgacctcttagtttctgtcctggttatgccatttggcgcgattgaactggttcaagatatctggatatacggggaagtcttctgtctagttcggacatcccttgatgtgttactgacaacggcctccatttttcacctctgctgtatctcattagatcgttactacgctatctgctgccaacccctcgtctatcgcaacaagatgacaccgcttcgcattgcgcttatgctggggggatgctgggtcatccccacatttatcagcttcctgcctatcatgcaggggtggaataatatcggaatcatcgacctaatagagaaacgcaaattcaaccagaatagcaactccacatactgcgttttcatggttaataagccctatgccatcacttgtagtgtggtcgctttctatatacccttcctgctcatggtcttggcttattacagaatctatgtgaccgcgaaagaacatgcccatcagattcagatgttacagcgggcaggagcgtcatccgagagccgcccccagagcgcggaccagcactctacccacaggatgagaactgaaaccaaagccgcaaagacactgtgcatcataatgggttgcttctgtctgtgctgggctccgttcttcgtcactaacatcgtggatccctttatcgattatacagtccctgggcaggtttggacagcatttctgtggctcgggtatatcaatagtggactgaacccattcctatacgccttcttgaataaatcatttaggcgggccttcctcattatcctgtgttgcgatgatgaaaggtacagaagaccctctatactgggacagactgtgccctgtagtacaacaacaataaatgggtcgactcatgtcctgcgattctag

SEQ ID NO: 106580 - DNA, 1236 bp, synthetic construct
  misc_feature 1..1236: note = Description of Artificial Sequence: Synthetic coding sequence
  source 1..1236: mol_type = other DNA
atggacaaacttgacgccaatgttagctctgaggaggggtttggctctgtggagaaggtggttctccttacatttctctcgaccgtgattctcatggcgatcttgggcaacctgcttgtgatggtggccgtatgctgggaccgccagctgagaaaaattaagaccaactatttcattgtgagtttggcattcgcggatctgttagtgagtgtgttggtgatgccctttggagcgattgagctagttcaggacatctggatctatggtgaggtgttttgcttagttcgcacaagtctcgacgtgctactgactaccgcttccatcttccacctttgttgtattagcctggaccggtattatgccatttgttgtcaaccccttgtgtaccgtaataagatgactcctctgcggatcgctctgatgctcggaggctgctgggtgatcccaacctttatctccttcttacccattatgcagggttggaataacataggtatcattgacctgatcgaaaagcggaagttcaatcagaactccaatagcacctattgcgtgtttatggtaaacaaaccatatgcaatcacctgttcagtggtggccttttacattccctttctgctgatggtgctggcatactaccgcatctacgtgaccgcgaaggagcatgcccaccaaatacaaatgctacagagggcgggcgcctcatctgaatcaaggccacaatcggccgaccaacacagcacacatcgaatgcgaaccgagaccaaagctgcaaaaacactatgcattatcatgggatgtttctgtctatgctgggctcccttctttgtgacaaacattgtggatccattcatcgactataccgtgccgggccaagtttggactgcctttctatggttaggctatataaattccggtcttaatcccttcctgtacgccttcttgaataagtctttccgccgcgcattcctgataattctgtgctgcgatgacgagcgctatcgacggcccagcatcctcgggcagaccgttccttgctcaactacgaccatcaacggctctacccatgtgctgagcagtgggacagaaacagaccgcaagaaactgtggaataaggaggagaaaatcgaccagacaatccagatgccaaaacgaaagaggaagaagaaagcctcattatcttacgaggatctcattctgctggggcgcaagtcctgtttcagagaggggaagtag

SEQ ID NO: 106581 - DNA, 1164 bp, synthetic construct
  misc_feature 1..1164: note = Description of Artificial Sequence: Synthetic coding sequence
  source 1..1164: mol_type = other DNA
atggataagctcgacgccaacgtgtcctctgaagaaggctttggatccgtggagaaggtcgtacttctgacctttctctcaactgtcatcctaatggcaatccttgggaacttacttgtgatggttgccgtttgctgggacagacagctcagaaagatcaagaccaattacttcattgtcagtttggctttcgccgacctgctggttagcgttctggtgatgccgtttggcgccatagaactagtccaggatatctggatctatggcgaagtgttctgtttggtaaggaccagcctggacgtgctgctgaccaccgcatcaatcttccatctgtgttgtatatccctcgatcggtattacgcgatttgctgtcagccacttgtttaccggaacaagatgaccccactgaggatcgcattgatgctcggtggttgttgggtaattcctacattcatcagttttcttccaattatgcaggggtggaataatataggcattatagatttaatagagaagcgaaagttcaaccaaaactccaactccacctattgcgttttcatggttaataagccttacgctatcacctgcagcgtagtggccttctacataccctttctgctgatggttcttgcctactaccgaatatacgtgaccgctaaggagcatgcccaccagatccaaatgctgcaacgggccggcgcatccagcgaatcacgtcctcagtcggcagaccagcactctacccaccgcatgagaaccgaaactaaagctgctaaaacactctgtattattatggggtgtttctgcctgtgttgggccccgttttttgttaccaatatcgttgatccttttatagattacacagtgccaggacaagtgtggacagcttttctgtggctgggttatatcaactcgggcctcaacccttttttatacgccttcctgaataaaagtttcagacgggccttcctgatcatactgtgctgcgacgacgagaggtacaggcgcccatcgattttaggacagactgtgccttgcagcaccaccaccatcaacggaagcacccacgtcctgcgatatactgtcctgcatcgagggcaccaccaggaactggagaagttgcctattcacaacgatcccgagtctctggagtcctgtttttag

SEQ ID NO: 106582 - DNA, 1137 bp, synthetic construct
  misc_feature 1..1137: note = Description of Artificial Sequence: Synthetic coding sequence
  source 1..1137: mol_type = other DNA
atggataaactcgatgctaatgtgagtagtgaggagggcttcggatctgtggagaaggtggtccttttaacgttcctatcgacagttatcctgatggctattctgggcaacctactggtaatggtggcagtttgttgggatcggcagttgcgaaagatcaagactaattatttcatagtcagtctggcattcgccgatcttctggtaagcgtcttggtcatgccatttggcgctatcgagctcgtgcaagacatttggatttacggagaagttttctgccttgtgcgcacgagcctggatgttcttctcaccactgcctctatctttcacctgtgctgcatttcacttgacagatactacgccatctgctgccagccactggtgtacaggaataagatgactcctctgcggatagctctgatgctcggtgggtgttgggttatccccacattcatatcttttttacccattatgcagggttggaacaacattgggatcattgaccttatcgagaaacggaaatttaaccagaattcaaattccacgtactgcgtgtttatggtgaacaagccatatgcgattacatgcagcgtggttgccttctacatcccgttccttctgatggtgctggcttactaccggatttacgtgaccgccaaggagcatgcacatcagatccagatgctccagcgggcaggagctagctctgagtcaagaccgcagtccgcggatcagcacagtactcaccgaatgagaacggagacgaaagccgccaaaacactgtgcatcatcatgggctgcttctgcctctgctgggcacctttctttgtcacaaatatcgtggaccctttcatcgattacaccgtgcctgggcaggtgtggacagcctttctgtggctcggctacattaactctggtctgaacccgttcctgtacgcttttctgaacaaaagttttcggcgagcctttctgattatactgtgctgtgatgacgaacgctatagacgccctagtattctcggccagacagtcccttgcagcactactactatcaatggctctacgcatgttctctcaggatgttccccggtgtcttcattccttttactgttctgtaacaggccagtaccggtttag

SEQ ID NO: 106583 - DNA, 1137 bp, synthetic construct
  misc_feature 1..1137: note = Description of Artificial Sequence: Synthetic coding sequence
  source 1..1137: mol_type = other DNA
atggacaagctggatgctaacgttagctctgaagaaggctttgggtcagttgaaaaggttgtactcctaaccttcctgagcacagttatcctgatggcaatcctggggaacctgcttgtcatggtagcagtgtgctgggaccgacaattgcggaaaattaagacaaattattttatcgtcagcctggcctttgccgacctgctggtgtccgttctggtgatgcccttcggagcaattgagctggtacaggatatttggatatacggtgaagtcttttgccttgtgcggacctccctggacgttctccttacgacagccagcatcttccacctttgctgcatctcgctggataggtactatgcaatctgttgtcagcccctggtatacagaaacaagatgacacccctcagaatcgccttgatgctcggaggatgttgggtcatccctacttttatcagcttcctgcctatcatgcagggctggaacaatataggcattatcgatcttatcgagaagcgcaagttcaatcagaactcaaactccacctattgtgtgttcatggtaaataaaccttatgcaatcacatgcagcgtggtcgccttctacatccctttcctcttaatggtgctagcttattacagaatctatgtgaccgctaaggagcatgcccaccagatccagatgttacagcgggcaggggctagttccgaaagcagacctcagtccgctgatcaacatagcacccaccggatgaggacagaaacaaaggccgctaaaacactctgtataatcatgggctgcttttgcctctgctgggctcccttcttcgtcacaaatattgtcgatcccttcattgactatacggtccccggacaagtgtggactgctttcttatggttaggctatataaactccggcctgaatccattcctgtacgcttttcttaataagtccttcagaagggctttcctgatcatcctatgttgcgatgacgaacggtaccgaaggccaagcatcttagggcagaccgtcccctgcagcacaaccacaattaacggtagtacccacgttctgagcggatgctctccggtcagttcattcctgctgttgttctgcaataggccggttcccgtatag

SEQ ID NO: 106584 - DNA, 1074 bp, synthetic construct
  misc_feature 1..1074: note = Description of Artificial Sequence: Synthetic coding sequence
  source 1..1074: mol_type = other DNA
atggacctgcccgtgaatctgaccagtttcagccttagcacccccagccctctggagacaaaccactccttagggaaggacgacctgcgcccaagttcgccactgctgagtgtcttcggtgtgctgattctcacgttgctgggatttcttgtggctgccacgtttgcttggaacctattggtcctcgcgacaattctgagagttcgtacatttcatcgtgtaccgcataaccttgtagcaagcatggctgtgagcgacgtcctcgtggctgctctcgtaatgcccctctcccttgttcacgagctatcaggcaggcgctggcagttgggaaggcgactttgtcagctgtggatcgcttgcgacgtcttgtgttgcactgcgtcaatttggaacgttacagcaatagctctggacagatactggagcattactcgccatatggaatatacattaaggactaggaagtgtgtgtctaatgtcatgatcgccctcacctgggctctatctgccgtaatctcactggcccccctgttattcggttggggagagacctactcggaggggagcgaagagtgccaggtgtcacgagaaccttcctacgccgtcttttccacagtcggagccttctatttgcctctctgtgtggtccttttcgtatattggaagatctacaaggccgcaaaattccgggtcggatcaagaaaaacaaactctgtttctcctatatcagaagccgtggaagttaaggactcagcaaagcagccccagatggtgtttacggtgaggcacgctaccgttacattccagccggaaggagacacttggcgggagcagaaggaacagagggcggctctgatggtgggtatcctaattggtgtctttgtgttgtgttggattcccttttttctgactgagttgatttctccactttgctcctgtgacattccagccatctggaagagcatttttctctggttaggctactctaattctttcttcaaccccctcatctacaccgcatttaataaaaattataactcagcgtttaagaacttctttagtcgacagcattag

SEQ ID NO: 106585 - DNA, 1323 bp, synthetic construct
  misc_feature 1..1323: note = Description of Artificial Sequence: Synthetic coding sequence
  source 1..1323: mol_type = other DNA
atggtgcccgagcctggccccaccgccaattctacaccagcatggggcgccggccccccctctgcccccggcggatccggatgggtggctgctgcgctgtgtgtggtgattgcactgactgccgctgccaactcactcctcatcgctctcatctgcactcagccagccctgcggaacacctccaacttttttttagtctctttgtttacgtcagatcttatggtgggattggtggtgatgcccccggccatgctgaacgcgttgtacggacgctgggttttggctagaggtctgtgcttgttatggacagcattcgacgtgatgtgttgttcagcttcgattctcaatctctgtcttatctccctggatcggtatctgctgatcctgtcccctcttaggtataagcttagaatgacacccctcagggccctagctctggttcttggcgcctggtccctcgccgctctagcgtcctttttaccgcttcttttgggatggcatgagctagggcacgctcgccctcccgtgcctgggcagtgtagactcctggccagcttgccatttgtactggtcgcctccgggctaacttttttcctgccatcgggcgccatctgtttcacatactgccgcatcctgctggctgccagaaaacaggcagttcaggtcgcctccctaacaacaggaatggcgtcgcaggcttccgaaacattgcaagttcctaggactccgaggccaggggtagaaagcgccgactcaaggcgccttgcgaccaagcactctaggaaggcactgaaggcctccctcactctgggaattctgctgggcatgtttttcgtgacatggctgccattcttcgtagctaacattgttcaggcagtttgtgattgtatctctccaggcctttttgacgtactcacatggctgggatattgcaatagcacaatgaaccctatcatttacccgctgtttatgagagactttaaacgagctctgggcaggttcctgccatgtcctcggtgtccgagagagcggcaggcatcactggcaagcccctcactccgcacttcccattccggccctaggcctggcctgagcttacaacaggtacttcccctcccactgccaccggacagcgatagcgatagtgacgcgggatctggcgggtccagcggcttgcggctgaccgcccaattactcctacctggggaagccacccaggatccaccactgcctacgagagccgcagcagcagttaatttttttaatattgacccagccgaaccagaactaaggcctcatccactgggaatcccaacaaattag

SEQ ID NO: 106586 - DNA, 1338 bp, synthetic construct
  misc_feature 1..1338: note = Description of Artificial Sequence: Synthetic coding sequence
  source 1..1338: mol_type = other DNA
atgatggacgtgaattcctcagggcgacccgacctctacggccacctcagaagtttcctgcttccagaagtgggccggggattgccagatctcagccccgatggcggcgccgatcctgttgccggcagctgggccccccatctcctctcagaagtgactgcgagcccagctcccacctgggacgctccccctgataacgccagcggatgtggtgaacagattaactacggccgagttgagaaagtggttataggttcgatactgaccctgattaccctgctcactatcgccggcaactgcctggttgttatttcggtgtgttttgtgaaaaagttaagacagccgtcaaactacctaattgtcagtctagccctggctgatctcagtgtggccgtggccgtgatgccatttgtctcggtgacagatctcataggaggcaaatggatcttcggccatttcttctgcaatgtcttcatagcaatggacgttatgtgttgcacagcctccattatgacactgtgcgtgatcagcatcgacagatatctcggcatcactcgcccactcacctatcctgttagacagaacggaaagtgcatggcaaagatgatcctgtcagtgtggctactgagcgccagcatcactttgccccccctgttcggctgggcccaaaacgtgaatgacgacaaggtgtgccttatcagccaggactttgggtataccatatatagcaccgctgtcgcattctatattccaatgtctgtcatgctgttcatgtattaccagatctacaaggccgcccggaagtctgctgcgaagcacaaattcccaggcttcccgcgagtagagcccgattcagtgattgccctaaatgggatagtgaaactgcaaaaggaggtcgaggagtgtgccaacctgagtcggcttctgaagcatgagagaaaaaacatctcaatcttcaaacgggaacagaaagcagccacgactttgggaatcattgtaggagcattcaccgtgtgttggctgcctttttttctcctgtcgactgcccggccattcatctgcggtacaagctgctcctgcatcccactatgggtagaacgcactttcctgtggttaggatatgccaacagccttatcaatccttttatctatgcattctttaaccgcgacctcagaaccacatataggtcattgctgcaatgccaatacaggaatatcaatcgaaaactcagcgccgcgggcatgcatgaggctttaaaactggccgagaggcccgaaagacccgaatttgtactacaaaatgctgattattgccggaaaaaaggccacgactcatag

SEQ ID NO: 106587 - DNA, 1440 bp, synthetic construct
  misc_feature 1..1440: note = Description of Artificial Sequence: Synthetic coding sequence
  source 1..1440: mol_type = other DNA
atgatggacgtcaactcctctggccggcccgatctctatggccacctgaggtcatttctgctgcctgaagtggggaggggattgccagacctttcacctgatggaggggccgatccagtcgccggaagctgggcaccccacctcctgagcgaagttactgcctcaccagcacccacttgggatgccccgcctgacaatgcctccggttgtggggaacaaattaactacggtcgggtcgaaaaggtggtgattgggagtatcttgaccttgatcacactgctcactattgcgggcaattgtcttgtggtaatctcagtctgcttcgtgaaaaaactgagacagcccagtaactacctcatcgttagcctggcacttgccgacctttctgtagctgtcgcagtcatgccgtttgtatctgtgaccgaccttatcggtggcaagtggattttcgggcactttttctgcaatgtattcattgcaatggatgtcatgtgctgtacagcatcaattatgaccctctgtgtgatcagcatcgatcggtacctgggaattactaggcccctgacctacccagtgcgtcaaaacgggaaatgcatggctaagatgattctgtccgtgtggctgctatcagccagtattaccctgcccccattgttcgggtgggctcaaaacgtcaacgacgataaggtgtgccttatctcacaggatttcggctacaccatttattcaaccgccgtcgcgttttacattcccatgtctgttatgctgtttatgtattaccagatttacaaggccgctcgcaagtccgctgcaaagcacaaattccctgggttcccgagagtagagcctgatagtgtgattgcactgaatgggattgtgaagctgcaaaaggaagtggaggagtgcgcaaacctctcacgtctgctgaagcacgagcgtaagaatattagcatttttaagcgagaacagaaggcggcgaccactcttggcattatcgtgggcgcctttactgtctgttggctgcctttcttcctgctttctacagcccggcccttcatttgcggaacgagctgttcttgtatacccttatgggtggagcgaacattcctgtggctaggctacgccaactccctcatcaatccttttatatacgcatttttcaatagggacctgcggacaacgtacaggtctctattgcagtgccagtaccgaaacattaatcgcaaactcagcgcagcgggcatgcacgaagcgcttaaactggcggagcggccggaacgcccggagtttgttctgcgagcctgcaccagacgggttcttttaagacctgagaaacgacctccagtgtccgtgtgggtcctccaaagccccgaccaccacaactggttagccgacaagatgttgacaacagtcgagaagaaagtcatgatccatgattag

SEQ ID NO: 106588 - DNA, 1299 bp, synthetic construct
  misc_feature 1..1299: note = Description of Artificial Sequence: Synthetic coding sequence
  source 1..1299: mol_type = other DNA
atgatggatgtcaacagttctgggagacctgatctgtatggccatctgagaagttttttgctgcccgaagtgggtcgggggctgcccgatctgtcgccagacggtggcgccgatcctgtggccgggagctgggccccccacttgctgtccgaagtcaccgctagtcctgctccaacatgggacgcccccccagacaatgcctctgggtgcggagagcagatcaattatggccgagttgaaaaggtagtgattggatctatattaactctcatcaccctgctgaccattgccgggaactgccttgtggtgatcagtgtgtgcttcgtaaaaaaactacggcaaccctcgaactatctcatcgtgtcactcgccctcgccgacctctctgtagccgtcgcggtcatgcccttcgtgtccgtcacagacctcataggaggcaagtggattttcggccacttcttttgcaacgtgttcatcgcgatggacgtaatgtgttgcacagcatctatcatgacattgtgtgtaatcagtattgacagatacctgggcatcaccagacccttgacataccctgttcgacaaaatggaaaatgcatggccaaaatgatcctgtccgtgtggctcctttccgcctctatcaccttacctcccctcttcggatgggcgcagaatgttaatgatgataaagtctgtttaatttcccaagacttcggctataccatttattccaccgcggttgctttctatatccctatgtctgtcatgcttttcatgtattatcagatttacaaagctgctcgcaaaagcgccgcaaaacataaatttccaggattcccaagggtggaacccgattccgtgattgccctgaatgggatcgtgaagctgcagaaggaggttgaggagtgcgccaacctttctcgcctgttgaaacacgagaggaagaacatcagcatcttcaagagggagcagaaagccgccaccacgcttgggattatcgtgggagcctttactgtctgctggctgcctttcttcctcctgagtactgcacggccttttatctgcggaacaagctgctcttgtatcccattatgggtggaacgtacattcctgtggctgggctacgcaaatagtctgatcaatcccttcatatatgcctttttcaatagagacctgcgcacgacttacaggtctctgttgcagtgtcagtatcgtaatatcaaccgaaagttatctgctgccgggatgcacgaagccttaaaattggccgaacgaccagaacgaccagagtttgtcctgtag

SEQ ID NO: 106589 - DNA, 1440 bp, synthetic construct
  misc_feature 1..1440: note = Description of Artificial Sequence: Synthetic coding sequence
  source 1..1440: mol_type = other DNA
atgatggacgtgaacagtagcgggagacctgacctgtacggacatctccgctctttcttgctccctgaagtgggccgaggactgccagatctgtcccccgacggcggggcagaccccgtggccgggtcttgggccccccacctgcttagcgaagttacagcctcaccggcccctacttgggatgcccctcccgataatgcaagcggatgcggggagcagatcaactatggcagggtcgagaaggtggtgatcggcagcatcctaaccctgataacactgctcaccatcgctggaaactgtctggtggttattagcgtctgtttcgttaagaaactgcggcagccctcgaactatcttattgtctccctggctctggctgatctgagcgtggccgttgcagtgatgcccttcgtgtctgtcaccgacttaattgggggcaaatggattttcggtcattttttttgtaatgtgtttatcgcgatggatgtgatgtgttgcacagcaagtatcatgacactgtgcgtaatttctattgacaggtatctgggaattacccgtcctctgacttacccggtgcgacagaatgggaaatgcatggcaaaaatgatcttgtcagtgtggctgctgagcgcctcaatcaccttgcctccactcttcggttgggcacagaatgtgaatgacgacaaagtgtgcctgatcagtcaagactttgggtatacaatctatagtaccgcagtggcattttacatcccaatgtcagtgatgctgttcatgtattatcagatttacaaagccgcccggaagtcagcagccaaacataagtttcccgggttccctcgggttgagcctgacagtgtgatcgcactgaacggaatcgtgaaactccagaaagaagttgaggaatgcgccaatttatccaggctgctaaaacatgagcggaagaatattagtattttcaagcgggaacagaaggccgctaccacgttgggaatcatagttggtgccttcaccgtgtgttggctgccctttttcctgctctcaactgccaggcccttcatctgcggtactagctgctcgtgcatcccgctgtgggtcgagcgtacatttctttggttagggtatgcaaattcattgatcaacccctttatttacgcatttttcaatagagatctcaggactacatataggtccttactgcagtgccagtatcgcaacattaatcggaaactgtccgccgctggcatgcacgaggcgctgaagttagccgagcggccagagcggccagagtttgtactgatcacccggacttctggcgtccatcaggccctggaaaactttccctggggaaatgaagtgaatagatggcgtaaatcttgcgaatacttctgcacagataaaatgctgacgaccgtcgagaaaaaggtgatgattcacgattag

SEQ ID NO: 106590 - DNA, 2460 bp, synthetic construct
  misc_feature 1..2460: note = Description of Artificial Sequence: Synthetic coding sequence
  source 1..2460: mol_type = other DNA
ggcatgctggatggcccttcagctatgactcggttctgtaatcttatcgcctccgaaccggacatcgccaaagtacctttgtgtatcgacagctctaactttgctgtcatcgaagcaggactgaagtgttgccaaggaaaatgtattgtgaactccataagtctcaaggagggcgaagccactgaaactgataccaagattcgcgtgtgcacgcgggcctaccacctgctggtgaagaagctcggatttaacccaaacgatattatcttcgaccccaacatactcaccattgggaccggaatggaggaacataacttgtacgctatcaactttattcacgccactaaggtcattaaggaaaccctgcctggcgcacgtatctccggtggactgtccaatctgagcttctcttttcggggcatggaggctatccgcgaagctatgcacggtgtgtttctttatcatgctattaaaagcgggatggatatgggcatcgtgaacgctggcaatttgccagtctacgacgatatccacaaagaacttctgcaactgtgtgaggatctgatctggaataaagatcccgaagcgacagagaagcttctgaggtatgcccagacacaggggacgggaggaaagaaggttatacagacagacgaatggagaaacggacccgttgaggagagattagagtacgcgctggtcaagggtatagagaagcatattatcgaggatacagaagaggctcgactcaaccaaaagaagtatccccgacctttaaacatcatagaaggcccgctgatgaacggcatgaagatcgtgggcgatttatttggggctggcaaaatgttcctgccgcaggtgattaagtctgcacgagtgatgaagaaggccgtgggacacctgataccattcatggagaaggagcgggaagagaccagggtgctgaatggaaccgttgaagaggaggatccttatcaaggtaccattgtcttagctactgtgaagggggacgtgcacgatattggcaaaaacatcgtgggagtcgtgctgggctgtaacaatttcagggtgattgacctgggagtgatgaccccctgcgataagattttgaaggctgcactagaccataaggctgatattattgggctgagcggcctgatcacgccctcgttggatgaaatgattttcgtggccaaagagatggagaggctggcaatccggatacctctactaatcggaggcgctaccacgagtaagacacatacagcagtgaaaattgccccaagatattcggcacccgtgatccatgtgttggatgcttctaaaagtgtggtcgtatgttctcaactgctggacgagaacttgaaggacgagtacttcgaggaaatcatggaggagtatgaagacataaggcaggaccactacgagtctctcaaagagcggcgctatctgccgctgtctcaagcccgcaagtctgggttccagatggactggttgagcgaaccacacccagtgaagcctacctttatcggtactcaagtgtttgaggactatgacctccaaaaattggtggattatatcgattggaagccctttttcgacgtgtggcagctcagaggtaaatatcccaaccggggctttcccaaaattttcaacgataaaactgtaggcggagaagcacgcaaggtgtatgatgatgctcataacatgctgaacacattgatctcccagaagaaattgagagcacggggggtggtaggtttttggccagctcaaagtatccaggatgatattcatttgtacgccgaggctgctgttccacaagccgccgaacccatcgccactttctacggattgaggcaacaagctgagaaagactctgcctctaccgagccatactactgcctgtcagacttcattgcacctttgcacagtggcatcagagactatttggggctgttcgccgtagcatgtttcggcgtggaagaactgtccaaagcttatgaggacgatggggacgactatagctccataatggtgaaggctcttggcgaccgcctcgctgaggcatttgccgaggaactccacgagagagtgcggagagagctgtgggcctattgcggttctgagcagctggatgtggccgatttgaggagactgcggtacaaggggatccgacccgctccgggatatccttcccagccagaccacactgagaaactaacgatgtggcgcttggccgatattgagcagagtacagggatccgtctgacggaatctctggctatggcgccggcttctgccgtctcaggtctgtatttcagcaatctcaaatccaagtatttcgccgtaggcaagatttccaaggaccaagtggaggactatgccctacgcaaaaacatcagcgtagcggaagtagagaagtggctcggcccgattctgggctacgatacggattag

SEQ ID NO: 106591 - DNA, 3798 bp, synthetic construct
  misc_feature 1..3798: note = Description of Artificial Sequence: Synthetic coding sequence
  source 1..3798: mol_type = other DNA
atgtccccagccttgcaggatctgtctcagcctgaaggactgaaaaagactctaagagacgaaatcaacgctattctgcagaagcgcattatggtgcttgatggcgggatgggcaccatgatacagcgagaaaagctgaacgaggagcacttccgcggccaggagttcaaggatcatgcgcgcccactgaagggcaacaacgatatcctctcgattactcagccagatgtgatctatcaaatccacaaagagtatttacttgctggggcagatattatcgaaaccaacacattttccagtacctctatcgctcaggccgactatgggttggaacaccttgcctaccggatgaacatgtgctcagctggcgtggcacggaaagcggctgaggaagtgactctgcagactggtatcaaaagatttgtcgctggggccttaggtccaacgaataagacgctctcagtaagtcctagcgtggaacgccccgattaccggaacataaccttcgacgagctcgtggaagcatatcaggagcaggctaaaggcctgctggatggaggtgtggatatcctgctgattgaaacaatatttgacactgctaatgccaaggccgctcttttcgcactgcaaaatttgttcgaagagaaatacgcccctagaccaatcttcatttccggtacaattgtcgataagagtggtagaactctgtcagggcagacgggcgaaggcttcgtgatctctgtctcacacggggagcccctttgtattggtctgaattgtgccctcggagccgcagagatgcggccctttattgagataataggaaaatgcacaacggcctacgtcttgtgttatccgaatgctggtctgccaaatactttcggcgattacgatgaaacacctagtatgatggcaaagcacctgaaagactttgcgatggacgggctagtcaacatcgtgggggggtgttgcggctcgacccccgaccatatcagggaaatcgctgaggctgtgaaaaattgcaagccccgagttccacctgccactgccttcgagggacacatgctgttgtccggcctggaaccgttccggatcggaccatacaccaacttcgtgaatattggagaaagatgtaatgtggccgggagccgaaaattcgcaaaactcatcatggcagggaactacgaagaagcactttgcgtagctaaggttcaggtggagatgggggcgcaagtgttggatgtcaacatggatgacggaatgctggatgggccgagcgccatgactcgcttctgtaacctcatagcctcagagcccgacattgccaaagtgccactatgtatcgattcctcaaacttcgccgtgatagaggccgggttaaagtgctgtcagggcaagtgcattgtcaacagcattagtttgaaggagggagaggacgacttcctagaaaaagcgagaaagatcaagaaatatggagcggctatggtcgtgatggcattcgatgaggaaggccaagccactgagacagacacaaaaatccgtgtgtgcacccgggcctaccaccttctcgtgaagaagttgggattcaatcctaatgatatcattttcgacccaaacattcttaccatcggcacgggcatggaggagcacaacttgtacgctattaacttcatccatgccactaaagtgattaaggagaccctgcctggggcacgcatttcaggcggtctcagcaatctgagcttttcgttcaggggtatggaggccattagggaggctatgcacggcgtattcctgtaccatgccatcaaatccggaatggacatgggcattgtaaatgcaggaaatctcccggtgtacgacgacatccacaaggaactccttcaactttgtgaggatctgatatggaataaggaccctgaagctacagagaagctgctcagatacgcccagacccaaggaactggcggcaagaaggtcattcagacagatgagtggaggaatggcccagtagaagaaagactggagtatgctctggtcaaggggatcgagaagcatatcatcgaagacaccgaggaggcaagattaaaccagaagaaatatccacggcctctcaacataatcgaagggccattaatgaacggcatgaagatcgttggggatctgttcggagcgggaaagatgttcctaccacaggttatcaagagtgcccgcgtcatgaagaaagccgtggggcaccttattcccttcatggagaaagagcgggaggaaactagggtgctcaatggaactgttgaagaagaggacccctaccagggcactatagtgctagccactgttaaaggggacgttcatgacatagggaaaaatatcgttggcgtggtgttgggttgcaacaacttccgcgtgatcgatctcggggttatgactccatgtgacaaaattctcaaggccgccttggatcataaggcggatattatcggtttgtccgggttgattacacccagcctagatgaaatgatatttgttgcgaaggagatggaaaggttggccattcggatcccccttctaattggaggggccactactagcaagacccataccgccgtcaagattgctcctcggtatagcgcccccgtaatccatgtccttgatgcttcaaaatccgtcgtggtgtgctcgcagcttcttgatgaaaatctgaaagacgagtacttcgaggagattatggaagaatacgaggatatccgacaagaccactatgaatctctgaaagagcggcgatacctgcccctcagccaggctcggaagagtggattccagatggattggctctccgaaccccacccagtaaagccaacctttatcggaacccaagttttcgaagattatgacctgcagaagttagtggattatatcgactggaagccattttttgacgtgtggcagttgcgggggaaataccccaatcgaggcttcccgaagatttttaacgacaaaactgtcgggggggaggcccggaaggtctacgacgacgcacataacatgctgaatacacttattagccaaaagaaactgagagcgcgcggggtagtcgggttttggcctgcccagtccattcaagacgatattcacctgtatgcagaagcggctgttccccaggcggccgagcccatcgcgaccttctatggactacggcagcaggctgagaaggattccgcttctactgagccttactactgtttgagcgactttattgcccctctgcattctggaatccgcgattatttaggtctgtttgctgtcgcctgctttggcgttgaagagctcagtaaggcttacgaggacgatggcgatgactactcatcaatcatggtgaaggcgctgggcgacagattagccgaagcttttgcggaggaactgcatgagagagtaagaagggagctatgggcttattgtgggtcggagcagttggatgtggccgatctgcgaagacttaggtataagggtattcgtcctgctcccggctacccatctcagccagatcataccgagaaactcacaatgtggcgtctggccgacattgaacagtctaccgggattcggcttacggaatccctcgctatggcccccgctagcgcagtctcagggttgtacttcagtaatcttaagagtaagtactttgccgttggaaagatctccaaggatcaggtggaggactacgcccttagaaaaaacattagtgtggccgaagtcgaaaaatggttgggaccaatcctcggatacgacactgattag

SEQ ID NO: 106592 - DNA, 3357 bp, synthetic construct
  misc_feature 1..3357: note = Description of Artificial Sequence: Synthetic coding sequence
  source 1..3357: mol_type = other DNA
atgtcaccagcactgcaggatctgagccagcccgagggcctgaaaaagaccctgcgggacgagattaacgccatcctgcagaagaggattatggtcttagatggtggaatgggaactatgatacagcgggaaaagctcaacgaggaacacttccgcggacaagaattcaaagaccacgcgaggcctctgaaaggaaacaatgacatccttagtattacgcagcccgacgtgatctaccaaatccataaggaatatctcttagctggagccgacataattgaaaccaatacattctccagcacatcaatagctcaggcggactacgggctggagcatctggcctatcgcatgaatatgtgcagcgcaggggtggcacgcaaagcagccgaggaagtcacccttcaaacagggatcaaaaggtttgtggcaggtgcactgggcccaacaaacaaaaccctttcagtctcgccgtccgtcgaaagacctgactatcgaaatatcacttttgacgaactggtggaggcgtaccaggagcaggccaaaggtctactggacggcggtgtggatattctgctgattgaaacaatttttgacactgccaacgccaaggctgccctgtttgccctccaaaatctcttcgaggagaagtatgctcctagacccatcttcattagcgggaccattgtggacaaatcaggtaggactctaagtgggcagaccggagaaggctttgttatctcagtcagtcatggggagccattgtgcatcggccttaactgtgcactgggcgccgccgagatgcgtccatttattgaaatcatcgggaagtgcactaccgcatacgtgctgtgttatcctaatgccggtttacccaacacctttggcgactatgacgagacaccttcaatgatggcaaaacacctcaaagacttcgcgatggatgggctggtgaacatcgtgggcggatgctgcggatcaacccctgaccatattcgagaaattgcagaggccgttaagaactgcaagccacgggttccgccagccaccgcctttgaggggcacatgctgctcagtggcttggagccgttccgcataggcccatacactaactttgttaatatcggcgagaggtgtaatgtcgcaggatcgcgcaaattcgctaaactcatcatggctgggaactacgaagaggcactatgtgtagccaaggtgcaggtagaaatgggcgcccaggtcctggatgttaatatggatgacgggatgcttgatggcccaagtgccatgacccgtttctgtaatttgatcgcctcggagcccgatatcgcaaaggtgccactttgcattgatagcagcaatttcgcggttatagaagctggcctgaaatgttgccaggggaaatgtatcgtgaatagtatcagtctcaaagaaggcgaggacgatttcttggaaaaagcacggaaaattaaaaaatacggcgccgctatggtggttatggcgttcgacgaggagggccagacacaaggaacaggcggtaaaaaggtcattcagaccgacgaatggcgaaacggacccgttgaagagcgcctagagtatgcccttgtcaagggcatcgaaaagcacatcatagaggatactgaggaggcccggctgaatcaaaaaaagtaccctagacccctaaacatcatcgagggcccacttatgaacggtatgaaaattgtgggagatttatttggcgctggcaaaatgttcttaccccaggtgatcaagtccgctcgtgtgatgaaaaaggccgttggccacctgatacctttcatggagaaggaaagggaggaaactagagtcctgaacgggacggtggaggaagaagacccttatcagggcacaattgtgctagccacagtgaagggagacgtgcatgatattgggaaaaatattgtgggcgtggtgctaggctgcaacaatttcagggtgatagatctgggagtgatgacaccatgcgacaagatcctcaaagccgctttggatcacaaggcggatattattggcctgagcgggctgatcacaccaagccttgacgagatgatctttgtggccaaggagatggaaaggctggcaatccgcatcccacttcttatcggcggagccactacctcaaagacccatacggcggtcaagatcgcacccagatacagcgcccccgttattcacgtgctggatgcgtccaagtccgttgtcgtgtgcagccagttgctcgacgagaacttgaaagacgagtatttcgaagagattatggaagagtatgaagatatcaggcaagaccattacgaatctttaaaagagcggcggtatctgcctctgtctcaagcaagaaaatcaggctttcaaatggattggctctcagagccacacccagtcaagcccacatttataggcacccaagtgttcgaggactacgatttgcaaaaactggttgactacatcgactggaagccatttttcgacgtgtggcaactgcggggaaagtaccctaaccgggggttcccaaagatttttaatgacaagactgtcggaggggaggcaaggaaggtctacgatgatgcccataacatgctgaataccctgatttctcagaaaaagctgcgggcaaggggcgttgtgggattctggcccgctcagtctattcaggacgacatccatctctacgccgaagctgcagtccctcaggccgcagagcccatcgcaaccttttacggcctgcggcagcaggcagagaaggactcggcgtctacagaaccatactattgtctgtctgactttattgctccgttacactctggtatccgggattacctcggattatttgcggtagcatgcttcggcgtggaggagctgagcaaagcatacgaagacgacggggacgattatagctccattatggtcaaggctctgggtgatcgattggctgaggcttttgctgaggaactgcacgaaagagtgcgccgggaattatgggcctattgtggaagtgagcaactggacgtagccgatcttagaaggttgaggtataagggcattcgtcctgcacccgggtatccctcacagcccgaccacactgaaaaactgaccatgtggcgcctcgcggatatcgaacagagcacaggcattaggctgaccgaatcactggcaatggctccagcctctgctgtttctggcttgtacttcagcaatcttaaatctaagtatttcgccgtgggaaaaatttcgaaagatcaagtggaagactatgcactgcgcaagaatataagcgtggccgaggtggagaagtgtatgtctgtgtatcgaaaaatcggtgaatag

SEQ ID NO: 106593 - DNA, 690 bp, synthetic construct
  misc_feature 1..690: note = Description of Artificial Sequence: Synthetic coding sequence
  source 1..690: mol_type = other DNA
atgagcgcaggcctgagggcaggctgtcacgtagtcctactttgtcggttttcgctggggtctttctccgttccatctagggattccgcgtcaggccgggcttgcttggcggcacgtccaactcctaggacaggacgagtacccggaaaaaaggcacgtgcccccgcagttgcggccccgagcccagaaaggggccctcgcgccctacgcgcgtttggcgtacggagccctcctgctaccagagctaacgggagaagacagaagacaagagctctctgcggacggttggcatggcggtggcttgcatggcctctggctgtggtcacatgcggggaacacgtgttctccgctgctccttccgctcagggaggcgattccactacctgtcacccccgtagcaaaacatgccggaatcccgagtacttactggcgggagctgacattatagagacgaatactttctcttcaacttccatcgcccaggctgattacggcttagagcacttggcctatagaatgaatatgtgctccgccggggtagctcggaaagcggcagaggaagtgacattgcagacaggtattaagaggttcgtcgccggcgccctgggtccgacaaataaaaccctatccgtgtcacctagtgtggagagaccagattatcggaatatcaatttaccggttggtagctag

SEQ ID NO: 106594 - DNA, 3645 bp, synthetic construct
  misc_feature 1..3645: note = Description of Artificial Sequence: Synthetic coding sequence
  source 1..3645: mol_type = other DNA
atgtctcccgcacttcaggaccttagccagccagagggactgaagaagactttacgcgatgagattaatgcaattttacagaaaaggattatggtgctagacggaggcatgggaaccatgatacagcgagagaagctgaatgaggaacatttccgggggcaggagtttaaagaccacgcccgccccctcaagggcaataatgacatcctgagtatcactcagccagatgtcatctaccagatccacaaagaataccttctggccggcgccgacattatagaaaccaacaccttttcctctacttctatagcacaagcggactacggacttgagcatctcgcatataggatgaatatgtgcagcgctggcgtcgcacgcaaagctgccgaggaagttaccctgcaaaccgggatcaagaggttcgtggccggagcactaggtccaactaataaaaccctgtcagttagcccatccgtagaaaggcctgactacaggaacatcaccttcgacgaactggtggaggcctatcaggagcaagctaagggacttctggatgggggtgtggacatcttgctgatcgagaccatctttgacacggccaacgcaaaggccgctttgttcgccctgcagaatctgttcgaagaaaagtacgctccccgtccaatctttattagcgggaccattgttgacaagagcgggaggacactgtcagggcagacaggcgagggctttgtcatttctgtgtcgcacggcgagcccctctgtattgggctgaactgtgctctgggtgccgcagaaatgcggccttttatcgagatcattggcaagtgtactaccgcatatgtactctgctaccccaatgcaggccttcccaacactttcggagattacgatgagacaccatcaatgatggcaaaacacctgaaagactttgccatggatggtttagtgaacatagtgggagggtgctgcggctcaaccccggatcacattcgcgaaatcgctgaggctgttaagaattgtaaacctagagtgccccctgcaaccgcttttgagggccacatgctgcttagcgggctcgaaccctttcgtattggaccctatactaatttcgtcaacattggtgagaggtgcaatgttgccgggtcccgcaagttcgctaagttaatcatggctggcaactatgaggaagccctgtgcgtggctaaagtgcaagtggagatgggagcacaggtcctagacgttaacatggatgacggtatgctcgatgggccttccgccatgacacgcttctgcaatctcatcgccagcgaaccagatattgccaaggtccccttatgtattgacagctccaacttcgccgtcatagaggccggacttaagtgctgtcaagggaagtgcatcgttaatagtatatcgttgaaagaaggggaggacgacttcctggagaaggcaagaaagattaagaagtacggcgccgcgatggtggtaatggcctttgacgaagaaggccaggctacagaaacggacacaaagatccgggtgtgtactagagcctaccatctgctcgtcaaaaagctgggatttaaccccaatgacattatttttgaccctaatattttgactattggcactggcatggaggaacacaacctatatgccatcaacttcatccacgccacaaaggtgattaaagagacacttccaggcgctcgcatctctggtggcctcagtaacttgtcctttagcttcagaggcatggaagccattagagaggctatgcacggcgtcttcctataccacgcaataaagagtggaatggatatggggattgtgaacgccggaaatttgcctgtatatgacgacatacataaagagcttttacagttatgtgaggacctaatttggaacaaagatcctgaagctactgaaaagctcctgagatatgcccagacacagggtacagggggcaagaaggttattcaaactgacgagtggcgcaacggcccagtggaggaaaggctcgaatacgctctggtgaaggtaataaagtcagcacgcgttatgaagaaggctgtcggtcacctgatcccgtttatggaaaaggagcgcgaggaaacaagagtgcttaatggcactgtggaggaagaagatccataccagggcaccattgtgctcgcaaccgtgaaaggagacgtccacgacattggaaaaaacatcgtgggggtggtgctggggtgtaacaatttccgggtgattgacctgggagttatgaccccttgcgacaagattctgaaggccgctctggaccataaggcggacataattggactgtctggcctcatcacgccatcactcgacgagatgattttcgtggccaaggaaatggagagactggcaattcggatcccccttcttatcggcggagcaactacatccaagactcacactgcagtgaaaattgcccctaggtactccgctccggtgatccatgttcttgatgctagcaagagtgttgtagtgtgcagtcaacttctggatgagaatctgaaggacgaatattttgaggagattatggaagagtatgaggatattcgacaggatcactacgagagcctaaaggaacgtcgctacttacctctgtcacaggccagaaagtctgggtttcagatggactggttgtctgagccccacccagtgaaacctactttcattggaacgcaggttttcgaggactatgacctgcagaagcttgtcgactacatcgattggaagccctttttcgatgtttggcaattacgggggaaatatcccaatcgaggctttcccaaaatttttaacgacaaaacggtgggcggggaagccagaaaagtctacgatgatgcgcataatatgctcaacacgttaatatcccagaaaaaacttcgcgcgagaggcgtggttggattctggccagctcagagcattcaggatgatatccatctgtacgccgaggctgctgtacctcaggccgccgaaccaatagctaccttctatggactgcgtcaacaagcagagaaggacagtgcttccactgaaccgtactactgcttgtcagattttattgcaccgctacacagcggaatccgagattatttagggttgtttgcagtggcttgtttcggcgtggaggagctttctaaagcatatgaagatgatggggatgattactcctccattatggtgaaagccttaggcgatcgtttggcggaagccttcgctgaggaactccacgaacgggtgcggcgcgagctgtgggcttactgcggcagcgaacagcttgatgtcgccgaccttcggcgtcttcgctataagggaatacgacccgcccctggctacccttcacaaccagaccataccgagaaactgactatgtggagattagctgacatcgagcagtctacggggatccggctcactgagtccctcgctatggccccagcctcagccgtcagcgggctgtatttctctaatctcaaatccaagtattttgcagtagggaagatatctaaagaccaggtggaggactatgccctccgaaaaaatatcagtgtcgcggaggtggagaagtggcttggcccaattctgggatatgataccgattag

SEQ ID NO: 106595 - DNA, 2178 bp, synthetic construct
  misc_feature 1..2178: note = Description of Artificial Sequence: Synthetic coding sequence
  source 1..2178: mol_type = other DNA
atgggtgccgcctcagtacgggccggcgcccgacttgtcgaggtggcattgtgttccttcacagttacttgcctggaagttatgagaagattccttctcctctatgcaacgcaacaggggcaggcaaaggcaatagctgaggagatttgtgagcaggccgttgtgcacgggttctctgcggatttacattgtataagtgagagtgacaagtacgatctcaagaccgagacagccccactcgtggtcgttgtaagtacaacaggcaccggagacccgcctgataccgcacgcaagttcgttaaggaaatacagaatcagactctgccggtagatttctttgcccatctacggtacggattgttgggcctaggcgattctgagtatacatacttctgcaacggtggaaagattatcgataagaggctgcaggagctgggtgcgcgacatttttacgacacgggccacgcagacgattgtgttgggcttgaattggtggtggaaccgtggattgcagggttatggcccgctctaagaaaacacttcaggagttctcgagggcaggaggagatctccggggcattgcccgtggcctcccctgcctcctctaggaccgatctggtcaagtccgagctgctccatatcgagtctcaagttgagttgttgaggtttgacgattctggacgaaaggatagcgaggtgttgaagcaaaacgccgtcaatagtaaccagagcaacgtggtcatcgaggattttgagtcttctctgacgagatcggtgccaccattgtctcaggctagtctgaacattcccggcctccctccagaatatctacaggtgcaccttcaggagtccctgggacaggaggagtcccaggtctctgtaacttcggccgatcctgtgtttcaggtccccatcagcaaagccgtgcaactcacaactaatgatgcaattaagactactttattagttgaactggacatctcaaatacagacttttcataccagcctggggatgcctttagcgtgatctgtccaaattctgattcagaggtccagagtctgctgcagagacttcagcttgaggataaacgagagcactgtgtgctgcttaagattaaggccgacaccaagaaaaaaggtgcaacactgcctcagcacatacctgcggggtgctccctccaattcatctttacatggtgtctggaaattcgagctattccaaagaaggcttttctgagagccctggtggattatacctccgatagcgccgagaagagaagacttcaggaattgtgtagtaaacagggtgcagcggattactctcgatttgtgcgggatgcttgtgcatgtctgttggatttgctacttgcttttcctagttgtcaaccaccgctttcacttctcctggagcatctgcccaagctgcaacctcggccgtatagttgtgcaagcagtagcctattccaccccggcaagctccacttcgttttcaacattgtcgagttcctgtccaccgccaccaccgaagttctaagaaaaggagtttgtactggatggctggctttactagttgcttcagtacttcagccaaatatccatgccagtcacgaagacagcggcaaggcactcgccccaaagatctctatcagtcctagaactacgaactctttccacttacccgacgacccctccatcccgataataatggtggggcccggaacaggcattgccccattcattggttttctccagcatagagagaagctacaggagcagcatcctgatggaaatttcggcgcaatgtggctctttttcgggtgtcgccataaagaccgagattatctcttccgtaaggagctgcgccattttctgaaacatggtattctcacccatctgaaggtttctttcagccgcgacgcaccagtcggagaagaagaagcaccagctaagtacgtgcaggataacattcagctccatggccagcaggtggccagaatcctactacaggaaaacggtcacatctacgtttgtggtgatgctaagaacatggcgaaggacgtccatgatgcactggtgcaaatcatctcaaaagaagtcggtgtagagaagttagaagcgatgaaaaccctggcaactctcaaagaggaaaagcggtacctccaggacatttggtcatag

SEQ ID NO: 106596 - DNA, 177 bp, synthetic construct
  misc_feature 1..177: note = Description of Artificial Sequence: Synthetic coding sequence
  source 1..177: mol_type = other DNA
atgcggcgattcctgctcctttatgccacgcaacagggacaggctaaggctattgccgaagagatctgtgaacaggccgtggtgcacggtttttctgccgacctccactgcattagtgaatctgataaagtttcggttattcagaacacaccgacttttgcgatgggcggaaggtag

SEQ ID NO: 106597 - DNA, 2097 bp, synthetic construct
  misc_feature 1..2097: note = Description of Artificial Sequence: Synthetic coding sequence
  source 1..2097: mol_type = other DNA
atgcggagatttctgcttctgtacgccacccagcaagggcaggctaaggctatcgctgaagagatctgtgagcaggccgttgtgcatgggttctccgcggatctgcattgcatctcagagagtgataaatatgacctcaaaaccgaaaccgcgccactggttgtggtcgttagcaccaccggtaccggcgacccccctgacaccgctagaaagtttgttaaggaaattcagaatcagacactgccggttgactttttcgcacacctgcgctatgggttgctgggcttaggcgatagcgagtacacttacttctgtaatggaggtaaaattattgacaaaaggctgcaggaactgggtgcccggcacttttatgataccggacacgccgacgactgtgtgggcctggaacttgtggtggagccctggatcgcgggactgtggcccgcgcttaggaagcacttccgctcttcccggggacaggaggagattagtggtgcccttcctgttgcttccccagcgtcctcccgtaccgaccttgtaaagagtgaactgctacacatcgagtcacaggtagagcttctgcgattcgacgatagcggtaggaaggactctgaggtactgaagcagaatgccgtaaactctaaccagtccaacgtggtgatcgaagattttgagagttctctcacgaggagtgtccctcccctgtctcaggcctcacttaacatcccaggcctcccgcctgagtatttacaagtgcacctgcaggagagtcttggccaagaggagagccaggtctccgtcacctctgcagatccggttttccaggtgcccattagcaaagccgtgcagctgacaacgaacgatgccataaagacaactctgcttgtggaattggatatctcaaacaccgacttcagttaccagccaggcgatgcgttctcggtcatatgtccaaatagcgattcagaagtgcagagtcttctgcaaaggctgcagctcgaggacaagcgggagcattgtgtgttacttaagattaaggctgatacgaagaaaaaaggtgctactttaccccagcatattcctgctggctgctcacttcaattcatcttcacctggtgtttagaaatcagggctatccccaaaaaagcatttctgcgggctctggtcgactacaccagcgatagcgccgagaaacggagactgcaagagctttgcagtaaacagggcgcagcagattactctagattcgttcgggacgcgtgtgcctgtctcctggacttattgttggcttttccctcttgccagccaccgcttagtctgcttctggaacacttgcccaagctccagccacgcccctattcctgtgcgagctcctcactgtttcaccccggaaagctacacttcgtgttcaatattgtggagtttctcagtacagcgaccacggaagtcttgcggaaaggagtgtgtactggatggcttgctcttcttgtggctagcgtgttgcagcctaatattcatgcctcccatgaagactcaggaaaagcgctcgcccctaagatctccattagcccaaggacgacaaatagcttccacctgccggacgaccccagtatccccatcatcatggtgggacctgggactggcatcgctcctttcattgggtttttgcagcatagagagaaactgcaggaacagcatccagacggaaatttcggcgccatgtggcttttctttgggtgcagacataaagaccgggattatctgttcagaaaggagctgcggcactttcttaagcacgggatcctcacacaccttaaggtgtccttctcgcgcgatgcccccgttggcgaggaagaagccccagctaaatatgtccaggacaacatccaactccacggtcagcaggtggcgaggatactcctgcaggagaacggacacatatacgtatgcggagatgcgaaaaacatggctaaagacgtgcatgatgcactcgtgcaaatcatttcaaaggaagtaggagttgaaaaattagaagctatgaagacactcgcgaccctgaaagaggagaagcggtacttgcaggatatatggagctag

SEQ ID NO: 106598 - DNA, 471 bp, synthetic construct
  misc_feature 1..471: note = Description of Artificial Sequence: Synthetic coding sequence
  source 1..471: mol_type = other DNA
atgaggcggttcctccttttatacgcaacacaacagggccaggccaaagcaatagcagaggaaatctgcgaacaggcagtcgtgcatggattctccgccgatttacattgcatatcagaatctgacaaatacgatttaaaaacggaaacagcccccttggtggtcgttgtttcgaccactgggaccggggacccgcctgatacagccagaaaatttgttaaagaaattcagaaccagacattgcccgtggacttcttcgcacacctacggtatggcctgctggggctgggtgattcagagtatacttatttctgcaacggtggcaagattatagacaagcggctccaggaactaggagctcggcacttctacgacaccgggcacgctgatgattgtgtcggcctagaattagttgtggagccgtggatcgctgggctctggccagctttgcgaaaacatttccgaagctag

SEQ ID NO: 106599 - DNA, 126 bp, synthetic construct
  misc_feature 1..126: note = Description of Artificial Sequence: Synthetic coding sequence
  source 1..126: mol_type = other DNA
atgagaaggttcctgttactctacgctacccaacagggacaggcaaaggctatcgcagaggagatttgcgaacaggctgttgtgcacggcttctccgcagatctgcactgtataagcgaatcgtag

SEQ ID NO: 106600 - DNA, 339 bp, synthetic construct
  misc_feature 1..339: note = Description of Artificial Sequence: Synthetic coding sequence
  source 1..339: mol_type = other DNA
atgcgaagattcctcttgctctatgcaacacaacaggggcaagccaaggcaatagctgaagagatttgtgaacaggctgtcgtccacgggttcagtgcagacttacactgcatttcagagtccgacaagtatgaccttaagaccgagactgcccccttagtggttgtagtctcgactacaggcactggggacccacccgataccgctaggaaatttgtcaaagagattcagaaccagaccctgcctgtcgacttctttgcccacctgcgttatggtctcttgggccttggagattcagagtatacgtatttctgcaacgggggaaagataattgattag

SEQ ID NO: 106601 - DNA, 249 bp, synthetic construct
  misc_feature 1..249: note = Description of Artificial Sequence: Synthetic coding sequence
  source 1..249: mol_type = other DNA
atgctgtgggatccggccttgccgcgcttagctgtgtacgccagctgtctgttcttttcctgcttggacgcccatgagggcccagttcacgggccaagaggtcgcggtgagggcggtcgagggtccgaacgacaaagagtgagaccgggcggagggggcggtgccgggtctgtgcacattcaccttgaggaagaggatggcgctgaggatcaagaccacagagatgaagactggataactaagaagtag

SEQ ID NO: 106602 - DNA, 1647 bp, synthetic construct
  misc_feature 1..1647: note = Description of Artificial Sequence: Synthetic coding sequence
  source 1..1647: mol_type = other DNA
atgacaatggccgccgcggctgtcgtggcccggggtgccggagcgagggcggctaccgctgccgccctgcgtgggggatgcgggactgccgccagaggaaggccatgtgctggacccgcccggcctctctgtaccgcacctggcacggccccagatatgaaacgctacttatgggaacggtaccgcgaggccaaacgttccacggaggaactagtcccctccatcatgtccaatctgcttaacccggatgcaatcttctccaacaacgagatgtctctctctgatattgaaatttacggattcgattacgattacactctggtcttctactcaaaacacctgcacacattgattttcaatgcagctcgagacctgctcatcaatgaacatcgttacccagctgaaataaggaaatatgagtatgaccccaactttgccattcgcggtctccactatgacgttcagagggcggtgttgatgaagattgatgctttccactacattcagctgggcactgtgtacaggggattgagtgtagtcccagatgaagaggtcatagaaatgtatgaggggtcacacgtccctttagaacagatgagcgacttctatggcaagagttcacacggaaacactatgaaacagtttatggatattttctcgctaccagagatgactttgctcagctgtgtgaatgagtatttcctcaagaacaatatcgattacgagcccgtacatctctataaggacgtgaaagacagcattagagacgttcatatcaaagggattatgtaccgggctattgaagcagatattgagaagtatatctgctacgccgagcaaacaagagcagttcttgctaagctggctgaccatggtaagaagatgttcctgatcacaaactcaccatcatcatttgtggacaaagggatgtcgtatattgtcgggaaggactggagagatctttttgacgtggttattgtgcaagcagagaagcccaattttttcaacgataaacgcaggccatttcgtaagatgaatgaaaaaggcgtgctgctctgggataaaatccataagctccaaaagggccagatttataagcagggcaacctgtacgagttcctcaagctcacaggttggagggggagcagggtcctttacttcggcgaccacatctacagtgacctcgctgatctgaccctcaagcatggctggcgcacgggagccataatccctgaacttcggagcgaactgaaaataatgaacactgaacagtatatccagacaatgacttggttacagacactaacaggcctcctagaacagatgcaggtccatcgcgacgccgagagtcaactggtgctgcaggaatggaaaaaagaaagaaaggagatgcgagagatgactaagtcctttttcaatgcccaatttggcagcctctttcggacagatcagaaccccacatacttcctaaggcgtctatcccgcttcgccgacatctacatggctagtttgagctgtttgcttaactacgacgtgagccacaccttctacccaaggcgaacccccctgcagcatgagctgcctgcatggagtgagagacctcctacctttggaacccctttgctccaggaagcccaggcgaagtag

SEQ ID NO: 106603 - DNA, 1686 bp, synthetic construct
  misc_feature 1..1686: note = Description of Artificial Sequence: Synthetic coding sequence
  source 1..1686: mol_type = other DNA
atgtctacttcatggtcggaccgccttcagaatgcagccgatatgcccgccaatatggataagcacgctctgaagaagtaccgccgcgaagcctaccatagagtgtttgtgaaccggagcctggctatggagaagataaaatgtttcggctttgacatggactacacgctggccgtatacaaatccccagagtacgagtcgctagggttcgagctgacagtggaacgcctggtgagtattggttatccccaggagctcctctcttttgcgtacgactcaacgtttccaacaagaggactagtgtttgataccttatacggcaatctgttaaaagtggacgcctatggtaacctgctggtttgcgcccacggcttcaattttataagaggcccagaaaccagagaacaatatcccaacaaattcatacagcgggacgacactgaacgattctacatactgaacactttattcaacttgcctgaaacctacttgctcgcgtgcctcgtggatttcttcactaactgtcccaggtacactagttgtgagaccggctttaaagacggggatctcttcatgagctacaggtccatgttccaggacgtcagagacgccgtggattgggtacactataagggcagcctcaaggagaaaaccgtagagaatctcgaaaaatatgttgtcaaggatggcaaactgcctctcctactctccagaatgaaggaggttgggaaagtctttctcgccaccaattccgactataagtacaccgacaagattatgacctacctattcgattttccccacggaccgaagccaggaagcagtcaccgcccctggcagtcttacttcgacctaatcctggtagatgctcgcaaacctctgttttttggcgaaggaacggtacttagacaggtagacacaaagactggtaaactgaaaattggcacatacaccggcccactgcaacacggaattgtctactccgggggttctagcgatactatttgtgacctcttgggagctaaagggaaagatattctctatatcggcgatcatatttttggggacatactcaagtccaaaaagcgccagggttggcggaccttcttggtgatcccggagctcgcgcaggagctgcacgtgtggaccgataagagctcgctatttgaggagctgcagtcactggatattttccttgctgaactatataagcatttagatagttcatctaacgaaagaccggatatctcttctatccagagacggatcaaaaaggtgacccatgatatggacatgtgctatggcatgatggggtccctgttcagatcagggtctagacagaccttatttgcctcccaggtcatgcgctatgctgacctctacgctgcctcctttatcaatctgctgtattatcccttctcttacctgtttagggctgcccatgttctgatgccacacgaatcgactgtggaacatacacacgttgacatcaacgaaatggaaagccccctggccacccggaaccgtacgtctgtggactttaaagatacggactacaagagacaccagttgaccagaagtatctccgagattaagcctcctaacctcttccccctggctcctcaggaaatcactcactgccacgatgaagacgatgacgaggaggaagaggaagaggaggagtag

SEQ ID NO: 106604 - DNA, 600 bp, synthetic construct
  misc_feature 1..600: note = Description of Artificial Sequence: Synthetic coding sequence
  source 1..600: mol_type = other DNA
atggactacaccttggccgtgtacaaatcaccggagtacgaaagcctcggctttgagctgaccgtggagcgtctggtgagcattggttatccccaggagctgttgagcttcgcatatgactctacgtttcccacaaggggcctggtctttgatacattgtacggaaatttgttgaaggtcgacgcctacggaaacctgcttgtctgcgcgcacggattcaacttcatccgcgggtcccaagttgccgtgcaaaaaagacccgaaacccgcgaacagtatccgaataagtttatccagcgggatgataccgagaggttttatatcctgaacacactttttaatctgccagagacttatctccttgcctgtctggtagattttttcacgaattgcccacgctacacgtcctgtgaaactgggttcaaagacggggacttgtttatgtcttatagatccatgtttcaggatgtcagggatgccgttgattgggtgcactataaaggctctcttaaggagaaaactgttgagaacctggaaaagtatgtcgttaaggatagcaaaagttcacgtattcagtactttctgaaagtgctatggtag

SEQ ID NO: 106605 - DNA, 1686 bp, synthetic construct
  misc_feature 1..1686: note = Description of Artificial Sequence: Synthetic coding sequence
  source 1..1686: mol_type = other DNA
atgagcacctcctggagtgacagattacagaacgcagccgacatgccagccaacatggacaagcacgcactcaaaaagtacagacgggaagcctaccaccgcgtctttgtcaatagatctctggccatggaaaagatcaaatgcttcggtttcgatatggactacacactagccgtttacaaatcgccagagtatgaatctcttgggttcgaactcacagtggagcggctggtgtcgattggctatccgcaggagttgctcagctttgcctacgacagtacattccccactaggggcctggtcttcgacactctgtacgggaacctcctaaaagtcgatgcttacggcaatctccttgtctgcgcccatggattcaatttcataagggggcctgaaacccgtgagcagtaccctaacaagtttatacagagagacgatactgaacgcttttacatcctaaatacactgtttaatctgcccgagacatatctcttagcctgtctggtagatttctttacaaactgtccccgatatacttcctgcgagaccggcttcaaggacggagacctgttcatgtcataccgttcgatgtttcaggatgtgcgagatgctgtcgattgggttcactacaaaggatcattgaaagagaagaccgtagaaaacctggagaaatatgtcgtaaaagacggaaagcttcccctgctgctttcccggatgaaagaggtggggaaggtctttctggctaccaatagtgactataagtatacagataaaattatgacctacctgttcgacttcccacatggtcccaagcccggctcatcacacaggccttggcagtcatactttgacctgatcctggtggacgcacgaaaaccactgtttttcggtgagggcaccgtgttaaggcaggtagacactaagactggtaaactgaagatcggaacgtacacaggtcccctgcagcacggaatcgtatactctggtggatcaagcgacaccatctgtgacctcctgggagctaagggaaaggatatactatatatcggtgaccacatttttggcgacatcctgaagagcaagaagcggcagggctggagaaccttccttgttataccggagctcgcccaggaactgcacgtctggacagataagtcttcactctttgaggaattgcagtccttagatatattcctggctgaactatataaacatctggattcttctagcaacgagcgcccagacatatctagcatccaaaggcggatcaaaaaagttacacatgatatggacatgtgttatggcatgatgggctccctattccggagcggctccaggcagaccttgttcgcttctcaggtgatgaggtatgccgatctttacgcagcgagtttcattaatctgttgtactatcccttctcctatctgtttcgcgcagcccacgtgctgatgccacacgaaagcacggtcgaacacactcatgtagatatcaacgagatggagagtcctctcgccacgcgtaatcgtacgagtgtggactttaaagacacagactacaaacgacaccagctgaccaggtctatcagcgaaattaagccccccaacctctttccacttgcacctcaggagatcacgcattgtcatgacgaagacgatgacgaagaggaggaagaagaggaagaatag

SEQ ID NO: 106606 - DNA, 444 bp, synthetic construct
  misc_feature 1..444: note = Description of Artificial Sequence: Synthetic coding sequence
  source 1..444: mol_type = other DNA
gtgctgcgacaggtagacactaagaccggcaaactaaagataggcacctacacaggcccactgcagcacgggatcgtttacagtgggggctcctccgacacaatctgtgacttgctgggggcaaaaggcaaggatatcttatacatcggggaccatattttcggggatattctgaagtctaagaaaaggcagggctggcgcactttcttggtaattcccgagctcgcccaggagctgcatgtatggacggataaaagttctctctttgaggaactgcaaagcttggacattttcctggccgaactgtacaaacacctagattcatcatcgaatgagaggccagatatctcctccattcagaggcgaatcaagatgcctcacgaatcaactgtggaacatacccatgtggatatcaacgagatggagagccccctggcaacgtag

SEQ ID NO: 106607 - DNA, 1599 bp, synthetic construct
  misc_feature 1..1599: note = Description of Artificial Sequence: Synthetic coding sequence
  source 1..1599: mol_type = other DNA
atgtctaaggagggggtgttcgtgaaccggtctctggcaatggagaaaattaaatgcttcggcttcgacatggactacacgctcgccgtgtacaagtcacccgaatatgagagtcttggattcgagctgaccgtcgaacggttagtgtctatcgggtacccacaggagctgctgagttttgcctatgacagtacgtttccaaccagaggcttggtgtttgacacactttatggtaatctcctgaaagtggatgcatatggtaacttactagtatgtgctcatggttttaactttatcagaggacctgaaactcgggagcagtaccctaacaaattcatacagcgcgacgatacagagagattttacatcctgaacacgttgtttaacctgcccgagacatatttactggcttgcctagttgatttttttacaaactgcccacgatataccagctgtgaaaccggctttaaggatggcgacctgtttatgtcctacaggtccatgttccaggacgtgagagacgcggttgactgggtccactacaaggggagcctgaaggagaagaccgtggaaaatttagagaagtacgtcgttaaggacgggaaattgcctctgctgctttcccgcatgaaagaagtcggaaaagtgtttctggctacaaactccgactacaagtataccgacaaaataatgacttatctgtttgatttccctcatggcccaaagccagggagctcgcaccggccttggcaaagctatttcgatttaatactggtggacgcaaggaaaccgctgttttttggtgaagggacggtcctccggcaggtggacacgaaaactggcaagctgaaaattggcacctacactggccctctgcagcacggcatcgtgtacagtggcggaagcagcgatacgatttgtgatctgctgggtgctaaagggaaagatatactttatatcggtgatcatatcttcggcgacattctcaagagcaagaagaggcagggatggagaacctttctggtgatcccagaactggctcaagaattacacgtgtggacagacaagtcgtctctgtttgaagaattgcagagtttagatatatttttagccgaactctacaaacatctggattcctcttccaatgaacggcccgatatcagcagcattcaacgacggataaagaaagtgacacacgatatggatatgtgttatggtatgatgggatcactttttaggtcaggcagtcgtcagacactgttcgcgagccaagtgatgaggtatgcggatctgtacgctgcttccttcatcaacttgctctactatcctttcagttatctgtttagggctgcacatgtccttatgccacatgagtccactgtggaacatacacatgttgacatcaacgagatggaatcccctctggccacccgcaaccggacatccgtcgacttcaaagacaccgactataaaagacatcagcttacccggtccatatctgaaattaagccccctaatctgttccccctggcgccacaagagattacccactgtcacgatgaagacgacgacgaagaagaggaggaagaggaagaatag

SEQ ID NO: 106608 - DNA, 798 bp, synthetic construct
  misc_feature 1..798: note = Description of Artificial Sequence: Synthetic coding sequence
  source 1..798: mol_type = other DNA
atgtccacctcctggagcgaccggttgcagaacgccgcagacatgcccgccaacatggacaaacatgccctaaagaaatacagaagagaggcctatcatcgcgtcttcgtgaaccggtctctcgcaatggagaagattaagtgttttggctttgacatggactacacccttgcagtgtacaagtcacccgagtacgagagccttggttttgaattgactgtggaacgcctggtttcgatcggatacccacaggagctcctcagtttcgcctatgacagtacattccccacccgcggcttggtgtttgacacactgtatggaaacttgttgaaggtggacgcctatgggaatctcctggtctgcgcacacggatttaactttattcggggatctcaggttgcagtccaaaagcgacctgagacaagggaacagtatcccaacaagttcatccaacgtgacgatacagagcgcttctacatactcaatacactgtttaacctgccggagacctatctgttggcctgtctcgttgactttttcaccaattgcccaagatatacaagctgcgaaacagggttcaaggatggggacctgttcatgagttaccgatctatgttccaagatgtgagagacgccgttgactgggtacactacaagggatccctcaaagaaaaaaccgtcgaaaacttggaaaagtatgttgtcaaagatggcaaactgccacttctgctcagtcgtatgaaagaggtgggcaaggtgtttctggcaacgaatagcgattataaatacaccgattag

SEQ ID NO: 106609 - DNA, 525 bp, synthetic construct
  misc_feature 1..525: note = Description of Artificial Sequence: Synthetic coding sequence
  source 1..525: mol_type = other DNA
gtgtcaatcgggtacccccaggagctgctgtccttcgcttacgactccacctttccaacacgaggtctggtgtttgatacactctatggcaatctccttaaggtggatgcctacggaaatctgcttgtgtgcgcgcacggctttaatttcatccggggttcccaggtcgctgtgcaaaaacgaccagagacgagggaacaatatccaaataagtttatccagagagacgatacagagcgattttacatccttaacaccttatttaacttacccgagacctacctgctagcttgtctggtcgactttttcactaattgtccccgttacacatcatgcgaaaccgggttcaaggacggggacctctttatgagttacaggagcatgttccaggatgtgagagacgccgtggactgggtgcattacaaggggtctctgaaagagaaaacagtcgaaaaccttgagaagtacgtggtgaaggatagtaaaagtagccggatccaatactttctgaaggtgttgtggtag

SEQ ID NO: 106610 - DNA, 1011 bp, synthetic construct
  misc_feature 1..1011: note = Description of Artificial Sequence: Synthetic coding sequence
  source 1..1011: mol_type = other DNA
atgcgcgctccatccatggaccgcgccgccgtggcacgagttggtgctgttgcttcagcaagcgtctgcgctcttgttgcgggggttgtccttgctcaatacatttttacccttaagcggaaaacaggccggaaaaccaaaatcatcgaaatgatgcctgaattccagaagtcttcagtcagaattaagaatccaacaagggttgaggaaattatttgtggcctgataaaggggggcgccgccaaactccagatcattacagatttcgacatgactctgtctagattcagctataaaggaaagcgctgtccgacatgtcacaacatcatagataattgcaaactcgttacagatgagtgccggaaaaagcttttgcaactaaaagagaaatactatgccatagaggttgacccagtgctgacagttgaggaaaaatacccttatatggtggaatggtatactaaaagccacgggctgctggtgcaacaggcacttcctaaggccaagctcaaggagatcgtcgctgagtctgacgtgatgctcaaagaaggatatgagaacttttttgacaaactacagcagcactcaattcccgtgtttattttctccgctggaatcggtgatgtacttgaagaagtaattcgtcaggccggagtctatcaccctaacgtaaaagttgtctcgaacttcatggatttcgatgagacgggggtcctgaaaggatttaagggcgagctcatccacgtgttcaacaagcatgatggcgctttacgcaacactgaatatttcaatcagctcaaagataatagcaacattattctgcttggcgactctcagggggacctgcgtatggctgacggagtggcgaatgtggagcatatccttaagatcgggtatctgaacgaccgggtggatgaactcctggagaagtacatggacagctatgacatagtcctcgtccaggatgaatccctcgaagtagccaattctattttgcaaaaaatattgtag

SEQ ID NO: 106611 - DNA, 858 bp, synthetic construct
  misc_feature 1..858: note = Description of Artificial Sequence: Synthetic coding sequence
  source 1..858: mol_type = other DNA
atgccggagtttcagaagtcttccgtgcggatcaaaaatcccacaagggtggaggagatcatttgcggcctgattaagggaggcgctgccaagttgcagattatcaccgattttgatatgaccttaagtagattcagctataaaggtaagaggtgtccgacttgccacaatataattgacaattgcaaacttgtgacagatgagtgccgcaaaaagcttctccagcttaaagagaaatattacgccattgaagtagacccagtcctcacagtagaggaaaaatatccatacatggtggagtggtacactaagagccacggcttactagtacagcaggctcttcccaaagctaagctcaaagagatcgtggcagaaagcgatgtaatgctgaaggagggatacgaaaatttctttgacaaactccaacagcactccatccccgtattcatcttcagcgccggaattggagatgtcctcgaggaagtgataaggcaggcgggagtgtatcaccctaatgttaaggtggtatcgaactttatggatttcgatgagacaggcgtgttgaaaggcttcaagggggagctgattcacgtgttcaataagcacgatggggcgctgcgtaacacggagtacttcaatcaactcaaggacaactccaatataatcttgctgggggactcccaaggggacttgaggatggccgatggcgttgctaacgttgagcatatcctgaagatcggctacttgaacgaccgcgtagacgagcttctagagaagtatatggactcttacgacatcgtccttgtccaggatgagagtttggaagtggctaatagcatactgcagaaaattctgtag

SEQ ID NO: 106612 - DNA, 894 bp, synthetic construct
  misc_feature 1..894: note = Description of Artificial Sequence: Synthetic coding sequence
  source 1..894: mol_type = other DNA
atgactaaccaggaaagcgctgttcacgtgaagatgatgcccgagtttcaaaaatccagcgtcaggatcaaaaaccccacccgagtggaagagatcatatgcggtctcattaagggtggtgcggcaaaacttcagatcataacggatttcgatatgaccttgtccagatttagttataagggcaaacgatgcccgacctgtcataatataatcgacaactgtaagttggtcaccgacgagtgccgaaaaaagctgctccagctaaaggaaaaatactacgctatcgaagtagatccagtactcactgtggaagagaagtacccttacatggtggaatggtacacaaaaagccacggcctgctcgttcagcaggcccttccgaaggcaaagttaaaagaaatagtggccgagtcagatgtgatgttaaaggaagggtacgagaacttcttcgacaaactgcagcagcatagtatacccgtttttatcttctcagcagggattggcgacgtgcttgaggaggtaatccgccaggccggggtgtatcatcccaacgtcaaggttgtaagcaacttcatggactttgacgaaactggtgtattgaaaggcttcaaaggagagctgatacacgtctttaacaagcatgatggcgccttgcggaacacagagtacttcaatcagctgaaagacaacagcaatatcatcctacttggagacagccagggcgaccttcgtatggctgatggcgtggccaatgttgaacacattctgaagatcggctacctgaatgacagggtcgacgaactgttggaaaagtatatggactcttatgacattgtcctggtacaggatgaatccttggaagtggcaaactcaatcctgcaaaaaatcttgtag

SEQ ID NO: 106613 - DNA, 894 bp, synthetic construct
  misc_feature 1..894: note = Description of Artificial Sequence: Synthetic coding sequence
  source 1..894: mol_type = other DNA
atgaccaaccaggagtcagctgtgcatgtgaagatgatgccagaatttcagaagtcatctgtaagaatcaaaaaccccacgcgcgtggaggaaatcatttgcgggcttattaagggtggcgcagctaagttgcagattatcacggacttcgacatgaccttgagcaggttttcatacaaaggtaaacgttgcccaacctgccacaatattatcgataactgcaaattggtgacggacgagtgccgcaaaaagttgctgcagctcaaggagaaatattatgccatcgaagtggatcccgtcctcacagttgaggagaaatatccatacatggttgagtggtacacgaagtctcacggtttgctcgtgcagcaggctcttcccaaggctaaactgaaggaaatcgtggctgagtccgacgtgatgctgaaagagggttatgaaaatttttttgacaaactacaacaacattcaattcctgtatttatattttcagccgggatcggggatgtgctagaggaggtaattcgacaagcgggtgtctaccatcctaacgtgaaggttgtgtctaacttcatggacttcgatgagaccggagtgctgaagggattcaaaggagagttgattcatgtgttcaataaacacgatggggccctgcggaatactgagtattttaatcagctcaaggataacagtaacatcatcctcttgggagactcgcaaggagaccttaggatggcagatggcgtggctaacgtcgagcatattctgaagattggttacctgaacgatcgggtggatgagcttctggagaaatatatggactcctacgacattgtgctggtgcaggacgagagcctggaagtggctaattccattctgcaaaagatactttag

SEQ ID NO: 106614 - DNA, 858 bp, synthetic construct
  misc_feature 1..858: note = Description of Artificial Sequence: Synthetic coding sequence
  source 1..858: mol_type = other DNA
atgcccgaattccaaaagtcatccgtgagaattaagaatcctacccgggtcgaggagatcatttgcggcctgataaaggggggggcagccaaactccaaattatcaccgatttcgacatgactctttctcgattttcttacaaagggaagcgctgccccacctgccataacatcattgataactgtaaactggtcaccgacgagtgccgcaagaagctgttacagctgaaagagaagtactatgcaattgaggttgatccagtgctcacagtcgaggagaaatacccttatatggttgagtggtacacgaaatctcatggtttactcgtgcagcaagcgttgccgaaagcgaaattaaaagagattgtcgcagaatctgacgttatgttgaaggagggttacgagaactttttcgataaactgcagcaacatagcatccctgtatttatattctcggccgggattggtgatgtgctggaggaagtgattaggcaggctggagtgtatcacccaaacgtcaaagtggttagcaattttatggattttgacgaaaccggcgttctgaaaggcttcaagggtgaactgattcatgtgtttaacaaacatgacggcgcactgcgcaacactgagtacttcaatcagttaaaggacaattcaaatatcattctccttggtgactcccagggagatctcagaatggccgatggagtggcaaacgtcgaacacatcctaaagatcggatacctgaacgatcgggtggatgagttgctggaaaaatatatggattcttacgatattgtcttagtgcaggatgagtccttggaggtggccaatagcatccttcagaagatactctag

SEQ ID NO: 106615 - DNA, 129 bp, synthetic construct
  misc_feature 1..129: note = Description of Artificial Sequence: Synthetic coding sequence
  source 1..129: mol_type = other DNA
atgcccgagttccagaagtcctcggtacgaatcaagaaccctacccgggtggaagaaattatatgcgggctgataaaaggcggggctgctaaactgcagatcattacagattttgacatgactttgtag

SEQ ID NO: 106616 - DNA, 1725 bp, synthetic construct
  misc_feature 1..1725: note = Description of Artificial Sequence: Synthetic coding sequence
  source 1..1725: mol_type = other DNA
atgtgccctcgggccgcccgggctccggcaaccttgctcctggcgctgggtgcagtgctgtggcccgctgctggtgcatgggagctgactatcttacacaccaacgatgtgcacagcaggctggaacagacttccgaagattcttccaaatgcgtgaacgctagtaggtgcatgggaggcgttgctaggctgttcaccaaagttcagcagattcggcgggccgagcccaatgttctgctccttgatgcgggagaccagtaccagggtaccatttggttcaccgtatataaaggcgcggaggtcgcccattttatgaacgctttgaggtacgacgctatggcgctcgggaaccatgagttcgataacggagtggagggcctcatcgagccgttgctaaaggaagccaagttccccattttaagtgctaatatcaaagcgaagggccctcttgcaagccagatctctggtttatacttaccgtacaaagttctgccggtcggcgacgaggttgtggggatcgtggggtatacgagcaaggaaacccccttcctgtcaaaccctggaaccaatctggtcttcgaggacgaaatcacagcattgcagccagaagttgacaagttgaagacgctcaatgttaataaaataatagccttgggtcactctggattcgagatggataagctgatagcccagaaagtgagaggcgttgacgtggtggtaggagggcattcgaatactttcctgtacacgggaaaccctccctcgaaagaggtccctgctggcaagtaccccttcatcgtcacatctgacgatgggcggaaagttccggttgtgcaggcctacgcctttggaaagtacctgggatacctgaagattgaattcgatgagagaggaaatgtgatttcttctcacggcaatcctatcctactgaatagtagcatacccgaggacccctctatcaaggccgacattaataaatggcgcataaagctggataactatagtacccaggaactggggaagaccattgtctacttggatggatcgagtcagtcttgccgtttcagagaatgcaacatgggtaacctgatctgtgacgccatgattaataacaacttgaggcacacggatgaaatgttctggaatcatgtgagcatgtgcatactcaacggcggtgggatccgatctcccatcgatgaacgcaataatggcactattacctgggaaaatctggccgcggtattgcctttcggaggcacctttgatcttgttcagctgaagggcagcactttgaaaaaagcatttgaacatagtgtgcacaggtatggccagtctaccggggagttcctccaggtgggaggaattcatgtagtgtatgatctttctcgaaaaccaggcgaccgggtagtgaagttggatgttctgtgtacaaagtgtcgagtgccttcctatgatcccctcaagatggacgaggtgtataaggtaatcctgcccaacttcctggctaatggaggggatgggtttcagatgattaaagacgagctcctacgacacgattcaggtgatcaggatatcaacgtcgtttctacgtacatcagcaaaatgaaggtgatctatcccgccgtggaaggcaggatcaaattctcaactggatctcattgccacggctcttttagcttaatcttcctctctctttgggctgtcattttcgtactttatcaatag

SEQ ID NO: 106617 - DNA, 795 bp, synthetic construct
  misc_feature 1..795: note = Description of Artificial Sequence: Synthetic coding sequence
  source 1..795: mol_type = other DNA
atgtgcccaagagctgccagagcgcccgctactctcctgctggcgctgggtgcagtgctgtggccggccgccggcgcctgggaactcactatattgcacaccaatgacgtgcattcgcggctggagcagacgtcagaagacagttccaagtgtgtcaacgcaagccggtgcatggggggcgtggccagattattcacaaaagtccagcagatcaggagggcagagcccaatgtgctcttgttggacgctggcgatcagtaccagggaaccatctggttcacagtgtacaaaggagccgaggttgctcacttcatgaacgcacttcgctatgacgccatggctttgggaaatcatgaattcgataatggggtcgagggactgattgaacccctgctgaaggaggccaagtttccaatcttatccgctaatattaaggccaaggggcctctggcgtcgcagatcagcgggctgtaccttccctataaggtcctacccgtcggggacgaggtcgtcgggatcgttggctatacatcgaaagagacgccctttcttagtaacccaggtaccaacttagttttcgaggacgagataacagctttacagcccgaggttgataagctaaagaccctgaacgtgaataaaatcatcgctctcggccacagcggcttcgaaatggacaagttgatcgctcagaaggtgcggggggtcgatgtagtcgttggcggtcactctaacacattcttgtatacagggaactgctttaagcggattgcatgggcgcggatgtctcgctag

SEQ ID NO: 106618 - DNA, 780 bp, synthetic construct
  misc_feature 1..780: note = Description of Artificial Sequence: Synthetic coding sequence
  source 1..780: mol_type = other DNA
atggacaagctcattgctcaaaaagttcggggagtcgatgtggtggtcggcggacactccaacactttcctttataccggtaacccacctagtaaggaggtgcccgctggtaagtatcctttcatagtcactagcgatgacggccgcaaagtcccggtcgtgcaggcatacgccttcggcaaatacctgggctatcttaagattgaatttgatgagcgggggaatgtgatctcaagccacggtaatccaattctgttaaatagctccatacctgaagaccctagcatcaaggcagatattaataaatggagaattaagttagacaattactccacacaagagctaggaaaaactatagtgtacctcgacgggtccagtcagtcctgtaggttcagggaatgtaatatggggaacctcatctgcgatgctatgatcaataacaatttgagacacacagacgagatgttttggaaccatgtcagtatgtgcatcttaaacggaggtggaattaggagcccgatcgatgaaaggaataatgggaccattacatgggagaacttggcagctgttctgccgtttggaggcactttcgatctggttcagttaaaggggagcaccctgaaaaaagccttcgaacattctgtgcacagatatggccagagtacaggcgagttcctgcaggtcggagacttaaaagaatgttgccccatctgtatcaaccaggatgacagttggaaagaacagccaacagctcaaacatacttgaacacttggttctag

SEQ ID NO: 106619 - DNA, 1575 bp, synthetic construct
  misc_feature 1..1575: note = Description of Artificial Sequence: Synthetic coding sequence
  source 1..1575: mol_type = other DNA
atgtgcccgagggccgcccgcgctcccgccaccctgctgctcgctttgggcgcagtgttatggcctgccgcgggtgcctgggaactgacaatactccataccaatgacgtgcactcaaggttagagcagaccagtgaggactcctctaaatgtgtaaacgcctcccgttgtatgggcggcgtagccagactgttcaccaaggtacagcaaatcaggagggccgagcccaatgtgctgcttctggacgcaggcgaccagtaccagggcacgatctggtttacagtatacaagggggctgaagtggcgcattttatgaatgccctgcgatatgatgccatggcactcggcaaccacgagtttgataacggcgtggaaggactgattgagcccctgttgaaggaggccaagttccctattctctctgccaatattaaagctaagggtccactggccagccaaatttctggactgtaccttccttataaagtgctgccagtgggtgacgaggtggtggggattgttggctatacatcaaaggagaccccattcctctctaatccaggaaccaacctcgtcttcgaagatgaaatcactgcgcttcagccggaggtggataagctcaagacactgaatgtgaataaaataatcgccctgggccacagcggtttcgaaatggacaaactcattgcgcaaaaggtgcgaggggtagatgttgtcgtaggcggacattctaacaccttcttatatacggggaatcctccttctaaagaggtgcccgctggcaagtatcctttcattgttacaagcgacgacggcagaaaagtccccgtcgtacaagcctatgcattcggaaaatatctgggatacttaaaaatcgaattcgatgaaagaggaaatgtgatctcttcacacggtaatcctatactgttgaattcaagcattccagaggatccaagtataaaggccgacatcaacaagtggcgtatcaaacttgacaattactctacacaggagctggggaagactattgtttacctcgatggatcttcccaaagttgcagattccgcgagtgtaacatgggcaatctgatctgcgacgccatgataaacaataacttgcgacatacagatgaaatgttctggaatcacgtcagtatgtgtatcctcaatggcgggggtatccgaagcccaattgacgaacggaataacgggatacatgtggtctatgacctttcccgtaagcccggtgacagggtcgtgaaactcgacgtgttatgcactaagtgcagggtaccgtcctacgacccacttaagatggacgaagtctataaagtcatcttgcccaatttcctcgccaatgggggagatggctttcaaatgattaaagatgaactgctccgccatgactctggggatcaggacattaatgtggtcagcacatatatcagcaaaatgaaagtcatatatccggcagtggaaggtaggataaagtttagcacaggatctcactgtcacggctcatttagtctgatcttcctctctctgtgggcagtcatcttcgtcttgtatcagtag

SEQ ID NO: 106620 - DNA, 693 bp, synthetic construct
  misc_feature 1..693: note = Description of Artificial Sequence: Synthetic coding sequence
  source 1..693: mol_type = other DNA
taagacgtcgtggttggtggccactccaacacatttttgtataccggaaaccctccaagcaaagaagttcccgctggcaaatacccgtttatcgtaacctcagatgacggtaggaaggtgccagtcgtgcaagcctacgcttttggaaagtacttggggtatctaaaaatcgaattcgatgagagagggaacgtgataagtagtcacggcaaccccatactgctgaactcctctataccagaagacccatccatcaaggccgatatcaacaagtggagaataaaactggacaactattcaacccaggaacttggtaagacaatcgtatacttagatgggtctagtcagagttgtcggtttcgcgaatgtaatatggggaacttgatttgcgacgctatgataaacaataatctgcgacacaccgacgaaatgttttggaaccacgtttcaatgtgtatactcaacggaggaggcattcggagcccaatcgacgaacggaacaatggcatccatgtagtttatgatctgagtcggaagcctggagacagggtagtcaaactcgacgtgctgtgcaccaagtgtcgtgtgcctagttatgacccgttgaaaatggatgaggtgtataaggtgatcctgccaaatttcctcgctaatggcggggatggcttccaaatgataaaagacgaactatag

SEQ ID NO: 106621 - DNA, 540 bp, synthetic construct
  misc_feature 1..540: note = Description of Artificial Sequence: Synthetic coding sequence
  source 1..540: mol_type = other DNA
tgaaatcctattttgttgaacagcagtattcctgaagacccctctataaaggccgatattaacaagtggagaattaagttagacaattactccacacaggaattaggtaagacaattgtgtatctggatggttcaagtcagagttgtcgatttcgggagtgcaacatgggcaacctcatctgcgacgccatgatcaataacaatctccgtcacaccgatgaaatgttctggaaccacgtcagcatgtgtatcctgaacggcggcgggattaggagcccgatcgatgaaaggaataacggaacaattacctgggaaaacctcgccgccgtgctgccttttggagggacattcgacttggtacaactgaaaggatctactctgaaaaaggccttcgagcactccgtgcaccgatatgggcagtccactggagaattcctgcaagtgggggatttaaaagaatgctgtccaatctgtattaatcaggatgactcgtggaaggagcagcccacggcccagacgtacctcaatacatggttttag

SEQ ID NO: 106622 - DNA, 687 bp, synthetic construct
  misc_feature 1..687: note = Description of Artificial Sequence: Synthetic coding sequence
  source 1..687: mol_type = other DNA
atggttcggtattctcttgaccccgagaatcctactaaaagctgcaaaagtagaggttcaaacctgcgcgtgcattttaagaatactcgcgagaccgcccaggcgattaaaggcatgcacatccgaaaagccacaaaatacctcaaggatgtaaccctacagaagcagtgcgtgccattccgccgctataatggcggtgtgggccgctgtgctcaggccaaacagtgggggtggactcagggacgatggcccaagaaaagcgccgagttcctactccacatgctaaagaacgcagaatcgaacgctgagcttaagggcctcgatgtcgattccctggtcattgagcatatccaagtaaataaagccccgaaaatgaggcgtagaacctaccgagcccatggtcggataaatccctatatgtctagcccatgccacatcgagatgatactaaccgagaaagagcaaattgtccctaagcctgaggaggaagttgcgcagaagaagaagctgcgaagctcctcattgggcaaatggtgcgccttcttggtatcatcatttcagttctgctccgggagcacgaagaacagctggtctcatatctacactctgtggtttcctccttctcttgttgtgtacgggctgcggaagcagtataaaaaccctatgatccagacgaaagccaagtag

SEQ ID NO: 106623 - DNA, 816 bp, synthetic construct
  misc_feature 1..816: note = Description of Artificial Sequence: Synthetic coding sequence
  source 1..816: mol_type = other DNA
atgagtcctgagatgggtgaactgactcagacacggctgcagaagatatggatccctcactccagcggcagctcacggttgcagcgcagacgcggcagttccatcccccagtttaccaactcacctacaatggtcataatggtgggactaccggccaggggcaagacgtatattagcactaagcttacaaggtacctgaactggatcgggaccccgaccaaggataatatggaggccctgcagattcggaaacaatgtgcgctggctgccttgaaggacgtgcacaattatctgtcgcacgaagaaggacatgttgcggttttcgatgcaacaaacacaacgcgtgagcgacgaagccttattctgcaattcgctaaggaacacggctacaaaggggtgtgtgaggaaatgacgtacgaagaaatacaagagcattatcctgaagagtttgccctccgggatcaggacaaatacagataccgctatcccaagggagagtcctatgaagacctagtgcaacgacttgagcccgtaattatggaactggagaggcaggagaatgtcttagtcatctgtcatcaggctgttatgcgctgcttgcttgcctactttctggacaaatcgtcggacgagttgccatacctgaagtgccccctgcacaccgtactgaaactcacacccgtcgcgtatggttgcaaagtggaaagtatatacctaaacgtggaggcagtcaacacccaccgggagaagcctgagaatgtggatataacccgcgagccagaggaggcccttgacactgtcccagcccactactag

SEQ ID NO: 106624 - DNA, 1416 bp, synthetic construct
  misc_feature 1..1416: note = Description of Artificial Sequence: Synthetic coding sequence
  source 1..1416: mol_type = other DNA
atgtcacctgaaatgggagagctcacacagacacggctccagaagatatggattcctcatagctctggaagctcccggttacaacgcagaagaggctctagtattcctcaattcaccaacagccctaccatggttattatggtggggttgccagccaggggcaaaacctacatctccactaagctgaccagatacctcaactggattggtacacccaccaaggttttcaatttagggcagtatagacgcgaggccgtgagctacaagaactatgagttctttctaccggataacatggaagccttgcaaattagaaagcagtgtgctctggccgctttaaaggacgtacataattacctctctcacgaagaagggcatgtggctgtgtttgatgcaactaatactacgcgcgagagacgctccttgattcttcaattcgccaaggagcatggctataaggtcttcttcattgagtctatctgtaacgaccccggcatcatcgcagaaaacattagacaggtcaagttgggctcaccagactacatcgactgcgaccgcgagaaagttcttgaagattttctgaagcggatagagtgttacgaggtcaactaccagccactcgatgaggaacttgacagccacttatcatacattaaaattttcgacgtggggacacggtatatggttaatagagtgcaggatcatattcagagcaggacagtttactacttgatgaacatccacgttacccctagaagcatctatttatgcagacacggtgagagcgagctgaatatccgtgggcgaatcgggggtgatagcgggctgtcggtgagaggcaagcagtacgcctacgcccttgctaattttatccagtctcagggcatctcctctctgaaagtttggacaagccatatgaaacggactatccaaaccgcagaggctctcggcgtgccctacgagcagtggaaagcattaaatgagatagatgcaggagtgtgtgaggagatgacctacgaggagatacaggagcattatcctgaagaatttgccctacgtgaccaggataaatatcggtacagataccccaagggggaaagctatgaggatctggtgcagcggctggagcccgtgatcatggaattggagcgacaggagaatgttctcgtgatttgtcaccaagcggtgatgaggtgtctgttagcttacttcttagataagtcctccgacgaactgccatacctcaaatgtcctctgcatacagtattgaagctcaccccggtggcatacggttgtaaagtggaatctatctacctgaacgtcgaagccgtgaatactcaccgagagaagccagaaaacgtggacattacgcgggagcctgaagaagcactggataccgtgcccgcacattattag

SEQ ID NO: 106625 - DNA, 1221 bp, synthetic construct
  misc_feature 1..1221: note = Description of Artificial Sequence: Synthetic coding sequence
  source 1..1221: mol_type = other DNA
atggaagagaaaacttcccggatcaaggtattcaacctcggccagtaccgcagagaggccgtatcctacaagaattatgaatttttcctaccagacaacatggaagcactgcaaatcaggaagcaatgtgccctggctgcactgaaagacgtgcacaactatctgtcccatgaggagggccatgtggccgtgtttgacgccaccaacacaacccgagagaggcggtcactgatcctgcagtttgccaaggagcacggttacaaggtcttcttcattgagagtatttgcaatgaccccggaattatcgctgagaatatcaggcaggtgaaactgggctcacctgattatatcgattgtgacagagagaaagtgttagaggattttctgaagcggatcgaatgttatgaggtcaactaccagccattagatgaggagctggatagtcatctgtcgtacatcaaaatattcgacgtcgggaccagatatatggtgaacagagtccaggatcacatccaatctagaactgtgtactacctaatgaatattcacgtgaccccgcgttctatatatctgtgccgacacggagaaagcgaacttaacatccgtggaaggattggcggggattcaggactgagtgtgaggggaaaacagtacgcttatgctctagctaacttcatccagtctcaaggcattagttctctcaaggtgtggacctcccatatgaagcgcactattcaaaccgctgaggcactgggcgtgccctacgaacagtggaaagcactgaacgaaatcgacgctggagtgtgtgaggaaatgacttatgaagagatccaggagcactatcccgaagaattcgcactgcgggatcaggacaagtacagataccggtaccccaagggtgagagttacgaggacctcgttcaacgactcgaaccagtgattatggaactcgagagacaggagaacgtcctggtaatttgccaccaggccgtgatgcggtgcctgctggcttacttcttggacaaatcttcagatgagcttccttacctgaaatgtccattgcataccgtcttaaagttaacacctgtcgcctacgggtgtaaagtcgagtccatttacctgaatgtcgaagctgtgaatactcacagagagaaacctgagaatgtagacataacaagagaacctgaagaagccctcgacaccgtgcccgcgcactactag

SEQ ID NO: 106626 - DNA, 1416 bp, synthetic construct
  misc_feature 1..1416: note = Description of Artificial Sequence: Synthetic coding sequence
  source 1..1416: mol_type = other DNA
atgtcaggtgctagttcttcggaacagaacaacaacagctacgaaactaaaacaccgaatctccggatgtcagagaagaaatgttcctgggcttcgtatatgacaaattcacctacacttatcgtgatgattggcttgcccgcgcgaggaaaaacatatgtctccaagaagcttactcggtacctgaactggattggagtaccgaccaaagttttcaatctcggcgtttacagaagagaagctgtgaagtcatacaagtcatacgacttttttcggcacgataacgaggaagcaatgaaaatcagaaaacagtgcgcgctggtggcactcgaggatgtaaaagcttatttgactgaggagaacggccagattgccgtatttgacgctaccaacacaaccagggagcggagggatatgattttgaacttcgcagaacagaactcgtttaaagtgttctttgttgagtcggtctgtgatgacccagacgtgatcgctgccaatattctggaagttaaggtcagcagccctgactatcctgaaaggaatagggagaacgtcatggaagacttcctgaagagaatcgagtgctacaaagtcacctatcggccactcgaccctgataactatgacaaggacctgtcattcataaaggttattaatgttggccagcgctttctggtgaaccgggttcaggattatattcagtccaaaattgtctattacctgatgaacatccatgtgcagcctaggactatctacttgtgtagacacggagagtctgaattcaaccttctcggtaagattggaggcgattccggcctaagcgttcgtggcaagcagttcgctcaggccctgagaaagttcctggaagaacaggaaattacagatctgaaagtatggacaagccaactgaagcgcaccattcagaccgccgagtccctcggagtgccctacgaacaatggaagatcctgaatgaaatcgatgcaggagtgtgcgaagaaatgacttacgcggagatcgagaagcggtaccccgaggagttcgcactgcgtgaccaagaaaagtatctgtacagataccccggcggcgaaagctaccaggacctggttcagcgcttagagcccgtcattatggaattggagagacaagggaacgtcttggtgatctctcaccaagccgttatgagatgccttctggcctatttcctcgataagggcgctgacgaattaccctatctccggtgccccctccatactatcttcaaactcaccccggtggcttatggctgtaaggtggaaacgattaaactcaacgtggaggccgtcaacactcatcgcgataagcccaccgccgccgaaacaacccttgcggtccgccgtaggcctagcgccgcctctctgatgcttccatgctag

SEQ ID NO: 106627 - DNA, 1518 bp, synthetic construct
  misc_feature 1..1518: note = Description of Artificial Sequence: Synthetic coding sequence
  source 1..1518: mol_type = other DNA
atgagcggcgccagcagctccgagcagaacaacaactcttacgagacaaagacacctaatctcaggatgtccgaaaagaaatgtagttgggcaagttacatgactaactctccaacactcatagtcatgatcggactgccagcgagaggcaaaacgtatgtgtctaaaaaacttacccggtatctcaactggataggggtgcctaccaaggtttttaacttgggtgtgtacagacgagaagcagtcaaatcctataaatcttacgacttcttccgccacgacaatgaggaggccatgaagatcagaaaacagtgcgctttagttgccttggaagacgtcaaggcatacttgactgaggagaacggacagatcgctgtgtttgatgcaacaaacacgacccgggagaggagagacatgatactgaatttcgccgagcagaactcctttaaagttttcttcgtggagtccgtgtgcgatgacccagacgtaattgccgccaatatcctagaagttaaggtttccagtccagactacccagaacgaaatcgcgagaatgtgatggaggattttttgaaacggattgagtgttacaaagtgacatatagacctttggatccagataattacgataaggatctgtcttttatcaaggtaattaatgtgggccagagatttttggtgaatagggtacaggattacattcagtcgaaaatcgtgtactaccttatgaatatccacgtgcaacccagaaccatatatctgtgccgtcacggggagagtgagtttaatctgctcgggaagatcggcggagactctggactgagcgtaaggggcaaacagtttgcacaggctttgaggaagttcctggaggaacaagaaatcaccgacttgaaggtgtggacctcacagctgaaacgtaccatccaaaccgccgagtccctgggcgtcccgtacgagcaatggaagatcttaaacgagatagatgctggggtctgcgaagagatgacctatgcagaaatcgaaaaacggtaccccgaagaatttgcccttcgggatcaggaaaagtacctctatagatatcccggtggtgagagttaccaggaccttgttcagaggctcgaacccgtgatcatggaattggagcgccagggcaacgtgctggtgatcagccaccaagccgtgatgcggtgcctcctggcttatttcctggataagggagccgacgagctcccctacctgaggtgccctctgcataccatcttcaaattaactcccgtggcctatggatgcaaggtggaaacgatcaagctgaatgtggaagcggtgaatacccatagagacaaacctacaaacaattttccgaaaaatcagacaccggtgcgtatgcggcgaaatagctttacaccccttagctctagcaacaccattcggcggcctaggaattattcggtcggatccagacctcttaagcccctatctcccctgagggcgcaggatatgcaggagggagctgattag

SEQ ID NO: 106628 - DNA, 1122 bp, synthetic construct
  misc_feature 1..1122: note = Description of Artificial Sequence: Synthetic coding sequence
  source 1..1122: mol_type = other DNA
atgaagatcaggaagcagtgtgccctggtggccttggaggacgtgaaagcctacttgacagaggagaacggccagattgcagtgttcgacgctactaacactactcgggagagaagggacatgatattgaacttcgccgaacaaaacagctttaaggtttttttcgtggagtccgtctgcgacgatccagacgtcattgccgctaacattcttgaggttaaggtgtccagtcccgactatcccgaaaggaaccgcgagaacgttatggaagacttcttaaaacgaatcgagtgttacaaagtcacctaccgtcccctggatccagacaactatgataaggacctgtctttcataaaggttatcaatgtcggacagcgctttctggtaaacagggtgcaggactatattcagtcaaaaatcgtgtactatttgatgaacatccatgtccaaccaagaaccatatacctttgtaggcacggggagtccgagtttaacctactggggaagatcgggggcgactcagggctgtctgtgaggggcaagcagttcgcccaggcactgcggaagttcttagaggagcaagagatcaccgaccttaaagtgtggacgtcacaactgaaacggacaattcaaactgccgaatcactgggtgtaccttatgagcagtggaaaatactcaatgaaatagacgccggcgtatgcgaggaaatgacctacgctgaaatcgagaaacgctacccagaagaattcgcgctgcgggatcaggaaaagtatctgtatcggtaccctgggggtgaatcttatcaggacttggttcaacgtcttgagccggtaataatggagcttgaaaggcaggggaacgtactggttatctcccaccaggcagttatgcggtgcttgcttgcctactttctggataagggggccgatgaactcccttatttgcggtgcccactacataccatctttaaacttacgccagtggcctatggctgcaaggtagaaacgattaagctgaatgtagaggctgtcaacacgcaccgggacaagccaacagccgctgaaacgacactcgccgtcagacggagaccgtccgccgcaagcctgatgcttccctgttag

SEQ ID NO: 106629 - DNA, 795 bp, synthetic construct
  misc_feature 1..795: note = Description of Artificial Sequence: Synthetic coding sequence
  source 1..795: mol_type = other DNA
atggaggactttctcaagaggattgagtgctacaaggtgacctaccgtccactcgaccccgacaactacgacaaggacctgtcttttataaaggtgattaacgtgggccagcggttccttgttaacagagtacaggattatattcagagcaagattgtgtattatctcatgaatatccacgtgcagccccgcactatttacctgtgtcgccacggcgagagtgaattcaatctcctgggcaaaatcggaggcgattccgggctgagcgtgagaggaaaacagttcgctcaggccctgaggaagtttctggaggagcaggagataaccgacctgaaagtgtggacaagtcaactgaagcgcactatccagaccgccgagtcccttggcgtaccgtatgagcagtggaaaatcctgaacgagattgatgccggcgtctgcgaggagatgacctacgccgaaatcgagaaacggtatccagaggagttcgcccttcgcgaccaggagaagtatctatatcgctacccaggcggtgaatcctaccaggacctggtccagagactcgaacccgtgatcatggagctggagaggcaaggaaacgtgttggtgatttcccatcaggccgtaatgagatgcctccttgcctactttctcgataagggcgctgggtgtaaagtggaaactattaaactgaatgttgaagccgtcaacacccaccgggataagcctaccgctgcagagacgactctagccgtgcggcggcgtccatcagcggccagtttgatgctcccttgttag

SEQ ID NO: 106630 - DNA, 1419 bp, synthetic construct
  misc_feature 1..1419: note = Description of Artificial Sequence: Synthetic coding sequence
  source 1..1419: mol_type = other DNA
atgactaactcacctaccctaatcgtgatgataggactgcccgccagaggcaagacttatgtgtctaaaaagctcacccggtatctaaattggataggagtccctactaaggtatttaacctgggagtgtatcgccgagaggcagtcaaatcgtacaagtcgtacgacttcttccgacacgataacgaggaagccatgaaaatccggaagcagtgcgccctcgtggcattggaggatgtgaaggcttacctgacggaagaaaatggccagatcgcggtctttgacgcaacgaacaccacacgcgagaggcgagatatgatcctgaatttcgctgagcagaacagtttcaaggtctttttcgttgaatcagtatgcgacgatcccgacgttatagcagcaaacattttggaggtgaaggtgagctcccctgactatccagagagaaatcgtgaaaatgttatggaggattttctcaagcgcatcgaatgctataaagtgacgtataggcctctcgatccagataactatgacaaggatctgtcatttataaaggtgataaacgttggccagagattcctggttaatagggtgcaggattacatccagtcaaagattgtgtactaccttatgaatatacacgtccagcctcgaactatttacctgtgcagacacggagaatctgaattcaatttgttgggaaagattggcggagattcaggcctatctgtccggggaaaacaattcgcgcaggccctgcgtaagttcctggaagaacaggagatcaccgacctgaaagtctggacctctcagctcaagcgaaccatacagacggccgagagcttaggcgttccatacgaacagtggaagattcttaacgagattgatgctggggtctgtgaggagatgacctacgctgagatagaaaaaagataccccgaagagtttgcactaagggatcaagagaaatacctgtatcgctatcctgggggcgagtcctatcaggatttagtgcagcgattagagccggttattatggaactcgagcgtcagggaaatgtgctcgtcatttcacatcaggcagtgatgagatgcctgctggcctacttcttagataagggggccgatgaacttccttacttaaggtgtccactgcacaccattttcaagctgactcccgtggcttacggctgcaaggtcgagacgatcaagctgaacgtggaggcagtgaacactcatagagataaacccacaaacaactttcctaagaatcagacacccgtacgaatgcggcgcaacagttttacccctctttcaagcagtaatacaatccgccggccacggaactacagtgtaggtagtcggccactgaaacctttatcccctttgagggcacaggacatgcaagaaggggcagattag

SEQ ID NO: 106631 - DNA, 1542 bp, synthetic construct
  misc_feature 1..1542: note = Description of Artificial Sequence: Synthetic coding sequence
  source 1..1542: mol_type = other DNA
atgccgcttgagctgacacagtcccgtgtgcagaagatttgggtgcctgtagaccaccggccctcactgcctagatcgtgtggcccaaagcttactaacagccctactgtgattgtgatggtcggtcttcctgcaagaggcaagacatatatttccaaaaaattgaccagatatctcaactggattggtgtgcccacaaaagtgttcaacgtgggagaatatcgacgagaggcagtgaagcagtactcctcctacaatttctttcggcccgataatgaggaggcaatgaaggtgaggaagcagtgcgctttggccgcgttacgagacgtgaagtcctacctggcaaaagaaggaggacaaattgcagtgttcgacgctacaaacacaacccgcgagcggcgccatatgatcctgcatttcgcaaaagaaaacgacttcaaggccttttttattgaatccgtgtgcgacgaccccactgttgtggctagtaacattatggaagtcaagattagctcacccgactataaagattgtaatagtgccgaagctatggacgatttcatgaaacggattagttgctatgaagctagttaccagcccctggatcccgataagtgcgatcgggatttatcattaatcaaggtcatcgacgtgggtaggcggtttttagtgaacagggtgcaggatcacatacagtctcgaatagtttactacctgatgaatattcacgtccagccccggaccatctacctttgccgacacggcgaaaatgagcacaacctccagggcagaatcggaggcgacagcggcctgagttctagggggaagaagtttgcctcagcactatccaaattcgtagaagagcagaatctgaaggatctcagagtatggacctcccagttaaagtctaccatccagacagccgaagccctccggctgccatacgagcagtggaaagccttaaacgagattgacgcaggcgtgtgtgaagagctcacatacgaggagattagggatacctaccccgaggagtatgccctgcgggaacaggacaagtattactaccgctatcccaccggcgagtcttaccaggacctggtccagcgccttgagcccgtcatcatggagctggagaggcaagagaacgttctggtgatttgccatcaagcagttctccgttgcctgcttgcatactttctagacaagtccgccgaagagatgccctacctgaaatgccccttgcataccgtactgaaactgacacccgtggcctatggatgcagggtcgagagcatttacttaaatgtggaatctgtgtgtacccatagagagagatccgaggatgccaaaaagggccctaatcctctgatgcggcgtaactccgtgacaccccttgcgtctcccgagccaaccaaaaaacctcgtataaattcattcgaggagcatgtagcgtcgacatcagccgcccttccctcgtgtctgcctcccgaagtccctactcagttgcccgggcaacctctgcttggccaggcctgcctttag

SEQ ID NO: 106632 - DNA, 1545 bp, synthetic construct
  misc_feature 1..1545: note = Description of Artificial Sequence: Synthetic coding sequence
  source 1..1545: mol_type = other DNA
atgccactggagctcactcagagccgggtgcagaaaatctgggtgccagttgatcaccgtccttccctgccccggtcatgcggcccaaaactgacaaactctcccactgttatcgtcatggtgggcctgcctgctcgtggtaaaacttatatttccaagaagctgacacgctacctaaactggattggcgtcccaacaaaagtgtttaatgtcggagaatatagacgagaggcagttaaacagtacagttcctataatttcttcaggcctgacaatgaagaagccatgaaggtacgtaagcagtgtgctctggccgcactgcgggacgtcaagtcctatctggccaaagaggggggccagatcgcagtgttcgatgcaactaacactactcgggagcgccgccacatgatattgcacttcgccaaagaaaatgatttcaaagcatttttcattgaaagtgtttgcgacgaccctactgtggtcgcgtcaaatataatggaggttaagatctcaagtcctgactataaagattgtaacagcgccgaggcaatggacgactttatgaagcgaattagctgctacgaggcctcataccagccactggatcccgacaagtgcgatagggatctgagccttataaaagtcatcgatgtgggccgtcgctttctggtcaatagggtccaggatcacattcaaagccggatcgtatattacttgatgaatatacacgtccagcctaggacaatctatttatgtagacatggcgagaatgagcataatctccaggggcgcatcggtggggattccggcctcagtagtcggggaaagaaatttgccagtgcattatctaagtttgttgaagagcagaacttgaaggatcttcgggtgtggactagtcagctcaaaagtaccatccagacagctgaggctctccgtctgccatacgagcagtggaaagccctcaacgaaatcgacgctggagtgtgcgaggaattaacctacgaagagattcgcgacacgtatccggaggagtatgcacttagagagcaggacaaatattattacaggtatcctaccggagaatcttaccaggacctcgtccagaggttggaacctgttatcatggagctagagaggcaggagaacgtactcgtcatttgtcaccaggctgtgcttagatgcttattggcctacttcctcgataaaagtgctgaggagatgccttatctgaaatgtcccctgcacacggtgctgaaactgacacccgtggcgtatgggtgtagggtggagagcatctacctcaacgtggagtcggtgtgcacccatcgcgaaaggtctgaggacgcgaagaaaggtccaaatcctttgatgaggcgaaattccgttacgcctctggctagcccagagccgacgaaaaagccgaggattaactcgttcgaggagcacgtggcatcaaccagcgccgctctgccatcttgtctgcccccagaagtgcccacacagctgcccggacagcccttgctagggcaggcatgccttacatag

SEQ ID NO: 106633 - DNA, 1545 bp, synthetic construct
  misc_feature 1..1545: note = Description of Artificial Sequence: Synthetic coding sequence
  source 1..1545: mol_type = other DNA
atgccattggaacttacccagtcccgggttcaaaaaatctgggttccagtggaccacagaccttcacttcctagaagttgtggccctaagttgaccaattcgcctacagtgattgtgatggtcggcctgcccgcacggggtaagacttatatctctaagaagctgacccgctaccttaactggataggcgtaccaacaaaggtcttcaacgtgggcgaatatcgcagagaagccgtgaaacagtacagctcttacaatttcttccgtccagataatgaagaggccatgaaggtgcgcaagcagtgtgccttagccgccctacgcgacgttaaaagctacctagccaaagaaggtgggcagattgcagtcttcgatgcgacaaacacgacacgggagcgcaggcacatgatcttgcatttcgcaaaggagaatgacttcaaagctttcttcatagagagcgtctgcgacgaccccaccgtcgtcgcttcaaacataatggaggtcaaaatctcgtcccctgattacaaggattgtaacagcgcggaggctatggacgactttatgaagagaatctcgtgttatgaggcctcataccaacctctggatcctgacaaatgcgaccgtgacctttcactcatcaaagtgattgatgtcggacggcgctttttagtgaaccgagtgcaggatcacattcagagcaggattgtgtattacttgatgaacattcacgtgcagccccggaccatttacctgtgtcgacacggcgaaaacgaacacaacttgcagggccgaattggtggtgactcaggtctctccagtaggggaaaaaagttcgctagtgctttgagtaagttcgtagaggaacagaatcttaaggatctgagagtctggacttctcaactgaagagcacaatccaaacagctgaagccctgaggctcccctacgagcaatggaaggctctgaatgaaatcgatgctggcgtgtgtgaggagttgacctatgaagagatacgcgatacatacccggaggagtatgctctccgggaacaagataagtattattatcgttatcccactggggagtcttatcaggacctagttcagcggctggaacctgtcataatggaactggaaagacaggagaatgttttggttatctgtcaccaggccgtcctgaggtgcttactggcatactttctggacaaatccgcagaagagatgccctacctcaagtgtcccttgcacacggttctgaaattaactcccgtcgcctacggctgcagggtcgaatcaatttatctgaacgtggagtcagtgtgcacacatcgagagcggtccgaggacgctaagaagggccctaatcctcttatgaggaggaatagtgtcacacccttagcaagccccgagccgacaaagaagccaaggattaacagtttcgaagagcatgtggcctctacttcagcggcactgcctagctgtctgccacccgaggttcccacccagttacccggtcagccccttctagggcaggcctgcttgacatag

SEQ ID NO: 106634 - DNA, 1563 bp, synthetic construct
  misc_feature 1..1563: note = Description of Artificial Sequence: Synthetic coding sequence
  source 1..1563: mol_type = other DNA
atgcccctggagttgacacaaagccgggtgcagaagatttgggttccagttgaccacaggccttcattgccacggtcttgcggccccaaactgactaacagccctactgtgatagttatggtgggccttcctgcacgaggcaagacttatatctcaaaaaaacttacgcgatacttaaattggattggcgtgcccacaaaggtgtttaacgtgggagagtaccggcgcgaggctgtgaaacagtactccagttacaatttcttcagaccagataatgaggaggcaatgaaggtcagaaaacaatgcgcactcgctgccttacgcgacgtcaagtcctacttggcaaaggaggggggtcagatcgcagtgtttgacgctacaaacacaacccgggaacgcagacacatgattctacactttgctaaggagaatgacttcaaggccttcttcattgaatccgtgtgcgatgacccaaccgtggtagcctccaatattatggaagtcaaaatttcgagccccgattacaaagactgcaactcggcagaagcaatggatgattttatgaaacgcatctcctgttacgaggcttcataccagccattagatcctgataagtgtgatcgagatctgtccctgattaaagtgattgacgttggacgtagatttcttgtgaatcgggtacaagaccacattcagagccgcatcgtgtattatctgatgaatatccatgtgcagccaagaaccatctacctgtgccggcacggagagaacgagcacaatctccagggacgaatcgggggcgacagcgggctctcctcacgtggtaaaaagtttgctagcgctctgagcaaattcgttgaggaacagaatctgaaggacctacgggtgtggacctcacagttgaagtccaccatccagacagccgaggctttgagactaccatacgagcagtggaaggcactcaacgagatagatgctggggtgtgtgaagaactcacttacgaagagattcgagatacatatccggaggaatacgccttacgggagcaggacaagtattattatcgctacccaacaggagaaagctaccaggacctcgtccagcgcctcgaaccagtaatcatggagctggagaggcaggagaatgttctggtgatctgccaccaggccgttcttcgctgcctcctggcctacttcctcgataaatctgccgaggagatgccctacctaaagtgcccactgcatactgtgctcaaactgaccccggtcgcctacggatgccgcgtcgagtcaatctatctcaatgtggagagcgtgtgcactcaccgtgaacggtctgaagatgctaagaagggtcctaaccccctgatgaggcgaaacagtgtcacccctcttgcctctcctgaaccaaccaagaagcctcgtatcaattctttcgaagaacacgttgcctctacttctgcagctttaccaagttgtttacctccagaagtgcccacgcagctgcctggtcaaaatatgaagggtagtagatcttcagctgacagctcccggaaacactag

SEQ ID NO: 106635 - DNA, 354 bp, synthetic construct
  misc_feature 1..354: note = Description of Artificial Sequence: Synthetic coding sequence
  source 1..354: mol_type = other DNA
atgccctacctaaagtgtcctctgcacacagtgctgaagctcaccccggtagcatatggatgcagggtggagtccatctacctgaatgttgaatcagtgtgtacacatcgtgaaagatctgaggacgccaagaaaggtcctaaccctctgatgcggcggaatagtgtgacccccctcgcatcaccagagcctaccaaaaaaccaaggattaatagttttgaagaacacgttgccagtacctctgccgccctgcctagctgcctcccccccgaggtccctacacaactcccaggccagcctcttttaggtcaggcctgcctaaattggaagggtgtgatgaggaacgctgcgtag

SEQ ID NO: 106636 - DNA, 1581 bp, synthetic construct
  misc_feature 1..1581: note = Description of Artificial Sequence: Synthetic coding sequence
  source 1..1581: mol_type = other DNA
atgccattagaactgacccagtcacgcgtgcagaagatctgggtgcccgtggaccaccggcctagcctgcccagatcttgtggccccaagctgacaaattcccccaccgtgatagtgatggtgggcctcccagcgagaggcaaaacgtacatttccaagaagcttactcgctatcttaattggatcggcgtccctactaaggtcttcaacgttggagagtaccgcagagaagcagtgaaacagtactcctcttacaatttcttccgacctgataatgaagaggcgatgaaggtgcggaagcaatgcgcactggccgctctgcgagatgtcaaatcttacttggcaaaggagggcgggcaaattgcggtctttgatgccacaaatactacgagagagaggagacacatgatcttgcacttcgccaaggaaaacgatttcaaagctttttttattgagtcagtctgcgacgaccctacagtcgttgcttccaatatcatggaggtgaagatttcgagtcccgattataaagactgtaattcggctgaggctatggatgattttatgaaaaggatttcatgctacgaagcctcctaccagccactggatccagataaatgtgatcgcgatctttcattaataaaagtgatcgacgtgggccgacgtttcctggtaaacagggttcaagaccacatccagtcccggatagtgtactacttaatgaatatccatgtacaaccacgcaccatttacctgtgcaggcacggcgaaaacgaacacaatttacagggccgaatcggcggggacagcggactgtcatcaagaggcaagaagtttgcctcagcgctttctaagttcgtcgaggagcagaatttgaaggatcttcgagtatggacgtctcagctgaagtctaccattcagacggctgaagccctgagactgccctatgaacagtggaaggccctgaacgaaatcgatgcaggcgtgtgcgaagagctcacctacgaggaaatccgtgacacctaccctgaggaatatgccctgagagagcaggacaagtattactatcggtacccaaccggagagtcatatcaggatctcgtacagagactggagcccgtaatcatggagctagaaaggcaggaaaacgtactggttatctgtcatcaggcggtgctgcgctgcctactggcctactttttggacaagtccgccgaggagatgccctacctgaagtgccctctgcataccgtgttgaaacttacccccgttgcgtacggctgccgcgtcgagagtatctatttgaatgtggagagcgtgtgtacacatagggagaggagcgaggacgccaagaaaggacccaaccctttgatgagacgcaactccgtgaccccactggcctcccctgaaccaacaaagaaaccgcggattaactcttttgaggagcatgtggcttcaactagcgcagcattaccttcctgcctcccccccgaagtgccaacgcagctgccgggccagcccttattggggcaggcctgcctacgcaccgtgtgccacatctttagtaaattttctccctactag

SEQ ID NO: 106637 - DNA, 567 bp, synthetic construct
  misc_feature 1..567: note = Description of Artificial Sequence: Synthetic coding sequence
  source 1..567: mol_type = other DNA
atgaatatccacgtccaaccacgaacaatttacttatgccggcacggcgagaatgagcataaccttcagggccgcatcggcggcgacagcggcctgagcagccggggcaaaaagttcgctagcgctctgtcaaaattcgtagaggaacagaatcttaaggatctgcgggtatggactagccagctaaagagcacgatccaaactgccgaggcactgaggctgccatacgaacagtggaaggctctcaatgagattgatgcctcttatcaggatctggtgcaaaggcttgagcctgtgataatggaactggagagacaggaaaacgtgttggtgatctgccaccaggcagttctccgctgtctcctggcttactttctggacaagagcgccgaggaaatgccatatctgaaatgtcctctgcacactgtcctgaaactgacgcctgtggcatatggctgccgggtggagtctatctatctgaacgtggaatctgtgtgtactcaccgtgaaagatctgaaaacatgaaaggaagtcggtcttccgcagactcctctcggaagcactag

SEQ ID NO: 106638 - DNA, 1581 bp, synthetic construct
  misc_feature 1..1581: note = Description of Artificial Sequence: Synthetic coding sequence
  source 1..1581: mol_type = other DNA
atgcccttggaattaactcaaagcagggtccagaaaatatgggttcccgtcgaccaccggccgagcctgcccagatcctgtggcccaaaactgaccaacagtccgactgttatcgtgatggtcggactcccagcacggggcaagacctacatctcaaaaaaacttacacgataccttaattggatcggggtgccaacaaaggtattcaacgttggagaatatcgcagggaggctgttaagcagtactcaagttataacttcttcagacctgacaacgaggaagcgatgaaggtgcgcaagcagtgcgcgctggccgcactgcgggatgtgaagagctatctcgccaaggaaggcggtcagattgctgtttttgatgcaactaatactactagggagaggaggcacatgatcctccacttcgcaaaagagaacgattttaaagcgttctttattgagtcagtgtgtgatgaccctacagtagttgcttctaatataatggaggttaagattagtagtccggattataaagactgtaattccgcagaagctatggacgattttatgaagcgaatcagctgctacgaagccagttaccagccgctggatccagataaatgtgatcgggatcttagtctcattaaggttatcgacgttgggcgcagatttctcgtgaaccgcgtgcaagaccatattcagtcaagaatcgtgtactacctcatgaatatccacgtgcagcctcggacaatctacctctgtcgccacggtgagaatgagcataatcttcagggcagaattggcggcgactccggtttaagctctcgtggaaagaagttcgcctctgctctttctaaatttgtagaggaacagaatctgaaagacctacgggtgtggaccagtcagctgaagagcacaattcagaccgctgaggctctccgcctgccgtatgagcaatggaaggcactgaacgagatcgatgctggcgtgtgtgaagagctgacgtatgaggagatacgcgacacctatcccgaggaatacgccctaagggagcaggataaatattactatagatatcctactggagagtcataccaggacctggtgcaaaggctagagcctgtcataatggaactggagagacaggagaacgttctagtaatatgtcaccaggcggtgcttagatgtctactggcctacttcttggataagagtgcggaagaaatgccctacttaaagtgcccattacacactgtcctgaagttgactccagtagcatacgggtgcagggtggaatccatttatctgaacgtggagtccgtttgtacgcaccgtgagcgtagcgaagacgctaaaaagggtccaaaccccttaatgcgccgcaactcagtcactcctctagcgtctccagaaccgacgaagaagccacgcatcaactccttcgaggagcacgtcgcaagcacctctgccgctctgccgagttgcctacctccggaagtgcctacccagcttcccggtcagcccctcctcggccaggcatgccttcggacggtgtgtcacatctttagtaagttttcaccatactag

SEQ ID NO: 106639 - DNA, 1503 bp, synthetic construct
  misc_feature 1..1503: note = Description of Artificial Sequence: Synthetic coding sequence
  source 1..1503: mol_type = other DNA
atgccattcagaaaggcctgcggtccaaagctcacaaactcaccaacagtgatcgtcatggtggggctgcccgccagaggaaagacatatattagcaagaagctgactaggtaccttaactggatcggagtccccaccaaagtgtttaatgtgggcgagtatcgcagagaggccgtcaaacaatacagcagttataacttcttccggccagataatgaagaggccatgaaggttcgtaagcaatgcgccctggccgccctgagagatgtgaagagttatttggccaaagaaggagggcagattgcagttttcgatgctacaaacacaacccgggagaggaggcacatgatcctccacttcgctaaagaaaacgattttaaggccttcttcatcgagagcgtttgcgatgaccctaccgtggtggcctctaatattatggaggtaaaaatcagcagtccagattataaagattgtaattccgccgaggctatggatgacttcatgaagcgaatttcctgctacgaggccagttaccagcccctggatcctgataagtgcgatagagatctgtctcttattaaagtcatagacgtgggcaggagattccttgtgaaccgggttcaggatcacattcaatctcggatcgtctattatcttatgaacattcacgtgcagccaagaaccatctatctgtgccgccacggcgagaacgaacataacctgcaggggagaatcgggggtgattccggcctttcaagtcgtggcaagaagttcgccagcgctctgtctaaattcgtggaagagcagaacctaaaagatctccgagtgtggaccagtcagctgaaatctacaatccagacggcagaggcattgcggcttccctacgagcagtggaaggccttgaacgaaatagacgctggggtctgtgaggaactgacctatgaggagattcgggatacctaccccgaggagtacgcactccgcgaacaagataagtactattaccgctatccaactggagaaagttatcaggacttagttcagcggctggaaccagttatcatggagttggagcgccaagagaatgtacttgtcatctgccatcaggctgtgctccggtgcctgctggcctattttttggacaagtctgctgaggagatgccctatctgaagtgtccattacacactgtgctgaaactgactcccgtagcctacgggtgtagagtcgaatctatctatctgaatgtagagagcgtgtgtacccatcgggagcggtcagaagacgctaagaaggggcccaatccacttatgaggagaaacagcgtgaccccactggcaagtcctgagcctaccaaaaagcctaggatcaatagtttcgaggaacacgtggcgagcaccagtgctgcactgccatcctgccttccccctgaagttccaacacagttgcctggacagaacatgaaaggctctcgcagtagtgcagacagctcccggaagcactag

SEQ ID NO: 106640 - DNA, 279 bp, synthetic construct
  misc_feature 1..279: note = Description of Artificial Sequence: Synthetic coding sequence
  source 1..279: mol_type = other DNA
atctatctgaatgtggagtctgtctgtacacatcgcgagagaagtgaggatgcaaagaagggaccaaatccgctaatgcgccgcaattctgttacacctctagcctccccagagccaaccaaaaaacccaggatcaactcctttgaggaacacgttgctagtacttctgctgcactccccagttgcctccctccagaagtgcccacacaactgcccgggcaacccctcctggggcaggcctgccttaattggaaaggcgtcatgaggaatgctgcatag

SEQ ID NO: 106641 - DNA, 96 bp, synthetic construct
  misc_feature 1..96: note = Description of Artificial Sequence: Synthetic coding sequence
  source 1..96: mol_type = other DNA
atttacctgaacgtggagtctgtatgcactcatcgggagcgctctgagaacatgaagggcagccgctcaagcgccgactcgtcacgcaaacattag

SEQ ID NO: 106642 - DNA, 261 bp, synthetic construct
  misc_feature 1..261: note = Description of Artificial Sequence: Synthetic coding sequence
  source 1..261: mol_type = other DNA
atgccttacctgaagtgtcctctacacacagtgctgaaattgacccctgtcgcttacggttgccgagttgaaagtatctacttgaatgtagaaagtgtctgcacacatcgagagcgttccgagggcttatcacttttccccaggctcgagtgcgggggagctgtgaccgcgcactgctcccttaacctactgggctcttcggacccccctgctagcgctagccgggtggcggagaccacaggatgtaaggagggaacatag

SEQ ID NO: 106643 - DNA, 432 bp, synthetic construct
  misc_feature 1..432: note = Description of Artificial Sequence: Synthetic coding sequence
  source 1..432: mol_type = other DNA
taggtggaggagcagaacctcaaggatttgagagtctggaccagtcagctgaagtcaactatacagacagccgaggccctgagacttccttatgagcagtggaaggccttaaatgaaatcgatgccagctaccaggacctggtgcagagactggagcccgtgatcatggaactggagaggcaagaaaacgtgcttgtgatttgtcaccaagctgtcctgcgatgtctactggcttattttctggataagtcagccgaggagatgccctacttgaaatgcccattgcacactgtactcaagctgactcccgtggcatacggctgtagggtggaatctatatacctcaatgttgaatcagtgtgtacacacagggagcgctctgaaaacatgaaagggagtcgatcatctgctgacagttctaggaagcattag

SEQ ID NO: 106644 - DNA, 555 bp, synthetic construct
  misc_feature 1..555: note = Description of Artificial Sequence: Synthetic coding sequence
  source 1..555: mol_type = other DNA
atgccctttcggaaggcctgcggccccaaactgactaacagtcccacggtcattgtgatggttggcttgcccgcgcgcggtaagacttatatttccaagaagctcacccgctacctgaactggatcggcgtgccgacgaaagtctttaatgttggggagtatagacgcgaggctgtgaagcagtactcttcttacaatttctttaggccagacaatgaagaagccatgaaagttcgaaagcagtgcgctctggccgccctcagagacgtcaagtcctacttagctaaggaagggggtcagattgccgtgtttgacgctacgaacaccactcgggaaaggagacacatgatattgcattttgctaaggagaacgattttaaggctttttttatcgagtcagtgtgtgatgatccaaccgtggtggcctcaaacatcatgcagaaggcctttcagcgggacctcagcgcaacccctttatggtgttgcaggaaactgaagtcccccgcccggattactaagactgctacgcgccagaaaccctggacgactagctag

SEQ ID NO: 106645 - DNA, 1605 bp, synthetic construct
  misc_feature 1..1605: note = Description of Artificial Sequence: Synthetic coding sequence
  source 1..1605: mol_type = other DNA
atgggggaaggaggacagaaagaaggggatagccagcaagccggcgctcttcccttgctctgtcagctagacacattcagtccaaaggccaccgtgttcggggtgtccattaatcccgcatgtgggccgaagctcaccaacagcccaacagttatagtgatggtgggactaccagcacgaggtaagacctacatttctaaaaagctcacgagatatctgaactggatcggggtgcctaccaaagtgttcaatgtgggggaataccgaagggaggctgtgaagcagtactcttcctataatttttttcgcccggacaacgaggaagctatgaaggtccggaaacagtgcgccctggccgccctaagggacgttaagtcctacctcgccaaggagggggggcagatcgcagtgtttgatgccaccaacacaacgagggaacgcaggcacatgatcctgcatttcgccaaggagaatgacttcaaagccttttttattgagtccgtttgcgatgatcccaccgtagttgctagcaatatcatggaagtcaaaatctcctctcccgactataaggactgtaacagcgccgaagccatggacgactttatgaaaagaatctcttgttacgaggcttcctaccaacctctggaccctgacaagtgtgatagagacctgtctcttattaaggtgatcgatgtgggcagacgatttcttgttaaccgcgtacaggaccatattcagagtcggatcgtgtactatctcatgaatatacacgtccagccccgaaccatatacctctgccgccatggcgaaaacgagcacaatctccaggggcggattggtggagactctgggctttccagcagaggcaaaaagttcgcatccgcattgtcaaaattcgtggaagagcagaacctcaaagacctccgagtatggactagccagctgaagtctactatccagactgctgaggcgctgcgactgccctacgaacaatggaaggccctgaatgaaatagacgcgggggtctgtgaggaactgacatatgaagagatccgggacacctatccggaggaatatgcactgcgtgagcaagataaatactactatcggtacccaacaggagaaagctaccaggatctagttcaacggttggagcctgtcattatggagctggagcgtcaggaaaacgtgttggtgatctgccatcaggcagtgctgagatgcctcttggcttattttcttgacaaaagtgcagaggaaatgccttatcttaagtgtccactgcatacagttctgaaattgacacctgtcgcatatggttgcagggtggaaagcatctacctgaacgtcgagagcgtttgtacccaccgagaacgctctgaggatgcaaaaaagggtcccaatcccttaatgagaaggaactctgtcacccccctcgcctcaccagagcctacaaaaaaacctagaatcaattcattcgaggagcacgtagcctcgacttctgcagctcttccttcttgtttaccccctgaagtgcctacccagttgccaggccagaatatgaaaggctcgaggagcagtgctgattcatcccgaaagcattag

SEQ ID NO: 106646 - DNA, 594 bp, synthetic construct
  misc_feature 1..594: note = Description of Artificial Sequence: Synthetic coding sequence
  source 1..594: mol_type = other DNA
atggacccgcctgccggttttgtgcgcgccggcaatcccgccgtcgcggcaccacagtcacccctttcgccagaaggtgctcacttccgggccgctcaccaccctcggtccacgggatcccgatgtcccggtagcctgcagccctcacggccactggtggccaattggttacagagccttccagagatgcccgttgacttcaccggatactggaagatgttagttaacgaaaactttgaagagtatctgagggctctcgacgtgaatgtcgccctgcggaagatcgcgaatctcctgaagcccgataaggaaattgttcaagacggcgaccacatgataatccgaacgctttctacatttagaaactacatcatggacttccaagtgggaaaggaatttgaagaagatcttacgggaatcgatgatagaaagtgcatgaccactgtctcttgggatggggacaaattacagtgcgttcaaaaaggcgagaaagaagggagaggctggacgcagtggattgaaggtgatgaactacacctggagatgagagtggagggcgttgtttgtaagcaggtgtttaagaaggtccagtag

SEQ ID NO: 106647 - DNA, 528 bp, synthetic construct
  misc_feature 1..528: note = Description of Artificial Sequence: Synthetic coding sequence
  source 1..528: mol_type = other DNA
atgaccaactgtcccactttaatcgtgatggtgggactcccagcgcgaggaaaaacgtacatcagtaaaaagctgactaggtatttgaactggattggggtgcctactcgtgagttcaacgtgggccaataccgcagagatgtggtgaaaacatacaagagctttgagttctttctgccagacaatgaggaagggctgaaaatccggaagcagtgtgccctcgccgcacttagagacgtgagaagatttctctcagaagaaggggggcatgttgccgtgttcgacgccactaataccacacgcgagagacgcgcgactatattcaattttggagaacagaacggctacaaaacttttttcgtagagtccatctgtgtcgatccggaagtgatcgcagctaacatcgtgcaggttaagctggggagccccgactacgttaaccgagactcagacgaggccactgaggacttcatgagacgaatcgagtgttacgagaacagctatgaatcacttgacgaagacctgtag

SEQ ID NO: 106648 - DNA, 1377 bp, synthetic construct
  misc_feature 1..1377: note = Description of Artificial Sequence: Synthetic coding sequence
  source 1..1377: mol_type = other DNA
atggatcggggaagtttgggcggctccagcctgaccgacctggggcctggaagctcgagaagagtctgcatgaccaactgtcccacgctgatcgtgatggtaggactgccggcgcgaggcaagacctatatatccaagaagctgactagatacttgaattggataggcgtgccaacccgcgagttcaatgtgggacagtacaggagagatgtggtgaagacatataaatcttttgaattttttctgcccgataacgaagaggggctgaagatacgcaaacagtgtgccctggccgctttgagagatgtgcggaggtttctgagtgaggagggtggacacgtcgcagttttcgatgccactaataccacgcgggagcggagggccaccatatttaactttggagaacaaaacgggtataaaaccttttttgtggaaagtatctgcgtggatccagaggtgatagccgctaacattgtgcaggtaaaacttggaagccctgattacgtgaacagagacagcgacgaagctacagaagattttatgaggagaatcgagtgttatgagaattcatatgagtctttggatgaagatctggacagagacttaagttatatcaaaatcatggacgtcgggcagtcttacgtggttaatagagttgctgaccacatccaatcaaggattgtttactatctcatgaacattcacgtcactccgcgttcaatatacctctgtcggcatggcgagtcagaactcaatttaaagggaagaatcggtggggaccctggtctgagcccccgcggccgagagtttgcaaagagtctggcccagtttattagtgaccagaacataaaggacttaaaggtatggacaagtcagatgaaacgcacaatccagaccgccgaggccctgggcgtcccatacgaacaatggaaggttctaaatgaaattgacgccggagtttgtgaggagatgacttacgaggaaatccaggataactatcccctggagttcgccctgcgggaccaagacaagtaccgatataggtacccaaagggcgaatcatatgaagatctcgtgcagagactggaacctgttattatggagcttgaaaggcaggagaacgtattagtgatatgccaccaggcagttatgcgttgcctgctcgcctacttcttggacaaagctgcggagcaattgccttacttgaagtgccccctacataccgtgctgaaactcacgcccgtggcgtacgggtgcaaggtggagtcgatttttctaaatgtcgcagcagtgaacactcacagggaccgaccgcagaatgttgacatcagtcgcccaccagaagaagcactggtcacggtgccagcacaccagtag

SEQ ID NO: 106649 - DNA, 1308 bp, synthetic construct
  misc_feature 1..1308: note = Description of Artificial Sequence: Synthetic coding sequence
  source 1..1308: mol_type = other DNA
atgactaattgcccgaccttgattgtgatggtcggattgcccgcacgcggaaaaacctatatttctaaaaaactgacccggtatctaaattggattggcgttcccacacgtgaatttaacgtcgggcagtaccggcgcgacgtagtgaagacttacaagagtttcgaatttttcctacctgataatgaggaaggactcaagatccgtaagcaatgcgccctggccgcactgagagacgtccgacggtttctttccgaagaaggcgggcatgtggccgtgtttgacgccaccaataccactcgagagcggcgcgccaccattttcaatttcggcgagcagaacggatataagacattctttgtggagagtatttgtgtcgatccagaggtgatcgccgccaatattgtgcaggtgaaactgggctcccccgattacgtcaaccgggactccgatgaagcaactgaagactttatgcgaagaatcgaatgctacgaaaattcgtacgaaagcctggacgaggatctcgatcgggatctgtcctacataaagatcatggatgtcggccagtcgtacgttgtcaacagggtagccgatcatatccagtcccgaatagtgtactatttgatgaacattcacgtcactcctcgcagcatatacctgtgtcgccacggcgagtcagagcttaatctgaaggggagaatcggaggtgatccaggtttgtcacctcgcggccgtgaattcgcgaagtctctggcccaattcatatcagatcagaatattaaggacctgaaagtgtggacctcccaaatgaagaggaccatccagaccgccgaagctctgggagtaccatacgagcaatggaaagttctgaatgaaattgacgctggcgtgtgcgaggagatgacttacgaagagattcaggataattacccgctcgaattcgcactccgtgatcaggataaatacaggtatagatatcctaaaggggaatcttacgaggatctggtccagaggctcgaacccgtgatcatggaactggagcggcaagaaaacgtgcttgtgatctgtcaccaggctgtgatgaggtgtctcctggcatatttcttggataaagctgccgagcagttgccgtacctcaaatgtcctctccacaccgtcctcaagctcacacccgttgcctacggttgtaaggtggagagcattttcctgaacgtggccgcggtgaacactcatagggatagaccacaaaacgtggacatcagccggccccccgaggaggccctggtgactgtgcccgctcaccaatag

SEQ ID NO: 106650 - DNA, 429 bp, synthetic construct
  misc_feature 1..429: note = Description of Artificial Sequence: Synthetic coding sequence
  source 1..429: mol_type = other DNA
atggccagtccacgcgagctcactcagaaccctctcaaaaaaatctggatgccatattccaatggtcgcccggcactccatgcatgtcagagaggagtgtgcatgacgaattgtccaacactgatcgtgatggtgggtctgccagcacggggcaaaacctacatcagcaagaaacttaccagatatcttaactggattggagtgcctactcgagaattcaacgtggggcagtatagaagagatgttgttaagacgtataagagcttcgagttcttccttcctgacaatgaggagggtctaaagattagaaagtttctcatgccccagacaccgccggagaatggtgagcgacctagcctgatccttgaaaaccgaatggctacgcggcccttcctatcgtcgccatctgtgtggattcttagatcctag

SEQ ID NO: 106651 - DNA, 777 bp, synthetic construct
  misc_feature 1..777: note = Description of Artificial Sequence: Synthetic coding sequence
  source 1..777: mol_type = other DNA
atggccgctcccgcccccgggttaatttcggttttctcatcttcgcaagagctgggggcagctcttgcccagctcgtggcgcagagagccgcttgctgtcttgctggggcacgggctagattcgccctcgggttgagtggcgggtcactggtgagcatgctggcccgagaattgcctgctgcagtcgccccagctgggcctgctagcctggcacggtggacccttggtttttgcgacgaacggctggtgccctttgaccacgctgaatccacctacggcctctacaggactcacctacttagccgcttacctattcccgagagccaggtcattactattaacccagagctgcccgttgaagaagccgccgaagactatgcgaaaaaactccggcaggcatttcagggagacagcattcctgtatttgatctgctcattttgggggtcgggcctgatggtcacacatgtagccttttcccagaccaccccctcttgcaagagcgggagaagattgtggcaccaatttctgactcccccaagccaccaccccaacgcgttacacttactctccccgtccttaatgccgctagaacagtgatcttcgtcgccactggggaagggaaggccgcggtactgaagcgcattttggaggaccaggaggaaaaccccttacccgccgccctggtgcaaccccataccggtaaactgtgttggttcctggacgaggctgccgctagactcctgactgtcccatttgagaaacacagcaccctgtag

SEQ ID NO: 106652 - DNA, 1428 bp, synthetic construct
  misc_feature 1..1428: note = Description of Artificial Sequence: Synthetic coding sequence
  source 1..1428: mol_type = other DNA
atggccgccaagagccaacctaacattccaaaagctaaatctctggacggagttaccaacgatcggaccgccagtcaaggacagtggggcagagcatgggaggtggattggtttagcttggcctcggtgatcttccttctcctgtttgcacccttcattgtctactatttcatcatggcatgtgatcagtattcctgcgcacttacaggccctgtggtggacatcgttaccggtcacgcccgactgagcgatatctgggctaaaactcctccaatcaccaggaaagccgctcagctctacactctgtgggtaacctttcaggtattactgtacacgtcacttcccgacttttgtcacaagttcctgccggggtacgttggcggaattcaggaaggggctgtgactcccgcaggtgttgttaacaaatatcaaataaacggactgcaagcctggttactaactcacctcctctggttcgcaaatgctcatttattatcgtggttctctcctaccatcatattcgataactggattcccttactgtggtgcgccaacatcctgggctatgcagtctcgacatttgccatggtgaaaggctacttctttcctactagcgcacgcgactgtaagttcacggggaattttttctacaattacatgatggggatagaatttaatccaaggattggcaagtggtttgacttcaagttgtttttcaacggcaggcccggaattgtcgcctggactctgattaacttatctttcgctgctaagcaacgggagcttcattctcatgttaccaatgcgatggttctcgtgaatgtcctgcaagcgatttacgtgatcgattttttctggaatgagacatggtatcttaagactattgacatatgtcatgatcactttgggtggtatctgggctggggggattgtgtgtggttaccctacctctacactctgcagggcctgtacttggtgtatcatcccgtgcagcttagtaccccccacgctgtgggcgtcttgctgctgggattggtcggctattatatttttagagtagccaaccaccaaaaagacctgtttcgacggaccgacggacgttgtctgatttggggccggaagcctaaggttatcgaatgtagttatacgagtgccgatgggcagcggcaccactctaagctcctggtaagcgggttctggggcgtggccagacactttaactacgttggcgatctgatggggagtctggcatactgtctggcctgtggcggcggacacctgctaccatacttttacatcatctacatggcaatcttacttacccaccggtgcctgagggacgaacatcgttgcgcgtcaaaatacgggcgtgattgggagcgctacaccgctgctgtgccctaccgactgctccccggaattttctag

SEQ ID NO: 106653 - DNA, 1428 bp, synthetic construct
  misc_feature 1..1428: note = Description of Artificial Sequence: Synthetic coding sequence
  source 1..1428: mol_type = other DNA
atggccgctaaatcacaacctaacatccctaaagccaaatcattagacggagtgaccaacgacagaactgcgtcacagggacagtggggacgggcctgggaagtagattggttttccctggctagtgtcatttttctcttactgttcgcccctttcatagtgtactactttattatggcctgtgaccagtatagttgtgcgctgaccggaccggttgtcgacatagtgactggacacgccaggctgtcggacatttgggccaaaactccccctatcacgaggaaggccgctcaactctatactctgtgggtgacattccaggtactactctatacgtctctcccagacttttgtcataaatttctcccagggtacgtgggcggaatacaggagggtgctgtaactccagcaggtgtggttaataagtaccagattaatggactgcaagcatggcttctgacccacctgctgtggttcgccaacgcccatctactttcatggttcagtccaacaattatttttgacaattggatcccgcttctgtggtgcgccaatatcctgggctatgccgtgtctacattcgccatggtcaagggctacttttttccaacgtcggcacgggactgtaagtttactggcaactttttttacaactacatgatgggtattgagttcaacccccgcatcggaaaatggtttgattttaagttattcttcaatggccgcccaggaatagtagcgtggaccctgatcaatctctccttcgccgcaaagcagcgtgagctgcacagccatgttacaaacgcgatggtcctggttaatgtgctgcaggctatctacgtgattgactttttctggaatgaaacatggtacctcaagacaattgatatttgccacgaccattttggctggtacctgggttggggcgattgtgtctggctgccttacctgtacacgttacagggactctacctggtctaccatcctgtgcagcttagcacccctcacgctgtgggagtcttgctgctgggccttgtagggtattacatctttcgtgtagccaatcatcaaaaggatctctttcgccggaccgatgggcgctgcctcatctgggggagaaagcctaaagtaattgaatgtagttacacttctgccgacgggcagagacatcacagcaagctgcttgtcagtggcttttggggagtcgcccgccacttcaactatgtcggcgatctcatgggtagcttggcatattgtctggcctgcggaggcggccacctgctcccttacttctacattatctatatggcaatcttgctgacacacagatgtcttcgggacgagcaccggtgtgcctccaagtatggaagggactgggagaggtacacggctgccgtaccttatcggctgttacccgggatcttttag

SEQ ID NO: 106654 - DNA, 327 bp, synthetic construct
  misc_feature 1..327: note = Description of Artificial Sequence: Synthetic coding sequence
  source 1..327: mol_type = other DNA
atggctgccaagagccagcccaatatccccaaggctaagtccctcgatggggtcacaaacgatcgcactgcttctcaggggcaatgggggcgtgcctgggaggttgactggtttagtctggccagcgtcattttccttctcctgttcgctccctttattgtgtactactttatcatggcttgcgaccagtatagctgtgcccttactggtcctgttgtggatattgttacaggccacgccagactgtcagacatttgggccaagacccctcccatcaccaggaaagcggcccagctttatactttatgggttacattccaggtctag

SEQ ID NO: 106655 - DNA, 495 bp, synthetic construct
  misc_feature 1..495: note = Description of Artificial Sequence: Synthetic coding sequence
  source 1..495: mol_type = other DNA
atggcagctaagagccagcccaacatccctaaggcaaagagcctggatggcgttactaacgatcgaaccgcttctcagggccagtggggaagggcttgggaggttgactggtttagcctggccagcgtcatttttctgcttcttttcgcaccgttcattgtctactactttattatggcatgcgatcaatatagctgtgccctcactggaccagtggtggatattgttactggccatgccaggttgagcgacatctgggccaagactccccctattacgaggaaagctgcacagctgtataccctgtgggtgactttccaggtcctcttgtatacctcactgccggatttttgccataagtttctgcctgggtatgtgggcggcatccaggagggtgctgtgactcccgctggggtcgtaaataagtatcagatcaatggcctgcaagcttggctattgacccatctcctctggtttgctaacgcccacctgtag

SEQ ID NO: 106656 - DNA, 276 bp, synthetic construct
  misc_feature 1..276: note = Description of Artificial Sequence: Synthetic coding sequence
  source 1..276: mol_type = other DNA
atggcagcaaagtcacaacctaatatacctaaggccaaaagcctggacggcgtgacgaacgacagaacggcatcccagggccagtggggaagggcttgggaagtggactggttcagtctcgcatctgtgatctttttgctactgttcgcgccatttatcgtgtattacttcatcatggcctgtgatcagtattcctgcgcattaactggccctgtggtggacatcgtaactggacatgctcggctcagcgacatctgggctaagactcccccatag

SEQ ID NO: 106657 - DNA, 318 bp, synthetic construct
  misc_feature 1..318: note = Description of Artificial Sequence: Synthetic coding sequence
  source 1..318: mol_type = other DNA
atggctgctaaaagtcagcccaacattccgaaagccaagtctctggacggtgttactaacgatagaaccgcctcacaaggacaatggggccgcgcctgggaagtggactggttcagtctggccagcgtcatcttcctgcttttgttcgcacccttcattgtgtactactttattatggcctgcgatcagtatagttgtgcccttactgggccggtggtcgatatcgtgacgggacatgcccggctcagcgacatatgggctaagactcctccaatcactagaaaggcggcacagctgtatacgctgtgggtcacctag

SEQ ID NO: 106658 - DNA, 846 bp, synthetic construct
  misc_feature 1..846: note = Description of Artificial Sequence: Synthetic coding sequence
  source 1..846: mol_type = other DNA
atggactcatactccacttatctggccactgtgaaggtctcaggctcctggctggaagagcaggatgaggacatttatgaggtggagagccgggttccacttcctcacccgtttcccctctgtgaacacttggatgaaaacaatagtgtgatcgtgaatacctcaatcttccactttatccacaaacgtaacggtcatatcctcaagctaatttccaaaattagtctgcccacgcctccttattctttagaacacgccaaggtaactcagacagagctgatgcgtgaaagctttagacagaaacaggaagcaacagagagcctcaagtgtcaagaagagctgagagaacgattgcatgaggagtctagggctcgagaacagttagccgtagaactgagtaaagcggagggggtcatcgatggctacgcggatgagaaaacccttttcgaaagacagattcaggagaaaacggatattattgatagacttgagcaggagctcctatgtgcgtccaaccgcttacaagaattggaagccgagcagcagcagatccaggaggagcgcgaactcttgtctaggcagaaagaggcgatgaaggctgaagcggggcccgtggaacagcagctgctgcaggagaccgaaaaactgatgaaggagaagctggaggttcaatgccaagctgaaaaagtacgagatgacctacagaagcaggtcaaagccctggaaatcgacgtggaagaacaagtgtcacgctttattgagctggagcaggagaaaaatacggagctgatggacttgagacagcagaatcaggctctcgaaaagcagttagagaagatgagatag

SEQ ID NO: 106659 - DNA, 11724 bp, synthetic construct
  misc_feature 1..11724: note = Description of Artificial Sequence: Synthetic coding sequence
  source 1..11724: mol_type = other DNA
atggaggacgaggagagacagaaaaagctggaagcaggaaaagctaagctggcccagttccgtcagagaaaagcacagagcgacggacagagccctagcaaaaagcagaagaagaaaagaaaaacgtcaagcagcaagcatgatgtgagtgcccatcacgatctgaatatcgatcaatcacagtgtaatgaaatgtatataaactcctcccaacgcgtggagagtacggtcatacccgagagcaccatcatgaggacgttacacagtggtgagattacctcgcacgaacagggtttcagcgtggagctcgagtccgagatttctactaccgccgacgactgctcctccgaggtaaacgggtgttctttcgtgatgagaaccggcaagccgacaaacttattgcgggaagaggagttcggagtggatgacagctattccgagcagggtgcgcaagactcacccacacacctcgaaatgatggagtcggagttggccggcaaacagcatgagattgaggagttgaatcgggaactggaggaaatgcgcgtcacatatgggaccgagggcctccagcagctccaggagtttgaggcagcgataaagcagcgggatggcattataacacaactgactgccaaccttcagcaggctcgaagagagaaggacgagacaatgcgagaatttctggagctgactgaacagtcccaaaaactgcagatccaatttcaacagctgcaagccagtgaaacacttcggaactccacgcacagctcaactgcagcagacctattgcaagcaaaacaacaaattctgacacatcaacagcagctggaggagcaagaccacttgctcgaagattaccagaaaaagaaggaggactttactatgcagatttcctttctccaggagaagataaaggtctatgaaatggagcaggataaaaaagtggaaaacagcaataaggaagagatccaggagaaggagaccatcatcgaagaactcaataccaagatcatagaggaggagaaaaaaactctcgaacttaaggacaaactaactacagccgataaactcctcggggagctgcaagagcagatcgtccagaagaaccaggaaatcaagaatatgaaacttgagttgaccaacagtaaacagaaggagagacaatcttcggaggaaattaagcaacttatggggacggtcgaggagctacagaagagaaaccataaagactctcagtttgagactgacatcgtacagcgcatggagcaggagacgcaacgaaaattagaacagttgcgggcagagctcgacgaaatgtatggacagcagattgtccaaatgaagcaagagttgattcggcagcatatggcacagatggaagaaatgaaaacacgtcataagggcgagatggaaaatgcacttagaagctattcaaacattacagttaacgaggaccagattaagcttatgaatgtggctatcaacgaactgaacatcaagctacaggatactaacagccagaaggaaaaactgaaggaagagttggggctcatactcgaggagaagtgcgcgttgcagaggcagctcgaggacctcgtggaggagctgtccttttcaagagagcagattcaacgcgctagacaaacaatcgctgaacaggagagcaaactgaacgaggcccataaatcactctccactgttgaggatctgaaagccgagatcgtttcagcttcagagtcgcgtaaagaattggaactaaagcacgaggccgaggtaaccaactacaagatcaaacttgagatgctcgagaaggaaaagaacgccgtgctggatcggatggcggagtcgcaggaggccgagttggaaagacttcggacgcaactgctcttttcccatgaggaagagctgtccaagctaaaagaggatttagagattgaacacaggattaatatagagaagctgaaagataacttgggtatccattacaagcaacagattgacggactgcagaacgagatgtcacagaagattgaaacgatgcagttcgaaaaggataacctgatcacaaagcagaaccaattaatactggagatttctaaactcaaagacctgcagcagtccctggtgaacagcaaatccgaggaaatgaccttgcagatcaatgagcttcagaaagagatcgagatactgaggcaggaagagaaagaaaaaggcaccctggaacaggaggtacaggaactgcagctgaaaaccgagcttcttgagaagcaaatgaaggagaaggagaacgatctacaggagaaatttgctcagctggaggcagagaattcgatcttaaaggatgagaagaaaacactggaagacatgttgaaaattcacacccctgtgagccaggaagagcgactgatctttcttgactctataaagtccaagtcgaaagacagcgtttgggagaaggaaatcgagattctcattgaagagaatgaggatcttaagcagcagtgcatacagctgaacgaagagatcgagaagcaacgaaatactttcagctttgccgagaaaaactttgaggtaaactaccaggagctacaggaagagtacgcttgtttgctaaaagttaaagacgatctggaagattccaagaacaagcaagagctagaatataagtctaagctcaaggcactgaatgaagagcttcacctccagcgtattaatccaactaccgtcaagatgaagagctctgtgttcgatgaagacaaaacattcgtggccgagacactggaaatgggcgaggtcgtcgagaaggacactactgaactgatggaaaaactagaagtcacgaagagagagaagctcgagctttcccagaggctgtcggacctatctgaacaactcaaacaaaaacatggagagatcagttttctgaatgaggaagttaaatccttaaagcaagagaaagagcaggtctcacttcggtgccgagagctcgagatcattattaatcacaatcgggccgagaacgtgcaatcttgtgacacacaggtaagctctttgctcgacggggttgtgactatgaccagcaggggcgctgaaggaagcgtgagtaaagtgaataagtcattcggtgaagagagcaaaatcatggtggaagacaaagtctcatttgagaacatgacagtgggtgaagaatcaaaacaggaacaattgatcctggatcacctcccctctgtgacaaaagagtcttctttgagggctacacaacctagcgagaatgataaactgcagaaggagctaaacgtgctgaagtccgaacagaacgaccttcggctgcagatggaagcacaacggatctgtctgagtctggtctactccacacacgtcgatcaggttcgagaatacatggagaacgaaaaggacaaagccctgtgctccttgaaagaggaacttatctttgcccaagaagaaaagataaaggagctgcagaagatacatcagctggagctgcaaactatgaagacacaggaaaccggagatgaagggaagcccctgcatttgctgatcgggaagcttcaaaaagccgtatctgaagagtgcagttacttcctgcagactttgtgttccgtcctcggtgagtactacactcccgccctgaagtgtgaggtcaatgcggaagacaaggagaatagtggcgattatatttctgagaacgaggacccagaactgcaggattacaggtacgaggtgcaggattttcaggaaaacatgcatactcttttaaacaaggtgacggaagaatacaacaagctactggttctccagacacgactcagtaaaatctggggacagcagaccgatggcatgaagttggagtttggagaggagaatctgcctaaggaggagaccgagttcctgagcatacattctcagatgaccaacctggaagacattgatgtaaaccacaaaagtaaactgtcctccttgcaggacctggagaagactaaactggaggaacaggttcaggagctcgagtcgttaatatcatctctccagcagcagctgaaggagacagagcagaattacgaagccgaaattcactgtctgcagaagagactgcaggcagtcagcgagtccactgtcccaccatctctgcctgtggactcagtggtaataaccgagtcagacgcccagagaaccatgtatcctggatcctgcgtgaagaagaacatcgatgggaccattgagtttagtggtgaattcggggtcaaggaagagaccaatatcgtgaagttgctggaaaagcaataccaagaacagctggaggaggaagtggctaaagtgatagtgagtatgtctatagcattcgcacaacagactgagctttccagaatcagcggaggtaaggagaataccgcctccagcaaacaggcccacgccgtttgccagcaggaacaacactacttcaacgagatgaagttgagccaggaccagattggtttccagacttttgagacagtggatgtgaagttcaaggaggaattcaaaccgctgtcaaaggagcttggggaacatggcaaggagatcctgctgagcaactccgatcctcacgacattcccgagtccaaggactgtgtgctcactatttcggaagagatgttttcaaaggacaagacttttattgtgagacaaagcattcatgacgaaatttcagtctcttcaatggatgcctcccggcagctcatgctgaatgaggagcagctggaggacatgagacaggagctagttagacaataccaggaacatcaacaggccactgaactcctgaggcaggctcacatgcgacagatggagcggcagagagaagatcaggagcagctgcaggaagagataaagcgactcaaccgccagctggcacagcgaagtagcatcgataatgagaatctagttagcgagcgagagagggtactgctagaggaacttgaggctctgaaacagctgtccctagctggcagggaaaaactgtgttgcgagctgcgtaacagctccacgcagacacagaacggcaacgaaaaccagggtgaggttgaggagcaaactttcaaagagaaagaactggaccgcaagccagaggatgtgccgcccgaaatccttagcaacgagcgttatgcattgcagaaagccaataacaggcttctcaaaatactcttggaagttgtgaaaactactgcggccgtcgaggaaactatcggcagacatgtcctgggcatactggacagaagttctaagtctcaatcttcagccagtctaatctggcggagcgaggccgaagccagcgttaaaagctgcgtacacgaggagcatactcgcgtgacagatgaatcaatcccatcttacagtggttccgatatgccacgaaacgatatcaatatgtggtcaaaggttacagaggaagggaccgaactctctcaacgtcttgtgcgatctgggttcgccgggacagaaatcgatcctgagaatgaggaactgatgttgaatatctccagccgtctgcaggctgcagtggaaaaactgttagaggctatcagcgaaacaagctcacagctggagcatgccaaggtgacccagacagagcttatgagggagtcttttcggcaaaagcaggaggcgactgagagtctgaaatgccaggaggagttgagagaacgtctgcacgaggagtcccgcgcacgagagcaactagctgtggaactgagcaaggctgaaggcgtgatcgacgggtacgcagatgagaagacgcttttcgagcggcagatacaggagaagaccgacattatcgaccggttagaacaggagctgctgtgcgcatccaatagattgcaggaactggaagctgaacagcagcaaatacaggaggaacgcgagttgttatcacgccagaaggaggctatgaaggccgaagcaggaccggtagagcagcagctccttcaagagactgaaaagctgatgaaagaaaaactcgaggtgcaatgccaagccgaaaaggtcagggatgacctgcagaaacaagttaaagccctggagatcgacgtcgaggagcaagtgtcaagatttatcgaactggaacaggagaagaacactgagctgatggatcttcgtcagcagaatcaggccttagagaaacagctggaaaagatgaggaagtttctggatgagcaggcgatcgatagggagcacgagcgtgatgtgttccagcaggagatacagaagttagaacagcagcttaaagtggtccccaggttccagcctatcagcgagcaccagacccgagaagttgagcagttggccaatcatctcaaggagaagactgacaagtgcagcgaactgctgctgagcaaggagcagctgcagcgggacatccaggagaggaacgaggaaattgaaaaattggaatttagagtgagagaactggagcaggccctcctcgtgtctgccgacacctttcagaaggtggaagaccgcaaacacttcggcgcagtggaagccaagcccgaactgtcattagaggtacagctgcaagccgagagagatgccatcgaccgcaaagagaaggaaattaccaacctggaagaacaactcgaacagtttcgggaagagcttgaaaacaagaatgaggaggtccagcagctgcatatgcagctcgagatccaaaaaaaggaaagtactacccggttgcaggaactggaacaagaaaacaagctgtttaaagatgacatggaaaaactgggacttgctatcaaagaaagcgacgcaatgtctacccaagaccagcacgtgttatttgggaagtttgcacaaataatacaggagaaggaggtggaaattgaccaactaaacgaacaagttactaagttgcaacagcagcttaaaattactaccgacaataaggtcatcgaggagaagaatgaactcatacgggatcttgagactcagatcgagtgcctcatgtctgaccaggagtgcgtcaagcgcaatagagaggaggagatcgagcagctgaatgaagttatagaaaaactgcaacaggagctcgctaacattgggcagaagacatccatgaacgcacactctcttagcgaggaggctgacagtctgaagcatcagctggacgttgtgattgcagagaaactagcactcgaacagcaggtcgaaacggctaacgaagaaatgactttcatgaagaatgtgctaaaagagactaattttaaaatgaatcagttgacacaagagctcttcagtttgaaacgtgaaagggagagcgtggaaaaaatccagagtatcccagagaacagcgtaaacgtggctattgaccacctgtccaaggataaacccgagctcgaggtggtgctgaccgaggacgcgttgaaatcactggaaaatcagacgtactttaagtcattcgaggaaaatgggaagggctcaatcattaatctggagactcgcttactccagttggaaagcacagtcagcgctaaggacctggaactgacccaatgctacaaacagatcaaggatatgcaagaacagggccagtttgaaaccgagatgcttcagaagaaaatcgtgaatcttcagaagatcgtggaggaaaaggtagccgccgctttggttagccaaattcaactggaagcagtgcaggagtacgcaaagttctgtcaagataatcagaccataagctctgagcctgaacggacaaatattcagaacttgaaccagctgcgtgaagacgagctcggtagcgacatcagtgcgctgactctccggatttccgagttggaaagtcaggtggttgaaatgcatacatcactcatcctggaaaaggagcaggtggaaattgccgaaaaaaacgtcctcgagaaagaaaagaaactgttagagctccaaaagctgctggaggggaacgaaaaaaagcagagagagaaggaaaagaagaggtcaccacaggacgtggaggttcttaagacgacgactgaattgttccactccaatgaagaatctggcttcttcaacgagctggaagccctgcgggcagaaagtgtcgcgactaaggcagaactcgcctcctacaaagaaaaggctgagaagcttcaggaggaactgcttgtaaaagagaccaatatgacaagcctacagaaggatctctcacaggtgagggatcacctggccgaggccaaggagaagctgtctatccttgagaaagaagacgaaaccgaggtgcaggagagcaagaaggcctgcatgtttgagcctcttccgatcaagctctctaagtcaatcgcctctcagacagacgggacactgaagatatcctccagcaaccagaccccacaaattttggtgaagaatgcgggaatccagatcaatctgcagtcagaatgcagtagtgaagaggtcacggagatcatatcccagttcaccgagaaaattgaaaagatgcaagagctgcacgcggcagagatcttggacatggaatccagacacattagcgagactgagacgctgaagcgcgagcactacgtcgctgtccagctgctgaaggaggagtgtggtaccttgaaagccgtgatccaatgcctgcgctcaaaagaggggtccagcattccagagctggcccactctgacgcgtaccaaacaagggagatttgcagctccgacagcggcagcgactgggggcagggaatctatctgacccatagtcagggattcgatattgctagtgaagggaggggagaggaatcagaaagcgccacggacagtttccctaaaaagatcaaggggctactacgggctgttcataacgagggcatgcaggtgctgtccctaacagagagtccctactcggacggggaggaccactccattcagcaagtgtcagaaccatggttggaggagcggaaggcatacattaacactatttcctcgctgaaagacctgatcacgaagatgcagctccagcgggaggccgaggtgtacgatagtagtcagagccatgagtctttttcggactggaggggcgagcttctgcttgcactgcagcaggttttcctcgaggaacggtctgttctacttgccgccttcagaacagagctgaccgccttgggaacaaccgacgccgttggactgttgaactgcctcgagcagcggatccaggaacagggcgtggaataccaggctgccatggaatgcttacagaaggctgataggcggtcccttcttagtgagatccaggctctgcacgcccaaatgaacgggaggaagattacccttaaacgagaacaggagtctgagaaaccctcccaggagcttctagaatacaatattcaacagaaacagagtcagatgctggaaatgcaggtggagctgagcagtatgaaagaccgggccacagagctccaagagcagctcagtagcgaaaaaatggtcgttgctgagttgaagagcgagctcgcccaaacaaaactggagctggagaccacacttaaggcgcagcacaagcacctgaaggagctggaagccttcagactggaagtgaaggacaagaccgacgaggtgcacctcctgaacgacacactcgcttctgaacagaaaaaaagccgcgagcttcagtgggctctggaaaaggagaaagctaagctgggaagaagcgaggagcgcgataaggaggagttggaagatctgaaattcagtttggagagtcaaaagcagaggaatctgcagttgaatctccttcttgagcagcagaaacagttgctcaatgaaagtcagcagaagattgaaagccagagaatgctgtatgacgcacagctgtccgaagagcaagggcggaacctggaacttcaggttctcctagagtcagaaaaggtgcgtatccgggagatgtcatccaccttggaccgcgagagagagctgcacgcccagttgcagtcctccgacggtacaggtcaatccaggcccccattgcccagtgaggaccttctcaaggaactgcagaagcagctcgaggagaaacattcgcgaattgtggaactattgaatgagactgagaaatataaactggactcacttcagaccaggcagcagatggagaaggaccgccaggtgcacaggaaaaccctccagactgagcaggaagctaataccgaaggccagaaaaaaatgcacgaactgcagtccaaagtcgaagatctgcagcggcagctggaagagaaacgacagcaggtgtataagctggacttagaagggcagcgtctgcagggaattatgcaagagtttcagaaacaggagctcgagagagaggaaaaacgggaaagccgaagaattctgtaccaaaaccttaacgagcccaccacgtggagcctgacatccgatcgaacaagaaactgggtcctccagcagaagatagagggcgagactaaggagagcaattacgccaaactgatagaaatgaacggaggcggcacaggatgtaaccatgaactcgagatgattcggcagaaactccagtgcgtggcaagtaaattgcaagtcctgccacagaaagcgtccgagagactgcagttcgaaacagcagacgacgaagacttcatctgggtgcaggagaacattgatgagattatcctacaactgcagaaactgacagggcagcagggagaggaacccagccttgtgagccctagcacctcatgtgggagtctgactgagagattactaagacagaacgcagaattaaccggacacatttctcagctcacggaggaaaagaacgacctccggaatatggttatgaaactggaagagcaaatcaggtggtataggcaaactggcgcaggccgtgacaattctagccggttttctttgaacggcggcgccaacattgaggccatcattgcctctgaaaaggaggtctggaatcgagagaagcttacgctgcaaaaatctcttaagagggcggaggcagaggtctataagctgaaggcagagctcaggaacgattctctgctgcagaccttgtcccccgattcggagcacgtcactctgaagcgtatttatggtaagtatttacgcgctgagtccttccgtaaggcgctaatttatcagaaaaaatacctcctgctcctgctcggaggctttcaggagtgcgaggatgcaactttggcacttctcgctagaatgggaggtcagcccgctttcactgatctggaggtcattactaaccggcctaagggttttacacgatttcggtctgccgtgcgggtgtctattgccattagtaggatgaaattccttgtgcgcagatggcacagagttactggctcagtgtctatcaatatcaacagagacggatttggtctcaatcaaggtgccgaaaagaccgatagtttctaccatagtagcggaggcctcgagctctacggcgagccccgtcacaccacctatagaagtcggtctgacctagattacatccggtcaccattgccattccagaatcggtatcccgggaccccagcggacttcaatcccggatccctcgcttgtagtcagttgcagaactatgatcctgacagagccttaaccgactatattaccaggctcgaggcgctgcaaagacgattaggcactatccaatcgggaagtacaacgcagtttcatgcgggaatgcggagatag

SEQ ID NO: 106660 - DNA, 11574 bp, synthetic construct
  misc_feature 1..11574: note = Description of Artificial Sequence: Synthetic coding sequence
  source 1..11574: mol_type = other DNA
atggaggatgaggagcggcagaagaagctagaggccgggaaagccaaaatcgaagagctgagcctcgccttcctggtacgccaacttgctcagtttcgtcagagaaaggcccagtccgacggacagtcaccgtccaaaaagcagaagaaaaaacgaaaaacgagctctagtaagcacgatgtaagcgcccaccacgatcttaacatcgaccaatcacagtgcaatgagatgtatattaactctagccaacgggtcgaaagcacagtaatacccgagtcaacaattatgcgtacattgcatagcggggaaatcacctctcacgagcaggggttctctgtggagcttgagtccgagatctctaccactgccgacgactgcagtagcgaagttaatggctgtagcttcgtgatgagaaccggcaagccaactaatctgctccgcgaggaggagtttggcgtagatgactcctactccgagcagggggcacaggacagccctacccatctcgagatgatggagtcagagcttgcaggaaaacaacatgaaatcgaagagttaaatcgcgaactagaagagatgcgcgttacctatggcactgagggactgcagcagctgcaggaattcgaagctgcaatcaaacagagagacgggattatcacccagctgactgccaatctgcagcaggctagacgagagaaggacgaaactatgcgtgagttcctcgagctgaccgagcagagccagaaattacagatccagtttcagcagctccaagcctccgaaacactccgcaattctacacactcgtccaccgccgccgacctgttgcaagctaaacaacaaatacttacacaccaacagcagcttgaggaacaagatcatctactggaggactatcagaaaaaaaaggaggactttacgatgcagatctcattcttacaggaaaagataaaagtatatgaaatggagcaggataagaaagtggagaattcgaataaagaagagattcaggagaaggagaccattatcgaagaactgaacactaaaattattgaagaagagaagaaaacattagagcttaaagacaagttaacgactgccgacaagcttctgggagagctacaggagcagattgtccagaaaaaccaggagatcaaaaacatgaaactcgaactgacaaattccaaacagaaagagaggcagagcagcgaagagattaaacaactgatgggaactgttgaagagctgcagaagagaaaccacaaggactcccagtttgagaccgatatcgtccaacgcatggagcaagagacccaaagaaagctggaacagttaagggctgagcttgacgaaatgtacggacagcaaatcgtgcagatgaagcaggagcttatccgtcagcacatggcccagatggaggagatgaaaacccggcataaaggggagatggaaaatgccctcaggtcctattcaaatatcactgtgaatgaggaccaaataaaacttatgaacgtcgctataaacgagctgaatattaagctgcaggacaccaattcccagaaggagaagctcaaggaggagttgggactgatactcgaggagaagtgtgccctccagagacagctagaagatctggtcgaggagctgagtttctccagagaacagatacagagagcccggcagacgatcgcggagcaggaaagtaagctcaacgaggcacacaagagtttgagtacagttgaggatctgaaggccgaaattgtatctgccagtgaaagccgcaaggaattggagttaaaacatgaggctgaggtgactaattataagattaaactggaaatgctggagaaggaaaagaatgcagtcctggataggatggctgagtcccaggaggcggagctcgagcggctgcggacgcagctgttattcagccatgaggaagaactttccaagctgaaagaggatcttgaaatagaacaccgaattaacatcgagaaattgaaggacaatcttggaattcactacaagcaacagatcgatggtctgcaaaacgaaatgtcccagaagattgaaacgatgcagttcgagaaggacaacttgatcaccaagcagaaccaattgatcctggagatctccaaattgaaagatctgcagcagtctctggtaaactctaagtctgaagagatgacactgcagatcaatgaactgcagaaggagatcgagatcctgagacaggaagagaaagagaaaggaactcttgagcaggaagtgcaagagttacagctgaaaactgagcttcttgagaaacagatgaaagaaaaggaaaacgacttgcaggaaaagttcgcccagctcgaagctgaaaatagcatcttaaaggatgagaaaaagactctagaagacatgttaaaaatccataccccggtctcacaggaggaaaggctcatcttcctagactctatcaagtccaaaagcaaggatagcgtctgggaaaaggagatcgagatcctcatagaggagaacgaggacttgaaacaacagtgcatccagcttaatgaggagatcgaaaagcagcgtaacaccttttcctttgccgaaaaaaactttgaagtgaactatcaggaactccaggaagagtacgcatgcctgctcaaagtaaaagacgacctggaggatagtaagaacaaacaagagctggagtacaaaagtaagctaaaggctctcaatgaagagttgcaccttcagcgtattaatccaaccacagtcaagatgaaatcatctgtgttcgacgaagacaagacttttgtggccgaaacattggagatgggggaagttgtggagaaggacacaacagagttgatggagaagcttgaggtgaccaagcgggaaaaattggagctgtcacagcggttaagcgacctgtcggagcagttaaaacagaagcacggcgaaatcagtttcctgaacgaggaagttaagtcactgaagcaggaaaaggagcaggtctctctcagatgcagggagctggagattattataaatcataacagagctgaaaatgtccagtcctgtgacacacaagtctcttcgctactggacggggtggtcaccatgacttcgcgaggcgctgagggcagtgtttccaaagttaataaaagctttggagaagagtcaaaaatcatggtggaggacaaggtctcttttgagaacatgaccgtgggcgaggaaagcaaacaggagcagcttatcctggatcacctcccttccgtgaccaaggaatcttcactgagggccacgcagccctctgagaacgacaaacttcagaaggaactgaatgtgctaaagagcgagcagaacgacttacgactgcagatggaagcccagcggatctgcctgtccctggtgtactccacccacgtggatcaagtccgggaatacatggagaacgaaaaagacaaagcactttgttcactgaaagaggagcttatctttgcccaggaggaaaaaatcaaagagttacaaaagatccaccaattggagctgcagaccatgaagacacaggagaccggcgacgagggcaagccactgcacctactaatcggcaagctgcagaaggctgtaagcgaggagtgtagttatttcctgcagactctgtgtagcgtgttgggcgaatattatactcctgcacttaaatgcgaagtgaacgcagaggacaaggaaaattcaggggattatatctccgaaaacgaggaccctgaactacaagattacagatatgaagtgcaggatttccaggagaatatgcacactctgctgaacaaggtcacagaggagtacaataagctgctagtattgcagacacgactatctaagatttggggacaacagactgacgggatgaagttggaatttggggaggagaaccttcccaaggaggagacagaatttctatcaattcactcccagatgaccaatctggaggacatcgatgtgaatcacaagagtaagctgtcgtccctgcaggatctggagaagacaaagctggaagaacaggtgcaggagttggagagcctgatctccagcctacagcagcagttgaaagagactgagcagaattacgaggccgaaatccattgcttacagaaacgcttacaggcagttagcgagtctaccgtgcctccctccctccctgtggattccgttgtcatcactgaaagtgacgcccaacgaaccatgtatccgggcagctgtgtgaagaagaatattgatggcaccatcgagttctccggcgaatttggagttaaggaggagactaatatagtcaaattgctggaaaaacaataccaggagcagctagaagaggaagttgcaaaagtaattgtttctatgtccatcgcatttgcccagcagactgagctgtccagaatctcagggggtaaggaaaatacggccagctcaaagcaggcccatgctgtttgtcagcaggaacagcattattttaacgaaatgaagctttctcaggaccagattggctttcagacttttgagactgtggacgtgaaattcaaggaggagttcaagcctctgtctaaggaattgggagagcacggcaaggaaatcctcctttcaaactccgatccccacgatatccccgagtcaaaggattgtgtgctgacgatctccgaagagatgtttagtaaggataagaccttcatcgttaggcagagcattcatgacgaaatctccgtgtcctcgatggacgcttctaggcagcttatgttgaatgaagaacaacttgaggatatgcgacaagaactcgtgcgccaatatcaggaacaccaacaggcaacagaacttctgcgccaggctcacatgcgacagatggagaggcaacgggaagaccaggagcaattacaggaggagattaagcggctcaataggcagctggcccagagatctagcattgacaacgaaaacctggtatccgagcgggagcgcgttctcctggaggaactggaagccctgaagcagctgtccctcgccggtcgggagaaattgtgctgcgaactgagaaattcaagcacccagacccagaacggcaacgagaaccagggcgaggtggaggagcagacatttaaggagaaagagctggatcggaagccagaggatgtgcccccagaaattttaagtaatgaacggtatgccttgcagaaggccaataatcggctgttgaagattctgctcgaagtagttaaaaccactgccgcagtggaagaaacgatcggtaggcatgttctcgggatcctagaccgtagctcaaagtcacagagcagcgcctcactcatctggcgcagtgaggctgaggccagtgtcaagagctgtgtccatgaggagcatacaagagtgaccgacgaatctattccatcatatagcggatcagatatgccgagaaacgatatcaacatgtggagcaaggtaacagaggagggtacggagttaagtcagcggttggttcgcagcggatttgcagggactgagatcgaccccgagaacgaggagctcatgctcaacatcagcagccggctgcaggctgccgttgagaaactgcttgaggccatatcggagacctcctcacaactcgaacacgcaaaggtcacccagaccgagctgatgcgggagagttttcgtcagaagcaggaggcaacggaatctctgaagtgtcaggaggagctgcgagagaggttgcacgaggagagccgcgcccgcgagcagctcgcagttgaactctccaaggcagagggtgtgatcgatgggtacgcagatgaaaagaccctgttcgaacgtcagatacaggagaagacggacatcatcgatagactggagcaagagttgctgtgcgcgagcaaccgactgcaagaacttgaagccgaacagcaacaaattcaggaggagagggaactcctctcccgtcagaaggaggccatgaaggccgaggcgggacctgtcgagcagcagttgctccaagagacggaaaagctgatgaaagagaagctggaagtgcaatgtcaggccgaaaaagtaagagatgatctgcaaaaacaagtgaaggcactcgaaatcgacgtcgaagaacaggtcagtcgcttcatcgaactggagcaggagaagaataccgaactgatggacttacgccagcaaaatcaggccctagaaaaacagctggaaaagatgcggaagttcttagacgagcaggctattgatcgcgagcatgaacgggatgtgttccagcaggagatacagaaattggagcagcagctaaaagtggtgccacggtttcaacctatcagtgagcatcagacccgcgaggtggagcaattagccaatcacctaaaagagaagactgacaagtgctccgagctgctgctgtcaaaagagcaactgcagcgcgatatacaagagcgtaatgaagagatagagaaactcgagttccgggtgagggaactcgagcaggctcttctggtttcagccgataccttccagaaggtggaagaccgcaagcattttggtgctgtggaggctaaaccggaactgtccttggaggttcaattacaggctgaacgggacgccattgaccgtaaagagaaggaaatcaccaatctggaagagcaacttgaacagtttagagaagagctggaaaacaagaatgaggaggtgcagcagttgcatatgcaacttgaaattcaaaaaaaggagagtacaactcgattgcaagagttggagcaggagaacaagctgttcaaggatgatatggaaaagctcgggctggcgataaaggaaagtgacgcaatgtccacccaagaccagcacgtcctgtttgggaaattcgcacagattatccaggagaaagaagttgaaatcgatcagctaaacgagcaggttaccaaactccagcagcagctcaagatcaccactgataacaaggttatagaggaaaagaatgagctaatccgggatctcgaaactcagatcgagtgcctgatgtccgatcaggaatgcgtgaagagaaaccgggaggaagagatagagcagctgaacgaggttattgaaaaactccagcaggaactggctaacatcgggcagaaaacatcgatgaatgctcattctctgtctgaggaggctgattctttaaaacatcagctggatgtagtcatcgccgaaaaactcgcacttgagcaacaggtagaaacggccaacgaagagatgactttcatgaaaaacgtccttaaggaaactaatttcaagatgaatcagctgacccaggagttgttctctctcaaacgggaaagggagtctgtggagaagattcagtccattcctgagaatagtgtgaacgtggctatcgatcacctatccaaagataagcctgagcttgaggtggtgcttaccgaggacgcactgaagtcccttgagaatcaaacctatttcaaatccttcgaagagaacggcaagggtagcataataaaccttgaaacaaggcttttgcagctggagtcgacagtctcggctaaagacctggagttaacacaatgttataagcagattaaagacatgcaggaacaggggcaattcgaaacagagatgcttcagaaaaagatcgttaatttacagaagattgtcgaagaaaaagttgctgccgctttggtgtcacagatccagctcgaagctgtccaagagtacgccaagttctgtcaggacaatcaaacgatcagcagcgagcccgaacgaaccaacattcagaatctgaatcagctcagggaagatgagctggggagcgatattagcgccttgacgctgcggattagcgagctggagagccaggtggtggagatgcatacatcccttatcttggagaaggagcaggtagaaattgccgagaagaatgtactggagaaggagaagaagctattagagctgcagaaacttcttgagggaaatgagaaaaagcagcgcgagaaggaaaaaaaaaggtcccctcaggacgtggaagtgttgaagactactactgagctttttcattcaaacgaggaatctggttttttcaacgaactcgaggcactacgggcagagtccgtcgcgacaaaggcagagttagctagttacaaggagaaagctgaaaaattgcaagaggaattgctcgtgaaggaaacaaacatgacctcccttcaaaaagacctgagccaagtcagagaccaccttgctgaagccaaagaaaagctttctatcttggaaaaagaagacgaaacagaagtgcaggaatcaaaaaaggcatgtatgttcgagccactgcctatcaagctatcaaagtcaatcgccagtcagacagacgggacgctaaagatatcttcgagtaaccagaccccacagatcctggtgaaaaacgctgggatccagatcaatctgcaaagcgagtgtagctctgaagaggtcaccgagatcattagccagtttacagagaagattgagaagatgcaggaactccacgccgcagaaattcttgacatggagtctaggcacatcagcgagacagagactctgaaaagggaacactacgtagcggtgcaattgctgaaagaggagtgcggaacattaaaggccgtgatccagtgcctgcggtctaaagagggactgctgcgggccgtgcacaatgaggggatgcaggtgctgtccctgacagagagcccctattctgatggggaagaccactccattcagcaggttagcgagccttggctggaagaacgcaaagcctacattaacaccatatcttcccttaaagacctgattaccaaaatgcagctccagcgcgaggccgaggtctatgacagcagtcagtcacatgaatcattcagcgattggcgtggtgaattgctgctagcactgcagcaagtttttctggaggaacgcagtgtgctgctggcagccttccgcaccgaattgacggctctcggcactaccgatgccgtcggtctgttaaactgtctcgagcagcgcattcaggaacagggcgtggaataccaagccgcaatggagtgtctgcagaaggcagaccgacgcagcctcctgtctgagatccaggccttgcatgctcagatgaacgggaggaaaatcacactcaagagggagcaagaaagcgagaaaccgtcccaagagctgttagagtacaatatacagcagaaacagagccagatgttggaaatgcaggtcgagcttagtagcatgaaggacagggcaaccgagcttcaagagcagctgtcatcggagaaaatggtggtagctgaactgaaatctgaactggcacagaccaagttagagctcgagactacgctgaaggcccagcataagcaccttaaggaacttgaagcatttaggttggaggtgaaggacaagactgatgaagtgcacctgctcaacgataccctcgcaagcgagcaaaagaagtcacgcgaacttcagtgggctctggaaaaagagaaggcgaagcttgggagatctgaagaaagggacaaagaagagttggaagatctaaaattctccctcgaatcacagaaacagcggaatctgcagctaaacctgttgttagagcagcagaagcagctcctaaatgagtcacaacaaaagatcgagtcccagcgcatgttgtacgacgcccagctctccgaggagcaaggcagaaatctcgagctccaggtacttctcgagtccgagaaggtgcggattagggaaatgagcagcacactcgaccgggagagagaactgcacgctcagctgcaaagtagcgatgggactggtcaaagtaggcctccattacctagtgaggacctattaaaggaactccagaagcagctggaggaaaaacacagccggatagtggagctgctgaacgagactgaaaaatataagttagacagccttcagactaggcagcagatggagaaggaccggcaggtgcaccgtaagactctccagactgagcaggaggcgaacaccgaagggcagaaaaaaatgcacgaacttcaaagtaaggtcgaagacttgcagagacagctggaagagaaacgacagcaggtttataagctggatttggagggtcagaggctgcagggaatcatgcaggagtttcagaagcaggaactggaaagagaggagaaacgcgaatcccgcaggattctctaccagaacttgaatgagcccacaacgtggagccttacctccgaccgtactaggaattgggtgcttcagcagaaaattgaaggcgagacgaaggagtcgaactacgctaaactgatcgaaatgaacgggggcgggactgggtgcaatcacgagttggagatgatcaggcagaagttacagtgcgtggcctctaagcttcaagtgctcccgcagaaggctagcgagcggctacagttcgagacagccgacgatgaagactttatctgggtgcaagaaaatatcgatgagatcattctgcaactccagaaattgacaggccagcagggcgaggagccctcgcttgtgagcccttcaaccagctgtgggagtctgacggagcggctgctacgtcagaacgctgagcttactgggcacattagccagttgaccgaagaaaagaacgaccttcggaatatggtcatgaagctagaggagcagattagatggtaccgccagacgggtgctggtagggataacagttcaagattcagcctgaacggaggggccaatattgaagctattatagcatctgagaaagaagtgtggaatcgagagaaactaactctgcagaagagtctgaaaagggcagaggccgaggtatacaagctgaaggccgaactgagaaacgacagtctgctgcagacgttgagccccgatagtgaacacgtcaccctgaaacggatttatggaaagtacttgcgtgccgaatcattcagaaaagcactgatctaccagaaaaaatacttgttgctgttactcggcggattccaggagtgcgaggatgccacactggccttgctggcaaggatgggcggccagcccgcatttactgacctcgaagtaatcaccaaccgccccaaaggattcactcggttccgatccgctgtgcgcgtgtccattgccatcagcagaatgaaattcctggttaggcggtggcacagggtcactgggagtgttagcatcaacatcaatagagacgggttcggtctcaatcaaggtgctgaaaagacggactccttctatcattcttcaggcggactggaactctacggggaaccccgccacacaacttatagatctagaagcgatttggattacatccgatcccccctgccttttcaaaacaggtacccaggcacccctgcagactttaatcccggatctctggcttgtagtcaactacagaattacgatcctgaccgcgctctcacggactacattaccaggctcgaagcactccagcgacgactgggaaccatccagagcggtagcactacacaatttcacgccggcatgcgaaggtag

SEQ ID NO: 106661 - DNA, 11736 bp, synthetic construct
  misc_feature 1..11736: note = Description of Artificial Sequence: Synthetic coding sequence
  source 1..11736: mol_type = other DNA
atggaggacgaagaaagacaaaagaaactggaggccgggaaagctaaaatagaagaattatctctagcatttctggttcgtcagctggcccagtttcggcagagaaaggcccagtccgatggccagagcccctcaaaaaaacaaaagaagaagcgcaaaacctctagctccaaacatgacgttagcgcgcatcacgatctgaatattgaccagtctcagtgcaatgagatgtacataaactcctctcagagagtggaatccaccgtgattcctgagtctaccattatgaggacgttgcactctggggagataacctcgcacgaacaggggttcagtgtggaactcgagtctgaaatatctacaaccgccgacgattgctcctctgaggtcaatggctgttcctttgtcatgagaaccggaaaacccactaatctacttcgcgaggaggaattcggggtggacgatagttactctgaacagggagcccaagactccccgacgcatctcgagatgatggagtcagaattggctggcaaacagcacgagatcgaggagctaaatagggagctggaagaaatgagagtgacttacggcacggagggcttgcaacagctgcaagagtttgaggcagccatcaaacagcgggacgggattataacgcaattaacggctaacctgcagcaggcacgccgggaaaaggatgaaactatgcgggaattcctggagctaacggaacagtctcagaagcttcaaatccagtttcagcagttacaggcatctgagacgctccgcaatagcacccacagtagtacggccgcggacctgctgcaggccaaacaacagatcctgacgcatcagcagcagctggaagaacaggaccacctcctggaagattaccagaagaagaaggaggactttaccatgcaaatcagctttctccaagagaagatcaaggtgtacgaaatggagcaggataagaaagtggagaacagcaataaggaagaaatacaggaaaaggaaaccatcatcgaagaactgaacacaaaaattatcgaggaagaaaaaaaaaccctggaactgaaagataagctcaccaccgcagacaaattgctaggggagttgcaggagcagatcgtgcaaaagaatcaagagatcaagaatatgaagctggagcttactaatagtaaacaaaaggaacgtcagtctagcgaggagatcaaacagcttatggggaccgttgaagaactccagaagcgcaaccataaggactcacagtttgagaccgacatagtccagagaatggagcaggagactcagcggaaactggagcagttaagggccgaactggacgagatgtacggacaacagatcgtacagatgaagcaagagctgatcagacaacatatggctcagatggaagagatgaaaaccaggcacaaaggcgagatggaaaatgccctacgttcatattccaatattacggtcaacgaagatcaaattaagctaatgaatgttgctatcaatgaactcaatattaaattgcaggacaccaattcccagaaggagaagctgaaggaggaacttggactcatactggaggagaagtgtgctttacagcgacagctggaggatcttgttgaagaactctctttttcccgcgaacagatccagagggctcggcagaccatcgccgaacaggaatccaaactcaacgaggcacataagtccttgagcacagtagaggacctgaaggccgagattgtatccgcgtctgaatcccgtaaggagcttgagttaaaacacgaagctgaagtgactaactacaagatcaaattggaaatgctcgaaaaggagaagaacgccgttctcgacagaatggctgagagccaagaggccgaattggagcgtctgcggacgcagctgctgttttcgcacgaagaggagttaagcaaattgaaggaggatttggagatcgagcatagaatcaacatcgaaaagcttaaggacaacctgggcatacattataaacagcagatcgatggattacagaatgaaatgtcccagaaaattgaaactatgcagtttgaaaaggacaacctcatcacgaaacagaatcagctcattctcgagatatccaaactgaaagacttacaacagagtttagtcaactccaagtctgaggagatgactttgcagattaacgagctgcagaaggagatagagattctgagacaggaagagaaagagaaggggaccctggaacaggaggtgcaggaattgcaactcaaaactgaattattggaaaaacaaatgaaggaaaaggagaacgatcttcaggagaagtttgcccagttggaagccgaaaactctatattgaaagatgaaaagaaaacactcgaggacatgctcaagatacatacccctgtgtcacaagaagagaggcttatctttctcgactcaatcaaatcaaagagcaaagactcagtctgggaaaaggaaattgagatcctgattgaggaaaacgaagacctgaagcaacagtgtatccaactgaatgaggagatcgagaaacagaggaatacattctcatttgcagagaaaaattttgaagtgaactaccaggagctgcaggaggagtatgcctgtttactcaaggttaaggacgatttggaagattctaagaacaagcaggagctggagtataagtcaaagctgaaggctctgaatgaagagcttcatcttcagcgcatcaaccccacgactgttaaaatgaagtcttcagtttttgatgaagataagactttcgtagccgaaactcttgaaatgggggaagtggtggagaaagataccaccgaactcatggagaaactcgaggtgactaaacgggagaagttagagttatcacagcgcctgtcagacctgtcagagcaactgaaacagaaacacggagagatatcctttttgaacgaggaagtgaaatcactgaagcaggaaaaggaacaggtttctctccgctgtcgcgagttagagattatcattaaccacaaccgagccgagaacgtccaatcctgcgacacccaggtgagctcactgttggatggcgtagttacaatgactagccgtggcgcagaaggaagcgtgagcaaggttaataaatcttttggcgaagagagtaagataatggtggaagataaggtttcctttgagaatatgacagtcggtgaggagtccaagcaggaacaattgattctggatcacctcccatccgtcactaaggagagctcccttagagctacccagccaagcgagaacgacaagcttcagaaagaactcaatgtgctcaagtcagaacaaaatgacttgcgtctccagatggaagcccagcgcatttgcctgagtctggtgtactcaacccacgttgatcaggtgagggagtacatggagaacgagaaagataaggccttgtgctcccttaaggaagagttgatcttcgcccaggaagagaagatcaaggaattgcagaagatacaccagctcgaattgcagaccatgaaaacgcaggagactggggacgaagggaagccgctgcaccttctgatcggcaagctgcagaaagcggtctccgaagaatgctcttacttcctccagaccctgtgtagcgtgttaggcgaatattacacaccggctctgaagtgcgaagttaacgctgaggacaaagaaaattccggggattatatctctgagaatgaagatccagagctgcaggactacaggtatgaagtgcaagacttccaggagaatatgcataccttgctgaataaggtaaccgaagaatacaataaactgctggtcctccaaacccgcctctcaaagatctggggacagcagacagatgggatgaaactggaattcggggaggaaaatctgcccaaggaagaaacagaattcctaagtatacattcacagatgactaatctcgaggatattgatgttaatcataagagtaagctatccagtttgcaggatctcgagaagaccaaactggaggagcaagtacaggaattggagtccctgatctccagtctccaacagcagctgaaggagaccgagcagaattacgaagcagaaatccattgtttgcagaagcgtcttcaggccgtcagcgagagtactgtcccgcctagtcttccagtggatagcgttgtaatcacagaaagtgatgcacagaggacaatgtaccccgggtcatgtgtcaagaagaatatcgatggaacaatcgaattctccggcgagtttggggttaaggaggagaccaacatcgtgaaactcctggagaagcagtaccaggaacagctggaagaggaagttgctaaggtgatcgtgtccatgtctattgcattcgcccagcagacagaactctctcggatctcgggcgggaaggaaaatacggcaagcagcaagcaggcccacgctgtgtgtcaacaagagcagcattacttcaacgaaatgaaactttctcaggatcaaatagggttccaaaccttcgagaccgtggatgtgaagttcaaagaggagttcaaacccctgtcaaaagaactgggcgagcacggcaaagaaattttgttgtccaactctgatccccacgacattcctgagtcaaaggactgtgttcttactatttctgaagagatgttctcaaaggataaaactttcatcgtcaggcagtctatccatgacgagatctcagtctcaagcatggacgcctcgcgtcaactcatgctcaatgaggagcaactcgaggatatgagacaggaactcgtcaggcaataccaggaacaccagcaggccactgagttattgaggcaagctcacatgcgacagatggagcggcaacgggaggatcaggagcaattgcaggaagaaatcaaacggctaaatcgccagctggcccagagatcctccatcgacaatgaaaacctggttagtgaacgcgaaagagttctcctggaggaacttgaggcactcaaacagctgagtctggctggtcgggaaaagctctgctgtgaactgagaaattcctccacacagactcagaatggcaacgagaatcagggtgaagtggaagagcaaaccttcaaggagaaggagctcgatcggaaacctgaggacgtacctcctgagattttatctaatgagagatacgctctgcagaaggcaaataaccgtctgctcaagatcctactggaagtcgtaaagacaacagctgctgtagaagagaccatcgggaggcacgtgctgggaatcctcgaccgaagtagcaaatcccagtcctccgctagtttgatatggcggtccgaagcagaggcctcggtcaagagctgcgtacacgaggaacatactcgcgtgactgacgagagcatcccatcctatagcggatccgacatgcctaggaacgatatcaatatgtggtctaaggtcaccgaggaggggacggaattgagtcagagactcgtgcgctccgggttcgccgggacagaaatcgatcccgagaatgaggaattaatgttgaacattagcagcaggctccaggccgccgttgaaaagctgctcgaggccatctccgagaccagctctcaactagagcatgccaaagttactcagacagagttgatgagggagagctttcggcagaagcaggaagccacagagagcttgaaatgccaggaagagctgagggagcgcctgcacgaagagagtcgtgctagagagcagctagcagtggagctgagcaaagccgaaggagtgatcgatggatacgcagacgagaaaacgctgttcgaacgacagattcaggaaaagaccgacatcatcgaccggttggagcaggagctgctttgcgccagcaatcgactccaggagctggaggccgagcagcaacagatccaggaagagcgggagctcctttcaaggcagaaagaggctatgaaagctgaggctgggcccgtggaacagcagctcctgcaggagacagagaaactgatgaaggaaaagctcgaagttcaatgccaggccgaaaaagtcagggacgacctgcagaagcaggtgaaggccctggagatagatgttgaggaacaggtatccagattcattgaactggagcaagagaagaacactgaattgatggacctaaggcaacagaatcaggctctggagaagcaactggagaaaatgagaaagtttctggatgaacaagccattgatagagaacacgaaagggacgttttccagcaggagattcagaagctcgagcagcagctaaaagtcgtcccacgtttccagccaatttcagagcatcagacccgcgaggtggagcagctggccaaccatctgaaggaaaagaccgacaagtgttctgagctgctcctgagtaaggagcagctccagagagacatacaggagcggaacgaagagattgagaaacttgaattccgagtgcgggagttggaacaggccctgctagtgtctgcagacacattccagaaggtggaagatagaaagcactttggcgccgtcgaagccaaaccggaattatctctggaggtgcagctacaggccgaacgcgacgcgatcgatcggaaggaaaaagaaattaccaaccttgaggagcagctggagcaatttagggaagagctggagaacaagaacgaggaagtgcaacagctccacatgcagctggagatccagaaaaaggagtcaaccacaaggcttcaggagcttgagcaagagaataagctgttcaaggatgatatggaaaagctcggacttgctattaaggaatccgatgcaatgtcaactcaggaccagcatgtgctctttggtaagtttgctcagatcattcaggagaaagaagtggaaatcgaccaattgaatgagcaggtgacaaagctgcagcagcagttgaaaatcacaacagacaacaaggtgattgaagagaagaacgagttgatcagggacctggagacacagattgagtgcctgatgagtgatcaggagtgtgttaaaaggaaccgcgaggaggaaatcgagcagctgaacgaagtgattgaaaaactgcagcaggagctggccaacattgggcagaagacctccatgaacgcgcattctttatctgaagaggcggattctctcaaacatcaattggacgtagtcatcgccgagaagctcgcccttgagcagcaagtcgaaacggcaaatgaggagatgacattcatgaaaaacgtgttaaaggaaactaactttaaaatgaatcaactcacccaggagcttttctctttgaagagggagcgcgagtccgtagagaagatccagagcatccctgagaattccgtgaacgtggcgattgaccatctctccaaagataagcccgagttggaggtcgtgttaactgaggacgctttgaagagcctggagaaccagacatacttcaagagttttgaggaaaacgggaagggctccatcataaacctggagactcgcctgcttcaactggagtctaccgtgagcgcgaaggatctggaactcacccagtgttataagcagatcaaggacatgcaagaacagggccagttcgagacagaaatgctccagaaaaaaatcgttaatctacagaaaatcgttgaagaaaaagtggccgctgcgctggtcagccagatacagctcgaggctgtccaggaatatgctaaattctgtcaggacaaccaaaccatctctagtgagccagaacggaccaacattcaaaacctcaaccagcttagggaagatgagctgggtagtgatattagcgcacttacactgcgtatatccgagctagagagtcaggtggtcgagatgcatacgagcctcatactagagaaagagcaagttgagattgctgagaaaaacgtcctcgagaaggagaagaagttgcttgaactgcaaaaactgttagaaggcaacgagaagaaacagcgggagaaggagaagaagcggagcccccaagacgtggaggtcctgaaaactaccacagaattgtttcactccaacgaagaatccggcttttttaacgagcttgaagccctgcgagccgaatctgttgcgaccaaggccgaactggcgagttacaaagagaaagctgagaagctgcaggaggaactcttggtcaaagaaaccaacatgacaagcctgcaaaaggatctatcccaggtgcgggaccacttagctgaagccaaagaaaagctcagtatactggagaaggaggacgaaacagaggtacaggaatccaagaaggcatgcatgttcgagccgctcccaatcaagcttagcaaaagtatagctagtcagaccgacggcaccctgaaaatttctagcagcaaccagaccccccagattctggtgaagaatgcaggcatacagattaatttacagtctgaatgcagcagcgaggaagttactgagattattagtcagtttaccgaaaaaatagagaaaatgcaagaactccacgccgcggagattctggatatggagtcaagacacatttccgaaaccgagacacttaagcgcgagcactacgtggccgtccaacttctgaaggaagaatgcggcaccttgaaagccgtcatccagtgccttagaagcaaagaggttttcgggttctacaatatgtgcttttccactctgtgtgactcggggagcgactggggacaagggatttacctgacgcattctcagggatttgacattgcttccgagggtagaggagaggagtccgaaagcgccacagacagttttccgaaaaagatcaaaggcctcctgcgggcagtgcataacgagggaatgcaagtgctgagccttaccgaaagcccgtattccgatggagaggatcactctatccagcaagtgtccgagccatggttggaggagcgtaaagcatacataaacacaatcagctccctgaaggatctcatcaccaagatgcaactgcagcgggaagctgaggtgtacgactcttcacaatcccatgaaagtttttctgattggcgaggagaattgcttttagcgctccagcaagtgtttttggaggaacggagtgtgctgctggccgcgttccggaccgaattaacggctttgggcacgacagacgccgttggacttctgaattgtctggaacaaagaatccaagaacaaggtgtggaataccaagccgccatggagtgcctgcagaaggccgatcgccggtcacttctcagtgaaatacaggccttgcacgcccagatgaacgggcggaagattaccttaaagcgagagcaggagtctgagaagccgagccaggagctgttagaatacaatattcagcagaagcagtctcagatgttagagatgcaggtggaactgtcatctatgaaggatcgggctaccgagctgcaagaacagctttccagtgagaaaatggttgtggcagagctgaagagcgagctggcccagacaaagctggagctcgagaccacacttaaagctcagcataagcatcttaaagaattggaggccttccgcctggaggtaaaagacaagaccgatgaggttcatctcctcaacgatacgctggcgtctgagcagaagaagtctcgggagttgcaatgggccttggaaaaagaaaaagcgaagctgggaaggtctgaggagcgggataaagaggaattggaggatcttaagttttccctcgaatctcaaaagcagaggaacctgcagctgaacctgctgctggagcaacagaaacagctcctgaatgagtcacaacagaagatcgagtcacagcggatgctctacgacgcccaactgtcggaggaacaggggaggaacctagagctacaggtcttactcgagagcgaaaaggtccgcatccgcgagatgagttcaactctagatcgcgagcgagagcttcacgctcagcttcagagtagcgatgggaccggccagtcccgacccccgctgccctccgaagacctcttgaaggagctccaaaaacagctggaggagaaacacagccggatcgtggagctgctcaatgagactgaaaagtataagctggactccctccaaacacggcagcagatggagaaggatagacaggtgcacagaaagaccctgcagactgagcaggaggcaaatacagagggacagaagaagatgcatgagctgcagagtaaggtcgaggacttacagagacaactcgaggagaagcgccagcaggtatacaagctagatctcgaggggcagcggctacaaggtatcatgcaggagtttcaaaagcaggagctggaacgcgaggagaaacgggaatcgagaagaattctttaccagaatcttaacgagcccaccacctggtctctgaccagcgatagaaccaggaactgggtcctgcaacagaaaatagaaggagaaaccaaggagagcaactatgcaaaacttattgaaatgaacggaggggggacgggatgtaatcacgaacttgagatgatccgccaaaagctccagtgcgttgcatctaaactgcaggtgctgcctcaaaaagcatctgaacgtctgcagtttgagaccgcagacgacgaggatttcatctgggtgcaggaaaacatcgacgagatcatactccaactccagaaactcacaggtcagcagggagaggaaccatcccttgtgtcgccttccacttcttgtgggagtctcaccgaacggctgctgaggcagaatgctgagttgactgggcacatctcacagctgaccgaggagaagaatgaccttagaaacatggtcatgaagctcgaagagcaaatccgatggtatcgccagacaggcgccggccgggacaattcgtctcgtttctccctgaatggaggagccaacatagaggccatcatcgcgtccgagaaagaggtgtggaaccgtgaaaagttgacccttcagaagtctctaaagagagctgaggccgaagtttacaaactgaaagctgagctcagaaatgactcacttttgcagacattgtctcccgacagtgagcacgtgactctgaaacgtatttatgggaaatacctgagggctgaatcattccggaaggctctcatctatcagaagaaatacctgctactgttgctcggtggatttcaggagtgcgaagatgcgactctcgcattgcttgcacggatggggggacagcccgcctttactgacttggaagttatcacgaaccggcccaagggttttacaagatttaggtcagccgtacgcgtgtctattgcgatctcacgtatgaagtttctcgtgaggcgctggcaccgggtcaccggtagcgtttccattaacatcaacagggatgggttcggcctgaaccaaggggcagaaaaaaccgattcattctatcactcaagcggggggctcgagctttacggagaacctaggcacactacctatcgttcacgttccgacctggattacattagatctccattaccttttcagaatcggtatccagggacacctgctgactttaaccctgggtcgctcgcatgctctcaactccaaaattacgaccctgatcgggcactgactgactacattacaagactggaagctctccagaggagattgggaacaattcaatccggctccaccacgcagttccatgctgggatgcgtcggtag

SEQ ID NO: 106662 - DNA, 4932 bp, synthetic construct
  misc_feature 1..4932: note = Description of Artificial Sequence: Synthetic coding sequence
  source 1..4932: mol_type = other DNA
atggaggatgaggagaggcagaagaagcttgaagccggcaaggctaagatagaggagcttagcctggccttcctcgtacgccagctcgcacaattccgtcagcgcaaggctcagtcagacggccagtctccttccaagaaacaaaaaaaaaaacgcaagacatcgagtagcaaacatgatgtctccgcgcatcacgatctcaacatcgaccagtctcagtgcaacgaaatgtacatcaattcttctcagcgagtcgaatctaccgtaataccagagtccacgataatgcgcactcttcatagcggcgagatcacatcacatgaacagggctttagtgtggagctggagtctgaaatctccacaacagccgatgattgctctagtgaggtgaacggatgtagtttcgtgatgcgaaccggcaagccaaccaacctgctgagggaggaagagttcggagtggatgatagttatagtgagcaaggcgcccaggattcaccgacccacctggagatgatggagagtgaactggcaggcaaacagcatgagatagaggagctgaaccgcgaactggaagagatgcgagtgacatacggcaccgagggtttgcaacaactgcaagagttcgaggctgccattaagcagagggatgggattatcacacagctgactgccaatctgcagcaggcccggagagaaaaggatgagactatgcgcgaattcctggagctgaccgagcagagtcagaagctgcagatccagtttcagcaactccaagcctccgaaacactgaggaactctacacacagctcgacagccgccgaccttctgcaagcgaagcagcagatcctgactcaccagcagcaactcgaagagcaagatcaccttctggaagattatcagaagaaaaaggaggacttcactatgcagatctcatttctgcaggagaaaatcaaggtatacgagatggaacaagacaaaaaggtagaaaactccaacaaggaggagatccaagagaaggagacaatcatcgaggagcttaatacaaaaattattgaagaagaaaaaaagacactcgaactgaaagataaacttacaactgcagacaaacttcttggcgagttacaggagcagatcgtgcaaaaaaatcaggagataaaaaacatgaagcttgagctgactaatagcaaacagaaggagcggcaatcatctgaggagataaagcagcttatgggtactgtggaggagctgcagaagagaaaccacaaagactcccagtttgaaaccgatatcgttcagcgaatggagcaggagacccagcgcaagctagaacagctgagggcggaactggacgagatgtatgggcagcagattgtgcagatgaaacaagagctcattcggcagcacatggctcagatggaggagatgaaaacgaggcataagggagagatggagaacgccctcagatcttacagcaacattacagtcaatgaggaccagatcaagctcatgaatgtggccatcaacgagctgaatatcaaactgcaggataccaatagccagaaagaaaaactgaaggaggaactcggcctaattctagaagagaagtgcgccctacagagacaattggaagatctggttgaggaattgtcattttcccgggagcagatccagcgcgctaggcagactatcgccgagcaggaatcaaagctcaacgaggctcataaaagcctgagcaccgtggaggatcttaaagccgaaattgtttccgccagcgagtccagaaaagagttggagcttaaacatgaagccgaagtaacaaactacaaaatcaagctcgagatgctggagaaagagaagaatgccgtgctggacaggatggccgagtctcaggaggcagagctcgagagactaaggacccagttgctcttctcacatgaggaggagctttccaagttgaaagaggacttagaaatagaacaccgcatcaatatcgaaaagctgaaagacaatctggggatacattataaacaacagattgacggcttacagaacgaaatgtctcaaaagattgagactatgcagtttgaaaaggacaaccttattaccaagcagaaccaattaatcctggagatctctaagctgaaagatttacagcagtctctggtaaactcaaagtccgaggagatgactttgcagatcaatgaactgcagaaggagatagaaattctgaggcaagaggagaaggagaaaggaacgttagagcaagaagtgcaggagctccagcttaaaaccgaactgttggaaaaacagatgaaagaaaaggagaatgacctacaagaaaagttcgcccaattggaggccgaaaatagcatactaaaggacgagaagaaaacactcgaggatatgctcaagattcacacacctgtctcgcaggaagagaggttgatcttcctggacagcatcaagagcaaatctaaggactctgtgtgggagaaggagatagagatcctgatcgaagaaaacgaagatctcaaacaacagtgtatccagctcaatgaggaaatcgaaaagcaacgcaacaccttcagctttgccgagaaaaacttcgaagtcaattaccaggagctgcaggaagaatatgcctgcctcctcaaagttaaggatgatcttgaagatagtaagaacaaacaggagctcgagtataagtcaaagctgaaagccctgaacgaggagctgcatctgcagaggatcaatcctactacagtgaagatgaaaagcagcgtcttcgacgaggataagacgtttgttgccgagaccctagaaatgggagaggtggtggaaaaagacacaaccgaactcatggagaaactcgaggtgaccaagagagagaagctggaactgtctcagcgcctgagtgacttgtccgagcagcttaagcagaaacatggggagatctcctttctcaatgaggaggtgaaaagccttaaacaagaaaaggaacaggtctcactaagatgcagagaactggagattatcatcaaccacaaccgcgcggagaacgtgcagagctgtgacacacaggtgagttcccttctggatggggtcgtgacgatgaccagccgcggtgcggaagggagtgtgtccaaggtgaacaagtcatttggggaagaatcaaaaatcatggtggaggacaaggtaagctttgaaaatatgactgtgggggaagagtcaaaacaggaacaactgatcctggatcatctcccctctgtgacaaaggagagtagccttagggctacccaacctagcgagaatgataagttgcagaaggaactgaacgtactcaaatctgaacaaaacgacctgcgtctgcagatggaggcccagagaatctgcctcagtctcgtgtatagtacccacgtggaccaagttagagaatacatggagaacgaaaaggataaggccctgtgctctctgaaggaagagctcattttcgcccaagaagagaagattaaggagctgcagaagattcatcagcttgagctgcaaacgatgaagacgcaggaaaccggcgacgaaggaaagcctcttcatctcctgattggcaagttgcagaaagccgtcagtgaggagtgttcctactttctgcagaccctgtgctcagtgctaggcgagtattacaccccagccctaaagtgcgaagtgaatgctgaggacaaggagaactcgggtgactacatttccgagaacgaggaccccgaactccaggactatcggtacgaggtccaggacttccaggagaatatgcacacccttcttaataaagtgacggaggagtacaacaagcttctggtgttgcagacccgcctcagtaagatctggggacagcaaacggacggaatgaagcttgaattcggagaggagaacctccctaaagaggagaccgaatttctctccattcatagccagatgacaaaccttgaggatattgatgtgaaccataagtctaaattgagctctctgcaggatcttgagaagacgaaactcgaggaacaggtacaggaactggaatcccttatctcatcactccaacagcaactgaaagagacagagcagaactacgaagcagaaatacattgtttgcagaagcggctgcaggccgtctccgagtccactgtgccgcctagccttccagttgactcagttgtgatcaccgaatctgacgctcaaaggacgatgtatcctggttcttgcgtaaaaaagaatattgacggtacaatcgagttctctggagaattcggtgtcaaagaggagactaatatagtcaagttactggaaaaacagtatcaggaacaacttgaggaagaggtggctaaggttattgttagtatgtcaattgccttcgctcaacagactgagttgagtaggatcagcgggggtaaagaaaatacagctagctcgaagcaagcacacgccgtgtgtcagcaggaacagcattattttaatgaaatgaaactgagccaggatcagattggcttccaaacctttgagacggtcgatgtgaaatttaaggaggagttcaagcctctgagtaaggagcttggtgagcatggaaaggagattctcttgtcaaattccgatccacatgatatcccggagagtaaagattgtgtgctgaccatcagcgaggaaatgttcagcaaggacaagacatttattgtccgtcagagtatacatgatgaaatttcagtttcttccatggatgcgtcgaggcagttaatgctgaacgaagaacagctggaggacatgcgtcaagaactcgtgagacagtatcaggagcatcaacaggccaccgaactgctcaggcaagcacacatgcgtcagatggaacggcagcgggaggaccaggagcagcttcaagtgagagtgctgtag

SEQ ID NO: 106663 - DNA, 11631 bp, synthetic construct
  misc_feature 1..11631: note = Description of Artificial Sequence: Synthetic coding sequence
  source 1..11631: mol_type = other DNA
atggaggatgaagagcgccaaaaaaaactcgaagcaggcaaggctaaaattgaagaactgtccctagcctttctcgtgcggcagttagcccagttcagacagaggaaggctcagtctgacggccagtcacccagcaagaaacagaagaagaaaaggaagactagttcttcaaaacatgacgtgagtgcgcaccatgatttgaatattgatcagtcccaatgtaacgaaatgtacattaattcgtcacaacgcgtggagagtacggtgatcccggaatccactattatgcgtactcttcattcaggcgagataacgtcccatgagcagggatttagtgtggaactcgaatcggagatctcaactaccgcggatgattgtagctctgaggtgaacgggtgctcgtttgtgatgagaacgggcaaacccacaaacttacttcgagaggaagaatttggcgtggacgactcatatagtgaacagggagcacaggattccccaacgcatctggaaatgatggagagtgagctggccgggaaacagcacgaaatcgaggagctgaaccgggaactcgaggagatgcgggtcacttacggcaccgaaggccttcagcagctgcaggaatttgaagctgccatcaagcagagagacgggattatcacccagctgaccgcaaatctgcagcaggcgcggagagaaaaagacgagaccatgcgagagtttctggaattaactgaacagagccaaaagctgcagatccagttccaacaactgcaggcctctgagactctgcgtaacagcacccatagcagtaccgcagccgacctgttgcaggctaaacagcaaattctcacgcaccaacagcaactggaagagcaggaccatctgctggaggactaccagaaaaaaaaggaggattttaccatgcaaatctctttccttcaagaaaaaatcaaagtgtacgagatggaacaggataaaaaagtggaaaatagcaacaaggaggagatccaggagaaagaaacaatcattgaggagctgaatactaaaattatagaagaagagaagaagaccctggagctcaaagataaactaactaccgctgacaaactactgggggaattgcaggagcagatcgtgcagaagaatcaggaaatcaagaacatgaaattggagctgacaaactccaaacaaaaggagcgtcaatccagtgaagagatcaagcagcttatgggcactgtcgaggagctgcagaagagaaatcataaggactcccagttcgagacagacattgtgcagagaatggagcaggaaacccaacgtaaactggaacagcttcgagccgagcttgacgagatgtacgggcagcagatcgtacagatgaaacaggagctgatcaggcagcatatggcccagatggaagaaatgaagactagacataagggcgagatggagaatgccctgcgcagctacagcaacataacggtgaatgaagatcagatcaagctgatgaatgtggccataaacgagctcaatatcaagcttcaggatacaaattcgcagaaggaaaagctcaaggaggagctggggttaatcctagaagagaagtgcgccctgcagagacagctcgaagatctggtggaagaactttccttctcacgcgagcagatccaacgggcccgtcaaacaatagccgagcaggaatccaagttaaacgaggcccataagtccctatctaccgtcgaggacctaaaagccgaaattgtttccgcaagcgaatctcgcaaggaactggaattgaaacacgaagctgaagtgacaaattataaaataaagcttgagatgctggaaaaggagaaaaatgccgtgctggacaggatggccgagtctcaggaagccgaactcgagcgcttgcgcacccagctgctcttctcacacgaagaggaactgtctaagctaaaggaggatctggaaatcgaacaccgcataaacatcgagaagctgaaagacaatctgggcatccattacaaacagcagattgatggcttgcagaatgaaatgagccagaagattgagacaatgcagttcgagaaggacaacctgatcaccaaacagaaccaattgatcctggagatcagcaaacttaaggacttgcagcagtccctggtcaactcgaagtcagaggagatgacgctccagattaacgagttgcaaaaggaaatagagatacttcggcaggaggagaaggaaaaagggaccctggaacaggaggtgcaggaactgcagcttaagaccgaactccttgagaaacagatgaaggagaaggaaaacgatcttcaggagaaattcgctcagctggaagccgagaactcaattctgaaggatgagaagaaaactctggaggacatgctgaagatccacactcctgtttcccaggaggaaaggctgattttccttgattccattaagagcaaatcgaaggacagcgtttgggagaaagagattgaaattctgattgaagaaaacgaagacttaaaacaacagtgtattcagcttaatgaagaaattgaaaaacagcgaaacacattctcttttgccgagaagaactttgaggtcaactatcaggagctacaggaagagtatgcgtgtctgctgaaggttaaggacgatctggaagatagtaagaacaagcaagagctggagtataagtccaaactgaaagccctaaatgaagagctgcacctgcagcggattaacccaacaacagtcaaaatgaagagcagcgtctttgatgaagacaaaactttcgtcgctgagaccctcgaaatgggcgaagtggtggaaaaagacaccaccgagctgatggagaagctagaggtgacaaaacgggaaaagcttgagctgtcacagcggctgtctgacctgtcagagcagctcaaacaaaaacacggagaaatcagctttctgaatgaagaggtgaagtctctgaagcaggaaaaggaacaggtgagtctgcgttgccgcgagctggaaattatcataaaccataacagggcggagaacgttcaatcctgcgacacccaggtgtcttctcttcttgatggcgtagtgacgatgactagtcggggggctgaagggtccgtgtccaaggtcaacaagagcttcggcgaagaaagcaagatcatggtagaagataaggtttccttcgagaatatgactgtgggagaggagtctaagcaggaacaattgatcttggaccacttacctagcgtgacgaaggagagctccctcagggccacgcagccaagcgagaacgacaaactgcagaaggaattgaacgtcctgaaatcggaacagaacgacctgagactgcagatggaggctcaaagaatttgcctttccctcgtttactccacccatgttgaccaagtgcgcgagtacatggagaatgaaaaagataaggctctatgttcactgaaggaagagttaatcttcgcccaggaggagaaaattaaggaactacagaagatccatcagctggagttgcaaactatgaaaacacaggagacaggagacgaaggcaagcctctccaccttctcatagggaagctccagaaggcggtgagcgaggagtgcagctatttcctccagaccttgtgctctgtcctcggagagtattatacaccagccctcaagtgcgaagtaaatgcagaagataaagaaaactccggagactacatttccgagaacgaagaccccgaattgcaggactacagatatgaggttcaggactttcaggagaacatgcacacacttctgaacaaagtcaccgaagagtacaacaagctactcgtactgcagactagacttagtaagatctggggacagcagactgacggcatgaagctcgaatttggggaggagaacctgcctaaggaagaaaccgaattcctcagtatccatagccagatgaccaatcttgaagacatcgatgtgaaccataaatccaagctatcgagtttgcaggatctggagaagacgaagttggaagaacaggtacaggaattggagagcttgatcagctccctgcagcagcaattaaaagaaactgagcagaattacgaagctgagatccactgcctccagaaaagattacaagccgtgtcggaaagtaccgtacccccatcccttcctgtagactcagttgtgatcaccgagtctgacgcccaaaggacgatgtaccccggctcttgcgttaaaaaaaatatagacggcactattgagtttagcggcgaatttggggtaaaagaggagacaaatatcgttaagctcttggaaaaacaatatcaggagcagctggaagaggaagtagctaaagtgattgtcagcatgtctattgctttcgcgcagcagaccgagctgagtaggatttctggagggaaggagaatactgctagctccaagcaggcccatgctgtgtgccagcaagaacagcactacttcaacgagatgaaactgagtcaggaccaaatcggcttccaaacgtttgaaactgtagatgtcaaattcaaagaggaattcaagccgctgtctaaagagcttggagaacacggaaaggagatacttctcagcaactctgaccctcatgacatccctgagtcaaaggactgcgtattgactatctccgaggagatgttctctaaggacaagactttcatagtgcgacagagcatccacgacgagatttccgtgagctccatggacgctagtcggcagttaatgctcaacgaagagcaactcgaggatatgcggcaagagctggttaggcagtaccaggaacatcagcaagctaccgaacttttgcgccaggcccacatgcgacagatggaacgccagcgggaggaccaagagcagctgcaagaagagataaaaagactgaaccggcagctggcccagcgctcaagcattgacaatgagaatctggttagcgaacgtgaacgggtccttcttgaagagctagaggctctcaaacagctttccctggctggcagagaaaaactttgttgtgagcttagaaactcttcaacgcagactcagaatggcaacgaaaaccagggcgaagtggaggaacagacctttaaagaaaaggaactcgatcgaaagcctgaagacgtgccaccggaaatcttgagcaacgaaaggtacgcccttcaaaaggccaacaatcggttgctgaagatcttgcttgaggtcgtgaagaccacagccgccgttgaggaaactatcgggaggcatgttctcgggatattagatcgcagtagcaagagccaatcctctgcctcgcttatctggaggagcgaagctgaggcttccgtgaagagctgcgtgcatgaggagcacacgcgcgtgaccgacgaatcgattccttcctactccggctccgacatgcctcggaacgatattaatatgtggtcaaaagttactgaagaagggacagaattgagccagaggctcgtgcgctccgggttcgcaggcactgagattgaccctgaaaatgaggagctgatgctcaacatctctagccggctgcaggcagcagtagaaaaactcctggaggccatctccgaaacatcttctcaactggagcacgcgaaggtgactcagacagagctgatgcgagagagcttcaggcagaagcaggaggccacagaatcccttaagtgccaggaggaactgagggagaggctccacgaggagtccagggcacgggaacagctcgccgtagaactgagcaaggcagaaggcgtgatagatgggtacgctgatgagaagacactgtttgagcggcagatccaagagaaaaccgatattattgaccgactcgaacaagagctgctctgcgcttcgaacagacttcaggagttggaagctgaacaacaacagatccaggaggagcgcgagcttctgtctcgccagaaagaggcaatgaaagccgaagcaggtcctgtcgaacagcagctgttacaggaaactgaaaagctgatgaaggaaaagctggaggttcagtgtcaagcagaaaaagtgcgagacgatcttcagaagcaggttaaggctcttgaaattgatgttgaggaacaggtctcaaggttcatcgaattggagcaggagaagaacaccgaacttatggacctgagacagcaaaatcaggcactggaaaaacaactcgagaagatgcggaagttcctggatgagcaagccatcgatagggagcacgagcgcgatgtctttcagcaggaaatccagaagctcgaacagcagctgaaggtggtcccaagatttcagcctatcagtgaacatcagacaagggaggtcgagcagctcgcgaatcatctgaaggagaaaactgataaatgttccgagctgctgctgtccaaggagcagctacagcgcgacatccaggagcgcaacgaagagattgaaaaactggaatttcgggtccgcgaactcgagcaagcgctgctagtggaagatcgcaagcatttcggagctgttgaagcaaaaccagagcttagcctggaggttcagctacaggcggaacgtgatgctattgaccgtaaggagaaagagatcacaaacttagaggaacagctggaacagttcagggaggaattagagaataaaaacgaagaagtccagcagctccacatgcagctcgaaatacagaagaaagaatcaactactcgcctgcaagaactcgagcaggaaaataaacttttcaaggacgacatggaaaaattaggactggcaattaaagagagtgatgctatgagcactcaggatcagcacgtgttgtttggtaagtttgctcagattatccaagaaaaggaggtagagatagaccagctgaacgagcaagtgaccaaattacagcagcagctgaagataacaactgacaacaaggtgattgaagaaaagaacgaactgatccgggacctcgagactcagattgagtgccttatgtctgaccaagaatgtgttaaaagaaaccgagaagaggaaatcgaacagcttaatgaggtaatcgagaaactgcagcaggagttggctaacatcgggcaaaagacctccatgaacgcgcattctttgtccgaggaggcggatagccttaaacatcagctggatgttgtgatcgcagaaaagttagccctcgaacagcaggtagaaaccgctaacgaagaaatgacattcatgaaaaatgttttaaaagagacaaattttaaaatgaaccaacttacccaggaactgttctctctgaagagagaacgggaatctgtcgagaaaatccagtctattccagagaattccgtgaatgtggccatcgaccatctatccaaggataagcctgaattggaggtggtgctcacagaggacgcactgaagtcactggaaaatcagacatatttcaagtcttttgaggagaacggcaagggatctattataaacttagaaacacgtcttttgcaactggagtccacggtgtccgccaaggatctcgaattgacccagtgctataagcagattaaggacatgcaggaacagggccagttcgagacggagatgttgcaaaaaaagatagtgaatctgcaaaaaatagtggaggagaaggtggccgctgcgctcgtgtcacagatccagctggaggccgtccaggagtacgcaaaattttgtcaggacaatcaaacaatcagttcagagccagaaagaaccaacatccagaatttaaaccagctccgcgaggatgagctagggtctgatatttcagctcttacattacgcatctcggagctagagtcccaggtggtggagatgcatactagtctgatcttagagaaggagcaggtggaaatcgcagaaaaaaatgtgctcgaaaaagaaaaaaagctgcttgaactccaaaagcttctggaaggcaacgagaaaaaacagagagagaaagagaaaaagaggtctccgcaggacgtcgaggttctgaagacaacaacggagttgtttcactcaaatgaggaaagcggatttttcaatgagttggaggccctgcgggctgagtccgtggctactaaggccgagctcgcttcatataaagagaaggctgaaaagctccaggaggaactcctggttaaggagacaaacatgacaagcctccagaaagatctatctcaagtgagagatcacctcgcagaggcaaaagaaaaactgtcaattcttgagaaagaggatgaaacggaagtgcaagagtctaaaaaggcttgcatgtttgagccgctcccaattaaactaagtaaatccattgcttcccaaaccgatggcacactgaaaatctcatcatctaaccagacaccacagatcttggtaaaaaatgctggcattcaaatcaacttacaaagcgagtgtagcagcgaggaggtgaccgaaataatcagccaattcacagagaagatcgagaagatgcaggagctccacgcagccgagattctagacatggagtctcgccatatctcagaaacagagaccctaaagcgggagcattacgtcgctgttcagttgcttaaagaggagtgtggtaccttaaaagcagtaatccagtgtttacggagcaaggagggaagttctatcccagagctggcccatagtgatgcctatcagaccagggagatctgttcttccgactctggctcagactggggccagggcatctacctcacccactcacagggtttcgatattgctagcgaaggtcgtggtgaggagagcgaaagtgctaccgatagctttcccaaaaagattaaggggctgttaagagccgttcataatgaaggtatgcaggttttgtcgctgacggagagcccttattctgacggagaagaccatagtatacagcaggtgtctgagccgtggctggaggaacgcaaggcctatattaatactatctcttccttgaaagacctgataaccaaaatgcaactgcagagggaagctgaggtctacgattccagccagtcccatgaaagtttttccgactggcgtggtgagctcctgctggcattacagcaggtcttcctggaggagaggagtgttctcctggctgcattcagaaccgagttgaccgccctgggcactacagatgctgtcggccttcttaattgtctcgagcagcgtatccaggagcagggtgtggaataccaggccgcaatggagtgcctgcagaaggccgacagaagaagcttgctctctgagatccaagccttacacgctcagatgaacggacgaaagattaccctgaaaagagaacaagaatcagagaagccttcccaggagctgctcgaatataacatccagcagaagcagtcccaaatgctcgaaatgcaggttgaactcagctccatgaaagaccgggcaacggaacttcaggaacagttgagctcagaaaaaatggtggtggccgaattgaagtccgaattagcccagactaaactcgagttagaaactacccttaaggcacaacataagcacctaaaagaactagaggccttccgccttgaggtgaaagataagactgatgaagttcatctcctgaatgatacactggccagcgaacaaaaaaaaagtagagagctgcaatgggctctggaaaaagagaaggcgaaattgggcagaagtgaggaacgggacaaagaagagctggaggacctgaaatttagcctcgaaagtcagaagcagaggaacttacagcttaatctgttactggaacagcaaaagcaactgctgaacgaaagccagcagaaaattgagagccaacggatgctttacgacgcccagctgagcgaggagcaaggccgcaatctggaactccaagtgctgttggagtcagagaaagtacgcattagagagatgagttccacattggaccgcgaacgggagctgcatgctcagctccagagtagtgacggcacaggccaaagcaggcccccactgcccagtgaagatttgctaaaagaactacagaagcaactggaagagaagcattcacggatcgtggaactcctaaacgagaccgagaagtacaagctggactcacttcagactcgccagcagatggaaaaagatagacaggtgcatcggaagacattgcaaacagaacaggaggcaaataccgaaggccagaaaaagatgcatgaactacagagcaaagtagaagacttgcagaggcaattggaggaaaagcggcaacaagtctataaactggatctggaggggcaaagactgcagggaataatgcaggagtttcagaagcaagaactagaaagggaggaaaagcgggaatctcggaggattctgtaccaaaacctgaacgaaccaaccacgtggagtctcacatctgaccgcaccaggaattgggtacttcagcagaaaatagaaggggaaacgaaagagtcaaactatgccaagctcatcgagatgaatggaggaggcacaggatgtaaccatgagttagagatgattcggcagaagcttcagtgtgtagcctcaaagctgcaggtcctgccacagaaggcaagtgagcggctacaatttgaaactgcggacgacgaggatttcatttgggtccaggaaaatatagacgaaatcattctgcagctgcagaaactcaccgggcaacagggggaagagccatctctggtgtctccctctaccagctgtgggtctctgactgagaggctgttgcggcagaatgccgaattgacgggacatatttctcagctgacagaggagaagaacgacctgagaaacatggttatgaaactggaggaacagatcaggtggtaccggcagacaggggccgggcgggataacagcagccggtttagcctcaacggaggagcaaatatcgaagctatcatcgcaagcgagaaggaggtgtggaacagggagaaactgacactgcaaaagtctctgaagcgagccgaggccgaggtctataagttgaaggccgaactgcggaacgattctctgctccagacacttagccccgatagcgagcacgttaccctgaaacgcatttacggcaaatatctgcgcgctgagtcatttaggaaagctctgatataccaaaagaagtaccttcttctgttgctggggggcttccaggagtgtgaggatgctaccttggccctgttggcacggatgggaggacagcccgctttcaccgatctggaggttataacaaacagaccaaaagggtttactcggtttaggtctgccgttagagtgagcatagctataagtcggatgaagtttttagtccgacgttggcatagagtgacaggttcggtctcaattaacataaatagagatgggttcggtctgaatcaaggtgctgagaaaacagactcgttctaccactctagtggcgggctcgagctttatggcgaacctcgacacactacctatcgctcaaggagtgacttagactatataaggtcccctcttccattccagaatcggtatccaggcactcctgcagacttcaaccccggaagcctcgcgtgctcccagctgcaaaactatgatccctag

SEQ ID NO: 106664 - DNA, 1782 bp, synthetic construct
  misc_feature 1..1782: note = Description of Artificial Sequence: Synthetic coding sequence
  source 1..1782: mol_type = other DNA
atggctatccaatttcggtcgcttttccctctggctctgcccggaatgctggcactgctggggtggtggtggtttttcagtcgaaagaaagggcatgttagctctcatgacgagcaacaggttgaggccggggctgtgcagttgagagccgatcctgcgattaaagaacctcttcccgtcgaggacgtctgtccaaaagtagtgtctacaccaccaagtgtgaccgagcccccagaaaaagaactctctacggttagtaagcttcccgcggagccaccggctctgctccagacccatcccccttgtcgcagatctgaatcctcaggaatcctgcctaacacaacagacatgcgcttacggccaggaacaagaagagacgactccactaagttggagctggctctcacgggaggcgaggctaaatcaatccctctcgaatgccctcttagttcccctaagggagttttgttttcgagtaaaagtgcagaggtatgcaaacaggatagcccatttagccgggttcctaggaaggtgcagccaggctacccagtggtgccagcagaaaagcgatcttcgggcgagagggcacgagaaaccgggggggctgaaggtacaggggatgcggtgctgggcgagaaagtgctggaggaagcccttctgtcacgcgagcacgtgctggagcttgagaatagtaagggtccatcattagcatctctggaaggcgaggaggacaaaggcaaatcaagttccagccaagtcgttggacctgtgcaggaggaagaatacgtggccgagaagttacccagccggtttatcgagtcagcccatactgagctggccaaggacgatgctgccccagccccgccggttgccgacgcaaaggcccaggatcgcggcgttgagggagagctgggcaatgaagagtcactggataggaatgaggaaggcctcgatagaaacgaagaaggcttggatcggaatgaggagagcctggatagaaacgaggagggactggatagaaacgaagaaatcaagagagccgcatttcagatcatttcccaggtaatcagtgaggcaacagagcaggtcctcgctaccactgtgggcaaggtggcaggtcgcgtttgccaggccagtcagttgcagggacagaaagaagagagctgtgtgccagtccaccagaagaccgtgctgggccccgatacagccgagccagctacggcggaagcagcagtcgcacctcctgatgcagggctgcctctgcctggtttgcccgccgagggttcacctcccccgaagacttacgtgagctgccttaaaagtttgttgtcatctccaaccaaggattctaagccaaacatcagtgctcatcacatctcgctggctagctgtttggcacttaccacaccttccgaggagctgccagaccgtgcgggtatcctggtagaggatgcaacatgtgtgacatgtatgtctgattcctctcagtctgttccgcttgtggcctcacccggacattgtagcgactcattctcaacaagtggactggaggactcttgcacggagaccagttccagtcccagagataaagccatcacgccacctttgcccgagtcaaccgttccctttagcaacggagtactgaaaggtgaactctccgatctcggggctgaagatgggtggaccatggatgctgaggcggatcatagcggcgtggcggcacccccccctggcaaacgggggacactaattacccgctgccctgggttttttgaatgttag

SEQ ID NO: 106665 - DNA, 2712 bp, synthetic construct
  misc_feature 1..2712: note = Description of Artificial Sequence: Synthetic coding sequence
  source 1..2712: mol_type = other DNA
atggctatacagtttcgttccttatttcctctggccctgcctggtatgctggccctactggggtggtggtggtttttctctcgaaagaagggacacgtaagctcccatgacgagcagcaggtcgaggcaggtgcggtacagttacgggcggatccggcaatcaaagaacctttgcctgtcgaggacgtgtgcccgaaggtcgtgtctacaccaccatccgtcaccgaacctcctgagaaggagctgtcaaccgtgtctaaactccccgctgagcctccagctctgctgcagacccaccctccctgccgtcgaagcgagagttcaggcatactgcccaacacaacagacatgcggctgagacccggaactcggagagatgactcaacaaaattagagttggccctgactggcggcgaagctaagtccatccccctcgaatgccccctatcaagtccgaaaggggttttgtttagcagcaagagtgccgaggtatgcaaacaagactctccattttctagggtgccccgaaaagtgcaacctggttatcctgtggtccccgcagaaaagaggtcctcaggcgagcgcgcacgcgaaactggaggcgctgaaggaacaggagatgccgtgctgggcgagaaagtgctggaggaagccctgcttagtcgggagcacgtacttgaactggagaattcaaaagggccatccctggcttccttggagggtgaggaggacaaggggaaatcgagcagtagtcaggtggtaggccctgtacaggaagaagagtacgttgccgaaaaacttccgtcccgatttatcgagtccgcccatacagagctggccaaggatgacgcagccccggcgccacctgttgccgacgccaaggcccaggacagaggagtagagggggagctggggaatgaggagagccttgacagaaacgaagaggggttagacagaaatgaagaagggctggaccgcaatgaggaaagtctggaccggaacgaagaggggctggatcgaaacgaggagattaaaagggccgctttccagataatatcccaagtgatctctgaggctaccgaacaggtcctggcaaccactgtaggcaaggttgccggcagggtctgtcaggccagccagctgcaaggtcagaaggaggagtcatgcgttcccgttcatcagaaaaccgtgcttgggccagataccgctgaacccgccacagctgaagctgccgtggcaccaccggacgctggcctcccacttcccggtctccccgcagaaggatccccgcccccgaaaacatatgtgtcttgccttaagtctttgctgtccagtcctaccaaggattccaagcccaatatatcagcgcatcacatctctcttgcttcctgtctggctctcacaacacccagtgaggaacttccagacagggccggtatcttggtggaggatgcaacctgcgtaacttgcatgtccgactcatcccagtcagtgccccttgtggcgagtcccggacattgcagcgacagtttttccacctcgggcctggaagactcttgcacggagactagtagttcccctagagataaagcaatcacaccccctctgcctgagtctaccgtccccttttcgaacggcgtgctgaagggagaattatctgatctaggtgcagaggatgggtggacgatggatgccgaggcagatcatagcggggggtctgacaggaattccatggatagtgttgattcatgttgctcactaaaaaagaccgagtcttttcaaaacgcccaggccggatctaaccctaagaaagtggatctcatcatttgggaaattgaagtaccgaagcatttagtgggccgcttgattgggaagcagggcagatacgtcagtttccttaagcagacatccggcgcaaagatttatatatcaacgttgccatacacacagtcggtgcaaatctgtcacattgaggggagtcagcaccatgtcgacaaggccctgaatctgattggaaagaagttcaaagagcttaacctcactaacatctatgcgcctcccttgccatccctggctctgccttcgctgcccatgactagctggctgatgttgccagacggaattacggtcgaggttatcgttgtcaaccaggtgaacgccggacacctcttcgttcaacagcatacccaccccacctttcacgccctgagatcactcgaccagcagatgtacctctgctacagccagcctgggattccaactctacctactccggtagaaatcactgttatctgtgccgctcctggcgcagacggcgcttggtggagggcacaggtggttgcctcttacgaagaaaccaacgaggtagagattcggtacgttgactatggcggttacaagcgcgtgaaggtcgacgttctgcgtcagattagaagcgattttgttaccctgccatttcaaggcgccgaagtactcttagattctgtgatgcctctcagtgacgatgaccagttttctcccgaagccgacgcagccatgagcgagatgacaggtaacaccgccctgttggcacaggtaaccagctacagccctaccggcctgccgttgatccagctgtggagcgtggtcggggatgaggtcgtgctcatcaacaggtctctggtggagcgcgggcttgcccagtgggtggactcttactacacatctttatag

SEQ ID NO: 106666 - DNA, 2838 bp, synthetic construct
  misc_feature 1..2838: note = Description of Artificial Sequence: Synthetic coding sequence
  source 1..2838: mol_type = other DNA
atgggggctttaggggtcagtggctcctcgagccctggcggatgtccaggttggcggaggttgccggcggcagtaaacaccaacccagtcgattttgcacctggagtaattacacaagccagtaggatggcgatccaatttagaagtctatttccactagccctgcccggcatgttggctcttctgggctggtggtggttcttcagccggaaaaagggccacgtttcatctcacgatgaacagcaggtcgaagctggggcagtacagttacgtgccgaccccgcgataaaggagcctcttccagttgaggatgtatgccctaaggtagtgagcacgcccccgtccgtgaccgaacctccggaaaaggagctctccactgtgagcaagcttcccgcggagccccctgcactcttgcagacacacccaccctgccgcaggagcgaatcttccggaatactgccaaatacgaccgatatgagactccgcccaggcacacgcagggacgacagtaccaagctagagctagccctaacaggcggtgaagccaagtccatacctctcgagtgccccctgtcttcccccaaaggagtcctgttttcctcgaagagtgccgaagtgtgtaagcaggactcgccgttctcgcgggtaccgcgtaaggtgcagcccggttatcctgtggtacctgccgagaagaggagcagcggtgagagagctagagagacaggaggagctgagggtactggtgatgctgtgcttggagaaaaggtcctcgaggaggcactgctgagtcgcgagcacgttcttgaacttgagaacagcaaagggcctagcctggccagcctagaaggcgaggaagacaagggtaaaagttcaagttctcaagtggtgggacctgtccaggaggaggagtacgtggctgagaaacttcctagccgctttatcgagagtgcccataccgagctcgccaaagacgatgcagcccctgcccctcctgtggctgacgccaaagctcaggataggggagtcgaaggagagctcgggaatgaggaatccctggatcggaatgaggagggactcgatagaaatgaggaaggcttagaccggaacgaggaaagcctggacaggaatgaggaaggcttagaccgtaacgaggaaatcaaacgcgcagcgtttcagattatcagccaagtcatttcagaggctacagaacaagtgctcgcgacgacagtaggcaaagtggctggcagagtttgtcaggctagtcaactccagggacagaaggaggaaagctgcgtccctgtgcatcagaaaactgttctcgggcctgacactgcagaacctgccactgcagaagccgccgtggcgccccccgatgcggggctgccacttccagggctgcctgctgagggcagcccccccccaaaaacttatgtttcttgtcttaagagtttgttgtcttcccctaccaaggattctaagcctaatatctctgcacaccacatcagcttggcgagttgtctcgcgctcacaactccttccgaggaattgcccgatcgggcgggcattctcgtggaggatgccacctgcgtgacctgcatgtcagattccagccagtccgtgccccttgtggcatccccaggtcattgttccgacagcttttccacgtccggactggaggactcatgtacggagacttcctcctcgccccgtgacaaagcaatcacaccaccactgccagaatcaacagtgcccttttcaaatggcgtccttaagggtgagctcagcgatctgggtgctgaagacggttggacaatggacgcagaagctgatcacagcgggggcagcgatcggaacagcatggatagtgtggattcttgttgttccctaaaaaaaaccgaatcatttcagaatgcacaggccgggtcaaatcccaaaaaagtcgacctcatcatctgggagatagaagttcctaagcacctagtaggtcgcctcatcggtaaacagggacggtatgtctcattcctgaaacagacaagcggggcgaagatctatatcagcaccctgccatacacacagagtgtccagatctgtcatatcgagggctctcagcaccacgttgataaagcgctcaaccttattggcaaaaagtttaaggaactgaatctcacgaatatctacgcgccccccctcccatcattagcccttccctctctccccatgacaagttggctgatgcttccggacgggattacagtagaggtgatcgtggtaaatcaggtgaacgcaggacaccttttcgtgcagcagcatactcatcctacattccacgccctcaggagcctcgatcaacaaatgtatctgtgctattcccaaccaggcataccaaccctgccaacacccgtcgagataacggtgatctgtgctgccccaggagctgacggagcttggtggagagcccaagtggtcgcctcttatgaggagacgaacgaggtggagatacgatatgtcgactatggcgggtacaagcgcgttaaggtggacgtcctgcggcagatccgcagtgacttcgtcactctcccgttccaaggtgctgaggtgctgctggactctgtgatgcccctgagtgatgatgatcagttcagtcctgaggccgatgccgctatgtcggagatgactggcaataccgctcttctagcacaggttacctcttattcccccacagggctgccgctcatccagctgtggagcgtggttggagacgaggtcgtgctgattaatcgcagtctggtcgagcgcggactggctcagtgggttgacagctactacacttctctctag

SEQ ID NO: 106667 - DNA, 2712 bp, synthetic construct
  misc_feature 1..2712: note = Description of Artificial Sequence: Synthetic coding sequence
  source 1..2712: mol_type = other DNA
atggccatccagttccgcagcctcttccccctggctctgcctggaatgctggcgctgctaggctggtggtggttcttctccaggaagaaggggcacgttagctctcatgacgagcagcaggttgaggcaggcgcagtccaactccgtgcagaccctgccattaaggagcctctgcctgtggaagacgtgtgtcctaaggttgtaagtacacctccatccgtgacagagccgcccgaaaaagagttgagtaccgtgtcaaaactgcctgctgagcccccagctctgctacagacacatccaccatgccgccggtctgagagctcaggcattctgcctaacactaccgacatgaggctgcgacctggcacacgacgcgatgattcgactaaactcgagttggccctcaccgggggtgaagcgaaaagcatcccactggagtgccccctttcaagtcctaagggtgtcctattttcaagcaaatcagcagaggtttgtaagcaggattcccctttttctcgagtgcctcgaaaggttcaacctggctaccccgtggtacccgctgaaaaacgcagttccggcgagagagcaagagaaaccggtggtgctgaaggaaccggagacgctgtcctgggcgaaaaagtgttggaggaggctctgttaagccgtgaacacgtgctcgagttagagaattccaagggaccgagcctggccagccttgaaggggaagaggacaaaggtaagagtagttccagtcaagtcgttggtccagtgcaggaagaagaatacgtggctgaaaagctgccatcgcgctttatagagagcgcccacacagagctcgcaaaagatgatgctgctccagccccaccggtcgccgatgctaaagcccaggatagaggggttgagggggaactgggcaatgaagagtcactggacaggaatgaggaaggcctggacagaaacgaggagggactggaccgcaatgaagaatcacttgataggaatgaggaggggcttgataggaacgaagagataaagagggcggcatttcagatcataagccaggtgatcagtgaggctactgagcaggttctggctacgaccgttgggaaagttgcgggccgcgtgtgtcaggcctcccagttacagggacagaaggaggagagctgcgtgcctgttcatcagaagactgtcctgggccccgacactgcggagcctgccaccgccgaggcggccgtcgctccgccagatgctggactaccactgcctggtctgcctgccgagggctcgcctcctccaaaaacatatgtcagttgtctgaaatcactgctgtcttcaccgactaaggattccaaacccaacatctctgcccatcacattagcctcgccagttgcttagccctgacaactccatccgaagaactgcccgaccgcgctggcattctggtggaggatgccacttgtgtgacgtgcatgagtgatagttcccagagcgtgccactcgtggcttctcctggacactgttccgactcattcagcactagtggactggaggatagctgcaccgagaccagctcttctcctagagacaaagccatcacacctccactccccgaaagtacggtgcccttctcgaatggcgtcctgaagggtgagttgtccgacctaggcgctgaggacggctggaccatggacgccgaagccgatcatagtgggggatctgaccgaaattctatggattcggtcgattcttgttgctccctcaagaaaactgaatcattccaaaacgcccaggcgggcagcaatccgaaaaaggtggaccttatcatttgggaaatcgaggtgcccaagcatctggtcgggcgccttattggcaagcagggtcggtacgtgtcttttctgaaacagacgtcgggtgccaagatttatatttcaactctgccatatacccagtcggtgcagatatgccacatcgagggatcccaacaccatgtggataaggctttaaatctgatcggaaagaagttcaaggagctaaatctaaccaatatttatgcccctcccctgcctagcctggccctccccagtctacccatgacttcatggctcatgctgcccgatgggattacagttgaggtgattgtcgtgaaccaggtaaacgctggacacttgtttgtccagcaacatacccatcccacgtttcacgccctgaggtcattggaccagcagatgtacctatgctactcacaacctggcatcccaacgcttccgacgccagtggaaattacggttatctgcgccgcccccggagccgacggtgcctggtggagagctcaggtcgttgcatcttacgaagagacaaatgaagtcgaaatcaggtacgtcgattatggcggctataagcgggtgaaggtcgacgtccttagacagatacgaagtgatttcgtaaccctgccattccagggtgctgaggtcctgctggacagcgtcatgccactgtcggatgacgatcagttcagtcccgaggccgatgctgccatgagcgagatgaccgggaacacagccctcttggctcaggtcaccagttattcccccacaggtcttcctttgatacagctctggagcgtcgtgggggacgaggttgttctgattaatcgtagcctggtagagagagggctggctcagtgggtggacagctattataccagcctctag

SEQ ID NO: 106668 - DNA, 1095 bp, synthetic construct
  misc_feature 1..1095: note = Description of Artificial Sequence: Synthetic coding sequence
  source 1..1095: mol_type = other DNA
atgggaatcctggaaaaaatctctgagatagagaaagagatcgcaaggactcagaaaaataaggctactgagtaccacctggggttgcttaaggccaagctggcaaagtacagagcccagttattggaaccctcaaagtctgcttcgagtaagggagaagggttcgatgttatgaaatccggagacgccagggtggcgctcataggatttccctctgtggggaaatccacgtttttgtcccttatgacatccactgcatctgaagcggcatcttacgaatttaccaccctcacttgcattccaggggttatcgagtacaagggagcgaacatacagctgctagatctccctggcattatcgagggcgctgcacagggcaagggtcgcggccgtcaggtcatcgccgtggcccgaacagcggacgtgataattatgatgctggatgccaccaagggcgaggtccagcggagccttctagagaaggaactggaaagtgtcggcattcggctcaataagcacaagccaaatatctacttcaagcccaaaaaaggaggcggcatttcctttaatagcacagtcacactgacgcagtgctcagagaagctggtccagctgatcctgcacgagtacaagattttcaatgctgaggtcctctttcgggaagactgttcacctgatgaatttatcgatgtgatagtaggaaatcgggtttatatgccttgcttgtatgtgtacaataagatcgatcaaatttcgatggaggaggtagatagattagctcgaaagccaaattcggtggtgatctcgtgcgggatgaagttgaacctcgactaccttcttgaaatgttgtgggaatacctggccttaacttgcatatatacaaaaaaacggggacagcgccctgattttacggatgcaattatcctgaggaagggggcctccgttgaacacgtatgtcatcggatacaccgctctttggcatcacagttcaaatacgctctggtctggggaacctcgactaagtactcaccccagcgcgtgggcctgacacacacaatggagcatgaggacgttattcaaattgtgaagaaatag

SEQ ID NO: 106669 - DNA, 1815 bp, synthetic construct
  misc_feature 1..1815: note = Description of Artificial Sequence: Synthetic coding sequence
  source 1..1815: mol_type = other DNA
atgcggggtgcaggaccaagtcccagacagagtcctagaaccctgcgtcccgaccctggccctgcgatgtcattttttagacggaaggtcaagggtaaagagcaggagaagacatccgatgttaagtccatcaaagcctccatcagcgtgcattctccccagaaatcaaccaaaaatcacgccctgttagaagccgctggcccatcccatgtcgcaatcaatgccatctcggcaaatatggattctttctcttcctcccggaccgccacactcaaaaagcagccctcgcatatggaagccgcacacttcggcgatctcggccggtcatgcctggattatcaaacacaggaaaccaaaagctccttatcaaagacactcgagcaggtgcttcacgataccattgtcctgccttactttatccaatttatggaacttaggcgaatggagcacctcgtgaagttttggctggaggccgagtcattccactcgacaacatggtctaggatcagggcccactcccttaataccgtaaaacagagtagcctcgctgagcccgtgagcccttcaaaaaagcacgaaacaaccgcttccttcctgacagacagcctcgacaagcggttggaggattccggttccgcacagctgtttatgacacacagcgagggtattgacctcaataatcgcacgaattccacccagaaccatcttctgctgtcacaggagtgcgatagcgcacactcccttcggctagaaatggcaagggccgggactcaccaagtctcaatggagacacaagaatccagctcaactttaaccgtcgcttcccgcaactcccccgcttcccccctgaaggagctaagcggtaagctgatgaagtctattgagcaggacgctgtcaacactttcaccaagtatatttccccggacgccgcgaaacctatccccataacagaggccatgcggaatgatatcatcgcccggatctgcggtgaggacgggcaagtggacccaaactgcttcgtgttggctcaaagcatagtgttctctgccatggagcaagaacacttttcagaattcctgcgctctcatcacttctgcaagtatcagatcgaagtcctcacatctgggaccgtgtatctggctgacatcctgttttgcgaatcagccttattctacttcagcgagtacatggagaaagaggatgccgttaacattcttcaattttggctagcagccgataattttcagagccagctggctgcgaagaaagggcagtacgacggccaggaagcccagaacgacgccatgatactgtatgacaaatactttagtctccaagccacacacccgctggggttcgatgacgtggtgcggttagaaattgaaagcaacatatgtcgggagggcgggccactgccgaactgctttaccactccccttcgccaggcctggaccactatggaaaagtcgtcggtcaagaaagcatccattaagattctgaaaaatttcgatgaggccattattgtggatgctgcaagtcttgatcctgagtctctttaccagcgcacctacgccggcaagatgacgttcggacgcgtgagcgacctgggtcagtttatccgggaatctgagcccgaacctgatgtgaggaaatctaagggttccatgttttcgcaggccatgaaaaaatgggtgcaaggtaataccgatgaagctcaggaggagcttgcctggaagattgcgaagatgattgtctcagacataatgcagcaggcccagtatgaccagccccttgaaaaatcaaccaaggtctag

SEQ ID NO: 106670 - DNA, 8454 bp, synthetic construct
  misc_feature 1..8454: note = Description of Artificial Sequence: Synthetic coding sequence
  source 1..8454: mol_type = other DNA
atgaaacttaaccctcagcaagccccactttatggcgattgtgtagtaacggtgctgctggccgaagaggacaaagctgaggatgacgtggtcttctatcttgtcttcctaggttcaaccctaagacattgcacatccactagaaaagtttctagtgataccctcgagacaattgctcctggccatgactgttgcgaaactgttaaggttcaactgtgcgctagtaaggagggcttgccagtttttgtggtggcggaagaagattttcatttcgtgcaggatgaagcctacgacgctgctcaattccttgccacttcagcaggcaatcagcaagcgctcaacttcactcgcttccttgaccagagcggacctccgtccggtgatgtgaacagcctggataagaaactggttctggcctttagacatttgaaacttcccaccgagtggaacgtgctggggacagaccagagtttgcacgatgccgggccacgggagaccctcatgcacttcgcagtgcggttaggcctgctaaggcttacttggtttttactccagaagcccggaggacgcggggctctgtcaatccataaccaggaaggggcaactcccgttagtcttgcgttggagcgcggctaccataaactccatcagctattgacagaagaaaatgctggggagcccgattcatggagcagtctgtcgtacgaaattccatacggagactgttctgttcgccatcaccgggaattggacatctacacacttacttcggaatctgattcacaccatgagcacccctttcccggggacggctgtactggccctatttttaaactgatgaacatccagcagcagttgatgaaaaccaatctgaagcagatggattcgctcatgcctctcatgatgacagcccaagatccgtccagtgcgcccgaaactgatggccagtttctcccttgcgcccctgagccgacggaccctcagcggctatcatcgtccgaggagacagagtctacacagtgctgtcccggctcaccagttgcccagacggaatctccttgcgacctctcttcaatagtagaggaggagaacactgaccggagctgccggaaaaaaaataagggtgtcgaacggaaaggcgaagaggtcgagcctgcacctatcgtggacagtgggactgtttctgaccaggactcttgcttacagtcccttcctgattgtggggtaaagggcacggagggactatcgagctgcgggaacagaaacgaggaaactggtaccaagtcttctggcatgcctaccgaccaagagagtctgagctctggcgacgcagttcttcagcgagacctggtgatggagccggggactgcacagtactcctcagggggcgagttagggggtatctcgaccacgaacgtttctacacccgatacagcgggcgaaatggagcatggccttatgaatcccgacgccactgtttggaaaaatgtgctacagggcggggagtccacaaaggaaagatttgagaattcgaacatcggaacagcaggagcttcagatgtgcacgtcacctccaaacccgtcgacaaaattagtgtgcccaactgtgctcccgcggcatcttcgctggatggcaacaagcccgctgagtcgtcattagcgttctcaaatgaagaaaccagtaccgaaaagacagccgaaaccgagacatctcgtagccgggaggagtctgccgacgcccccgtggaccaaaattccgttgtgattcccgccgccgcaaaagacaaaatctccgatggcctggaaccatatacactgctggcagctggaatcggagaagccatgtctccatccgacctcgcccttctggggctggaggaagatgtcatgccccaccagaatagcgaaacgaactctagccacgcccagagccagaagggcaaatccagcccaatctgcagcaccactggtgatgacaaactatgcgcagacagcgcctgccagcagaatactgtgaccagttcaggcgacctggtcgcaaaactttgtgacaacatcgtctctgaaagtgaaagcactaccgctaggcaaccttcctcacaggaccctcctgacgcctctcattgtgaggacccgcaggcccacaccgtcaccagcgatccagtcagagatacacaagagagagctgatttttgccctttcaaagtggtggataataaaggccagcggaaggacgtgaagcttgacaaacccctgacaaacatgcttgaagtagtctcccatcctcatccagtggtccccaagatggagaaagagctggttccagaccaagcagtgatctcagatagcacattttctttagccaatagtcccggttccgagagcgtgactaaagatgacgcgctcagtttcgtcccctcacaaaaagagaaaggcacagctactccagagctccacacggccacagactacagagacggccctgacggcaacagcaacgagccagatacacggcctcttgaagatcgagctgtcggactgtccacaagcagcacagccgccgagcttcagcacggaatggggaacacatcccttacaggcttgggcggagagcacgagggccccgctccgccagccatacctgaggccctgaatattaaaggcaacaccgatagcagcctgcaaagcgtgggaaaggctacgctcgcgcttgacagcgtgctgacagaggaaggcaaactgctggtcgtatcggagagctcagctgctcaagagcaggataaagacaaggccgtaacgtgctcatctattaaagaaaatgctctcagtagcggcaccctccaggaagagcagcggacaccccctcctgggcaggatacgcagcaattccatgagaagagcatctctgccgattgtgccaaggacaaggctctgcagctgagtaactcacctggggctagttctgcttttctcaaagctgagaccgagcataacaaagaggtggcccctcaggtgtccttattaacccagggaggcgctgcccaaagtttggtgccccccggggcaagcctggcaactgaatcacggcaggaagcccttggggctgagcataacagttctgccctgttgccgtgcctcctgcctgacgggagtgatggtagtgacgccctgaactgttcacaaccctcgcctctggatgtgggagttaagaacacccaaagtcagggcaagacgtccgcatgcgaggtttctggcgacgtcaccgttgatgtcacgggcgttaatgctctgcagggtatggcagaacccagacgggagaacatttcccacaacacccaggacattcttataccgaatgttctgctgtcccaggaaaaaaacgcggtcctgggcttaccggtggcgctgcaggataaagccgtcaccgatccacagggagtgggaacccctgagatgatccctctggattgggagaaaggaaaacttgagggagctgaccactcatgtacaatgggagatgccgaggaagcgcagatagacgatgaagctcaccccgtgctacttcagccagtagcaaaggaactcccaaccgacatggagctgagtgcccacgatgatggggcccccgcgggggtgagggaagtgatgcgggcccctccctccggaagggaacgctccaccccatctctgccttgtatggtctccgcccaagacgcccctctgccaaagggcgcagatctgatcgaggaagcagcatccaggatcgtagacgctgtcatcgagcaggtcaaagccgccggcgccttgctaaccgagggcgaagcttgtcacatgtcattgagctcaccagaactgggccccctcactaaaggactggaatctgcgtttaccgaaaaagtcagcaccttcccacccggcgaaagcctcccaatgggatccactcctgaggaagcaacaggttccttggccggatgcttcgctggacgagaggagcctgagaagattatcctgcctgtgcaggggcccgagccagccgccgagatgccagacgtgaaagctgaagacgaggtcgactttagagccagctctatttctgaggaagtggctgtcggctccatagccgctacactaaaaatgaagcagggtcccatgactcaggccatcaatcgtgaaaactggtgtacaatcgaaccctgtccagacgctgcatcgctgctagcctctaagcaatccccagagtgcgagaattttctggatgtcgggctgggaagggaatgcacatctaagcaaggcgtcttaaaacgggagagcggcagtgacagcgacctgttccacagtccatctgatgacatggactctatcatcttcccaaagcccgaagaggaacaccttgcctgtgatattaccgggtcctcctcttcaaccgacgacactgcctcacttgatcgacactccagccacggatccgatgtctcactctcacagatcctgaaacccaacaggtcgcgggatcgccagagccttgatggtttctacagccacggaatgggtgcagaaggtcgggaatccgagagtgagccagctgacccaggcgacgtggaagaagaagaaatggattccataacagaagtccctgccaactgtagcgttttgagaagttcaatgcggtccctctctccttttagaaggcattcttggggacccggcaagaatgccgcttccgatgccgagatgaatcatcgatccatgagttggtgtccaagcggagtccagtacagtgctggactgtccgcagactttaactataggagtttctctctcgaaggcctgactgggggtgccggggtgggcaacaaacctagcagctcattagaagtttcctccgcgaacgccgaggagcttcgccaccctttcagtggcgaagaaagggtcgatagtctggtgtccctcagcgaagaagacctggagtccgatcagcgagaacatcggatgtttgatcaacaaatctgccacagatcaaaacagcaggggttcaactactgtacatctgctatctcttcaccattaaccaagtcgattagtctgatgacaatttctcacccaggcctggataacagccgacctttccactctaccttccataatactagcgcaaatctgaccgagtcaataaccgaggagaactacaactttctcccacactcgccatctaaaaaggattccgagtggaaatcaggcacaaaagtctctagaacattctcctatatcaagaataagatgtccagcagcaagaagtccaaagagaaggagaaggaaaaggataagattaaggaaaaagagaaagactccaaggacaaagagaaggacaaaaaaaccgtgaatggacacacttttagctctattcctgtcgtcggtcctatcagctgctctcagtgcatgaagcccttcaccaataaggacgcgtacacctgcgctaactgctctgccttcgtgcataaggggtgccgggaatccctggcttcttgcgcgaaggtgaaaatgaagcagccaaagggatccctgcaagcacacgatacgagctccctgcccacagtgattatgcggaacaagccttcccagccaaaagagaggccgagatccgccgtcctgcttgtggatgaaaccgctactacaccaatcttcgccaatagacgttctcagcagtcagtcagtctaagtaagtcagtttcaatacagaacatcacaggtgtcgggaacgatgagaatatgtctaacacttggaagttcctgtcccacagtacagactcactcaataagatcagcaaagtaaacgagagtacagagagcttaacagatgagggagtcgggaccgacatgaatgagggccagctccttggagattttgagatcgagtcaaaacaactagaggctgaatcgtggtctcggatcatagactccaagttcctgaaacagcaaaaaaaggatgtagtgaaaagacaggaagtcatctacgagctgatgcaaaccgaatttcatcacgttcgcaccctcaagattatgagtggagtgtatagccagggtatgatggccgatctgctgtttgaacagcagatggtggaaaaactctttccatgcctggatgagctcattagcatacattcccaattttttcagcggattctggagcgtaagaaagaaagcctggtggacaaatcagagaaaaatttcttgatcaagcgtattggcgatgtgctagtcaaccagttcagtggagaaaatgctgagcgcctgaagaaaacttacggaaagttctgcggacagcataaccaatcagtaaactacttcaaggacttgtacgccaaagataaacgctttcaggcttttgtgaagaagaagatgtcctcttccgtcgtgcggcggctggggattcctgagtgcatactcttagttacgcaaaggatcacaaaatatccagtgctgttccaacggattctgcaatgcaccaaggataacgaggtcgagcaagaggatttagcccagtctctttccctagtcaaggacgtgataggggccgttgatagcaaggttgctagttacgaaaagaaggtgaggctgaatgagatctatactaagaccgacagtaaatcgattatgaggatgaaatctgggcagatgttcgcaaaggaggatcttaagcgcaagaagctcgttcgcgacggttccgtctttttaaagaatgccgccggccgcctgaaggaggtccaggctgttctccttaccgacatcctggtgttcctccaggaaaaagatcaaaagtacatcttcgcctcccttgatcagaaatctacggttattagtctgaaaaaactaatcgtccgcgaagtggctcacgaggagaagggtctattcctgatttccatggggatgactgatccggagatggtggaggttcacgcgtcatccaaggaggagcgaaatagctggatccagatcatacaggacaccatcaacactctgaacagagacgaggacgaggggattccctctgagaatgaagaggaaaaaaaaatgctggatactagagcgcgggaactgaaggagcagctgcaccagaaagatcagaaaatcttgctccttcttgaagagaaggagatgattttcagggatatggcagaatgctcaaccccactacccgaagattgctctcctacccatagtccacgcgttctgttccggagcaataccgaagaggctcttaaaggtggccccttgatgaagagcgctatcaacgaggtggagattctgcaggggctcgtatcaggaaacctcggaggcaccttggggcccactgtgagttcgccaatcgagcaggatgtcgtgggccccgtttctctcccacggagggccgagacatttggcggttttgattcccatcagatgaacgcttctaaaggtggggagaaggaagagggagatgacgggcaagatctccggaggactgaaagcgactcgggactcaagaaagggggcaatgccaacctcgtgttcatgctgaagagaaacagcgaacaggtggtccagtccgtggtgcatctgtatgaattgctgagcgctctgcagggcgtggtgctgcaacaggactcttatattgaagatcagaaactggtcctctcggagagagcattgacaaggtctctgtccagaccctcctcgctgattgagcaggagaagcagaggtccctggaaaagcagagacaggatctcgccaacctgcagaaacagcaagcccagtacttagaagagaaacgcagaagagaacgagagtgggaggcacgcgagagagaactgcgggaaagggaggcactgctggcccagcgggaggaagaggtccagcagggccagcaagaccttgagaaggagcgcgaagaactccagcagaagaagggcacctaccagtatgatctcgaaagactcagagcagcccaaaagcagctggaaagggagcaggaacaactgaggagggaggcagaacgcctaagccagaggcaaactgagagggatctgtgccaagtctctcacccccataccaaactcatgcgcattccctcatttttccccagccccgaagagccaccgagtccctcggcacctagtatcgctaaatccgggagcctagactctgagttgtctgtgagtccaaagaggaacagcatctctcggacgcacaaggataaaggaccttttcacatcctgtcttctacatctcaaactaacaaaggccccgaggggcagtctcaggctcccgcttcgacctctgccagtactcgcctcttcgggctcacaaaaccaaaggaaaaaaaggagaagaaaaaaaagaacaaaacctctcgtagccagcccggggatggacccgcttcagaggtttcagccgaaggggaggagatattctgttag

SEQ ID NO: 106671 - DNA, 3177 bp, synthetic construct
  misc_feature 1..3177: note = Description of Artificial Sequence: Synthetic coding sequence
  source 1..3177: mol_type = other DNA
atgtcatcctctaagaagtcaaaggaaaaagaaaaggagaaagataagatcaaggagaaggaaaaggactctaaagacaaggagaaggacaagaaaacagtcaatgggcacacctttagttcaattccagtggtcgggcccatatcctgttcacaatgtatgaagccattcaccaataaggatgcctatacctgtgccaactgttcggcatttgtccacaagggttgcagagagtctctggccagctgcgccaaggtcaaaatgaagcagcctaagggatcattgcaggcacacgacacttctagcctccccacagtcattatgcgtaataaaccctctcagccaaaggaacggcctcgctccgccgtgctattggtcgacgaaacagccacgaccccaatctttgctaaccgacgttcgcaacaaagcgtttccctatccaagtcagtgagcattcaaaacatcaccggggtggggaacgatgaaaatatgtccaacacttggaagtttctgagccacagtaccgactcacttaataagatctccaaggtgaatgagtcgacagagagtctgaccgacgaaggcgtcggaacagacatgaatgaaggacagttattgggagactttgaaattgaaagcaaacagctcgaagccgaatcttggagccggatcatcgactcgaagttcctgaaacagcaaaaaaaagatgttgtgaaacgacaggaagttatctacgagttgatgcagacagaatttcatcatgttcgcacgctaaagatcatgtctggagtatatagtcagggcatgatggccgatctgctgtttgagcaacaaatggtagagaaactctttccctgtttagacgagttgattagtatacacagtcagttttttcaaagaatactggagaggaagaaggaatctctcgtggacaaatcagagaagaacttcctcatcaagcgcatcggcgacgtgctggtgaaccagttctctggtgagaacgccgagcgcctcaagaagacttacgggaaattttgcggccagcataaccagagcgttaattactttaaagacctttacgccaaagataaaagatttcaggcctttgtgaagaaaaagatgagcagcagcgtggtaagacggcttggaatcccggaatgtatcctcttagtaactcagagaatcacaaaatacccagtgttgttccagaggatcttacagtgtacgaaggacaacgaggtggaacaggaggacctcgcccagtccctgtccctcgtaaaggatgttataggggctgtagactcgaaggttgcctcatatgagaagaaggtgcgcctgaacgaaatttatactaaaacagattcaaagtccattatgagaatgaaatctggccagatgtttgcaaaggaggatctcaaacggaagaagctagtgagagatggctctgtctttctgaaaaatgccgccggaagactgaaagaggttcaggctgtgttgttgactgacatcctggtgttccttcaggagaaagatcagaagtacatctttgctagcctggaccagaagtctacagtaatcagccttaaaaaacttatcgtccgagaagtcgctcatgaggaaaaaggattgttcctgatctctatgggaatgactgaccctgagatggtggaagtccacgccagctcaaaggaagagcgaaattcctggatccagattatccaagatactattaacacattgaacagagacgaggatgagggtatcccgtctgagaatgaggaagaaaagaagatgttagacacacgagcccgcgaactcaaagaacagttgcaccagaaggatcagaaaattttgctcttgttggaagagaaagagatgatattccgagacatggctgagtgttcgactccccttcctgaggactgcagtcccacacatagccccagggtgctgttcagatcaaacacggaggaggccctgaagggcggtccactgatgaagtccgctatcaatgaagtagagattctgcagggacttgtgagcgggaacctcggcgggacccttgggccgacggtttcctcacccattgaacaggatgttgtcggccctgtatctcttccacgcagggctgaaacattcggtgggttcgactctcatcagatgaatgcctccaagggcggagaaaaagaggagggggatgacggccaggacctgagacggacggagagcgacagtggactgaagaagggcggcaatgcaaacctagtttttatgttgaagcgcaattctgagcaggtggtgcagtctgtagtacacctctacgaattactctcagccttacagggcgtggtcctccagcaagatagttatatagaagatcagaaactagtgctgtcagagagagccctgactcgttctctatcacgcccttcctctctcatcgaacaggagaaacagcggtccctggaaaagcagcggcaggacctggctaacctgcagaagcagcaagcgcagtacctggaagaaaaaagacggcgagagcgggagtgggaggcgcgcgaacgggagctccgggagcgagaggccttgctcgcacagagggaggaagaagtacagcaaggtcaacaggacctggaaaaagagcgggaagagcttcagcagaaaaaaggtacctaccagtacgacctggaaaggctacgggcggcccagaagcagcttgaacgagagcaggagcagctgcggagggaggccgagcggctgagccagagacagaccgaacgggatctgtgccaagtctcgcacccccacacaaagctcatgcgaatcccctccttttttcccagtcctgaggagcccccttccccaagtgcgcccagcatagccaagtccggcagtctggactcggagctgagcgtatcccccaagagaaacagcatcagcaggacacacaaggacaaggggccctttcatatactgagttccacatcccaaacaaacaaaggtcccgaaggtcagtcgcaggcgccagcaagtacctccgcttccacaagactcttcggcctgacaaagccaaaagagaagaaggaaaaaaaaaaaaagaacaaaaccagtcggtcccaacctggtgacggcccagccagtgaggtgagcgccgaaggtgaagaaattttctgctag
